United States Patent Application Publication US 2005/0208558 A1 - sequence listing, part 33

SEQ ID NO: 35688 - protein, 354 aa, DROSOPHILA
MKQFVVLMCLVALTATAPQGYKYQPQLPALPIGNLRPLTPISSSGIYASGAVPSFPQAGAQPAIGVQPAIQAVQTIVAAPAPAPAPAPLSISLPKETFLTASPQQNLISTVQQQPQQIVYQQQPQQALQTQFVQRPAIVTKDIYIHSAPEENEELRQDEPLLENVPIRKNYRIVFIKAPSQNLKYTAAALKRAQSSNEEKTVIYVLSKKPDLTEIQQQLQVTQSEAKVQKPEVYFIKYKTQEEAQRAQQEIQAQYDALGGATHISDEGVAPIASVSSGSLNLGSFVPQHSQAGQTIIHSQAPTIIQPQGQPIVQLQSINQGVQGVQQQSSFVQKSTSSFAPSAPSRKYVPAKTF

SEQ ID NO: 35689 - DNA, 2815 bp, DROSOPHILA
tcatgagttcattttttcatccctttttaaaaattttctaataagtacattaattcattaagtaaacatctaaacaaacgacagtctaattttaaaattgttaatagatgtaccaaaacctcttaactgtttttatttcaaataaaataaaaaatgtaagaatcttttagttaaagaatgttaaagttaaattactcgactatcagatacccgttactcagctagttttctgggatatcgatagatattggggaataaaatgagaacaaattgaaaaaattgtttcaaagtatgggtgtgatttgtttggcggctttagggcgttaaaatgtgcgaggcaacatgggtcaacaaacttgcgctgcgtccatgtttttagaatctttatgcttaatctgaagcttttatagtttctgagatcgagacgatcataccgacagacggacatagccagatcgactcggctcctgatcaaaaacatatatactttatatggtcggaaacgcttccttctgcttgttacatacttttcaacgaatcgagtatacccttttactctacgagtaacgggtataattaggcttggaaggttttaatggataagttggacttttatgcctgtatggctgtatgtactgtgtatgtatgtacatatgtactgtgttgattgtcaacagatacctccattttcaaattattttattaattacatctaaaaaaccaccgttggattaaaacaattttaaagcgattgatgtagtcaaatacaaaatgctatcttgattttactttgtgtcaatcacattggtggcgtaatttagagagttaatttgggatacgaattgaaactgcgaattgaagtgggccatttagaatagcgaaaacgaatattcctgaaaaactgccacactgcattgaaattcaacattaacgtaatttattaataacaacacttgtaacagaggactcaatgctaagatttgggaaccaagctcaaaagttagaaattgggtggcaggtatgcattgcccgtgtgcgatccggcagtgccggtggagacgatctgaccagctcctgtggcgcccacaacggatccgccgtcgatgtgaccgtcactgccacccagcgctccaatcacggatgtgactggggccactccctcatcggtcaactggctactgccgcccagagcgtcgtactgggcttggatctgctgctgggcgtgggcggcctcttcgttggtcttgtacttgatgaagaagacctccggcttgctggtggagctggcctgctccactacctcggcgttcaagtcgctttcgcccttcttgctcagcacgtagatgacggtcttctcctcgttggcggcggggctgatcttgatggtcttcctgttgttgcgctgcggcgacttgatgaacaccacgttgtagttgcgcttgggcacgccgacggtgatgtgacgttccttgtaatcctcagcctcctccggggcggagtggatgaagaagcgcttggagacgatggcctgctgctgctgcacctgctgctgctggtggtggtgagtctgtgcggcaggctgttggtagacggcctgcggttgcacgggggcgacctggacggcgccttggaagaaggagcctccaccggtggtggtgctgatgccaccgaagccggacgggccagggttatagttgtagccctggggtgcggctagagccacggagcaaaggcataggacctaatgagcaaaaataaaaggattagtccggtaagtaattagtcctgcgtccgccttacaatgaatccactcatttctaggcttggttgagctggtagagtgggatagggaggactaaaggtttgacttctttagtggttgatagtaaactgtatgccttcttgcccgctcgagctgcttttatacatagctcacaattccagcttcgacgctgccactcgaaagttaataggtgaagttcagcaaaatccgctgcagagccccgaaaagagtcgtggtccgcatgaaagctgccaaaaagagctcgcagcctccatttgttgcatgttcatcgtatttgttttagtttgcgtcgtcttttgctcttcttcgccattcaccttcgagccccttccatccctcattaaatggcgagacttgcttgtagttgctggcaatacatggccaattagcgtggttcccccagcagagtctttgttgtggcgcttaattgttagccccgatactccggtccatcgactccccgatgcggtcattacggagcgagtcgaagcgtttggcgaatgaccaccgctgcccagtgcgtcgattaagtggtattaaaagtgtaattgcacaagcgtccggagctggtagtcgtagtgctcccccacgtcgcgtaatcgtaatcccaactcctagctacggagaagacatttgtgtcccggcgccgtgccgaaagaagttcacttcctaaactccactccgcaccactgatgctccggtgatgcgagatgtcaagcttaattaatggtccgcagagcggaatatttgcccggttgttcaaaccgatcgtttcttcaccggctgcaacgaaactcatttttcatgtctagcggtcagccccaactttcttgggaataaatagccctttgattatgacttcaaagagttttgttcacatttctgcagtgatttctaggtcttctccgtgctaaggggatgtgcaccacgaacacttgccgttggtgtaataaactgaagcggctggtctggcaccgcagaccctcagttttcgaggtaccctaatgatcg

SEQ ID NO: 35690 - DNA, 756 bp, DROSOPHILA
atgagtggattcattgtcctatgcctttgctccgtggctctagccgcaccccagggctacaactataaccctggcccgtccggcttcggtggcatcagcaccaccaccggtggaggctccttcttccaaggcgccgtccaggtcgcccccgtgcaaccgcaggccgtctaccaacagcctgccgcacagactcaccaccaccagcagcagcaggtgcagcagcagcaggccatcgtctccaagcgcttcttcatccactccgccccggaggaggctgaggattacaaggaacgtcacatcaccgtcggcgtgcccaagcgcaactacaacgtggtgttcatcaagtcgccgcagcgcaacaacaggaagaccatcaagatcagccccgccgccaacgaggagaagaccgtcatctacgtgctgagcaagaagggcgaaagcgacttgaacgccgaggtagtggagcaggccagctccaccagcaagccggaggtcttcttcatcaagtacaagaccaacgaagaggccgcccacgcccagcagcagatccaagcccagtacgacgctctgggcggcagtagccagttgaccgatgagggagtggccccagtcacatccgtgattggagcgctgggtggcagtgacggtcacatcgacggcggatccgttgtgggcgccacaggagctggtcagatcgtctccaccggcactgccggatcgcacacgggcaatgcatacctgccacccaatttctaa

SEQ ID NO: 35691 - protein, 251 aa, DROSOPHILA
MSGFIVLCLCSVALAAPQGYNYNPGPSGFGGISTTTGGGSFFQGAVQVAPVQPQAVYQQPAAQTHHHQQQQVQQQQAIVSKRFFIHSAPEEAEDYKERHITVGVPKRNYNVVFIKSPQRNNRKTIKISPAANEEKTVIYVLSKKGESDLNAEVVEQASSTSKPEVFFIKYKTNEEAAHAQQQIQAQYDALGGSSQLTDEGVAPVTSVIGALGGSDGHIDGGSVVGATGAGQIVSTGTAGSHTGNAYLPPNF

SEQ ID NO: 35692 - DNA, 3571 bp, DROSOPHILA
accctgcgagtcgtcttcattctcattctcgcttgacgacttgggctgggccgtttccgaaaccagttgcacgatcctgcccagctttatcatgtgctgcttcttccgctccttcaccggtacgtatggcacgtagtcctcgttgtccaggtcgccttcctccgaggacttagacgacctccgataccgctttacgtgcgccatagcattcgatctatatttctgatttttgtttgtttcgttttcgcctaatttgactacaacaaaggccaccgtacgacgttttaaattaggcgagcccgaaaaatactatattctaatgggtatcgattacagttattaaacagtgattccactgacagcttcttgcttatgatatattcatggcatgcagaccggataatagtttttttttcaatttgggcaaaatctttcgatttcgtttttaggtgctctggttttctgagtttgagattgagtctttctttttttgtgaaaaccaagcaacgtgaaaaatgcaacttttagcgcgaaggttgccatactgttggtgaaatataacaggcaggtaaaaatacttagtaaatatatttaaagcagggccaaaagtgctgttcgtaaataatgataattaattgaataacataagtggtcagagcgcagtgaatacgtaactgcgaacatcggaattaaaagtgccaaaaactctgtgtaaatcgcccagaaacattttatatgaacttatgcgtgctatcaaaagtgtttcaggaacatttctgttaaacggttagcgaacatgaatagtacagaatagtagaatatcgtattgatcggtttcggatcagtcgaatgcaatatatttttgtgtgcatttgggtatagatatatattctaagcagtgtgaatatgctattaaattcaataaattatatcgattgctgactttgaactaactgtctgcttctggctcaacttatcgatattggtatatcactcgcgacacaccaccattttcgacaagtagaaagcgaatgagcattgtctaaatttagctcggattttaagtgcaaggtacataagtgccgctgctatgtctatgtcaaaaacgactaacacctataaccggcagaactgggaagatgctgaattcccaattctgtgccaaacttgccttggcgacaatccgtacgtgcggatgattaaagagcggttcggcaaggaatgcaagatatgcacgcgtccattcacaatatttcgatggtgtcctggtgctcgtatgcgcttcaaaaagacggagatatgtcaaacgtgtgcgcgcctgaagaacgtgtgtcagacctgcctcttggacctggagtacggactgccgattcaagtacgagatgcggcgctcaaagtggctgacaatatgccacaaagcgacgttaacaaggaatactacatccaaaacatagacgcccagctgcaggacggagatggcacggaggcggcaggagctgtcggtcgatccctcgccgccaacgagatgttgtccaagcttgcgcgcacagcaccctattacaaaagaaatcggccgcacatctgctccttttgggttaagggcgagtgcaagcgtggagaggagtgcccataccgccacgacaagcccaacgagccggacgatccgctatgtgagcaaaacatcaaggacaggtactacggacgcaacgatcctgtggccgagaagatcatgaagcgtgcagcctcgcttcccacactcgagccgccggaggaccgcaacatcacaactctctatgtggggaaccttcctgaagaaatcacggaacccgagctgcgagatcagttctaccagttcggcgaaattcgatcaattgcgctggtgccacgccagcagtgcgcttttgtgcaatacaccaaaagaaacgctgccgagctggctgctgagcggacctttaataaactggtgatccagggccggaaggtgagcattaagtgggctcactctcaggcaaagcagggcaccgctgcaaagacagacagacgcttcgacttggccggcattccaccgcctagcgcgaagcccaacgactacttcaatcttcgccaagagcaaatcaatgtcatgcccgccggcatgaagctgcatcagttgccatcaaatctagttccggcgtcggcttaccaaatgtatggtcagcctacttatgcagctccctacggaaacgccacttccacagccctttcttcctcgggtgtcaatttggattccatatcgattcctccgccaccgggtcaagtaccgtatccaagtcaggacgccagtcggatgggagctgttaaaaagtaggaaaaccctgtggtctacaatggttccaattcaataaatcatttttataaaattaaatacaaactttttaaagtggtcagttccataaaaatgacttaatattaatagaatttatccgtatggacgaaattgttttcgattcgaattgttaagaaaaaacaccaaacaattagagaggagaagataataataaatgatttaaactctaaaaaaaaaaagaaaaaaagaacaaattttcgtcacaaaagcttatatcaaaacttttgtacatatgtatgttgatgtgcgttcgtcactcgtttttacctttaataaatgcttttctttgatttggacgatatttgggattaaaaaaagtacaccaatgcacatgtacatatgtaagttcattcttcagtatttataggggaacttaacattgggattatgactacctccctgcattccattcattcagatttcatcagctcattactgatcattaaaaatctcgatcaaattaatcacaggttaatttgtattaaaaaaaaaaaccatgacctgaacctatgttctaggaaatcatcgcatagcgcaaaatcaaaatcacgcataagcgctataaatgatagctcaattcatctctctacacctctttttattcacttaatcctctatcaattttaatgaaaaagtgaaatttcagtcatttattaataaaaatgtattttcttaattagacttatttaaattatgcataggatttaaatttaagaatacaaatacatatatatgtatgtgaaattccagagtctttggcgtcctgtcctacggagttaggaccagcttcttttcagttcacatgtccgatttaccttaaggtaaaataatgtataattatgtatacaaaaacgagttaaaccaatttaccttaaattatcgtttctgtgagtagtgtttgttgcttattgtaaaataaatccattacctgtaattattattgaattaaattccaaaatatttacaatttttttttaaaacaagcactcaaaatcgcgtctacttctcacaaaagtctataggcaagtgatctgcaaacatgttctatgtacattacaaatttaaaatttaaatttaaatttgcaattaaataaaaaatcgcatactgagaccttcggttagaaattaaaaagcgatgaatttgttttcaaaatcatcgcttattcctcgttatgattaagaaca

SEQ ID NO: 35693 - DNA, 1571 bp, DROSOPHILA
cacaccaccattttcgacaagtagaaagcgaatgagcattgtctaaatttagctcggattttaagtgcaaggtacataagtgccgctgctatgtctatgtcaaaaacgactaacacctataaccggcagaactgggaagatgctgaattcccaattctgtgccaaacttgccttggcgacaatccgtacgtgcggatgattaaagagcggttcggcaaggaatgcaagatatgcacgcgtccattcacaatatttcgatggtgtcctggtgctcgtatgcgcttcaaaaagacggagatatgtcaaacgtgtgcgcgcctgaagaacgtgtgtcagacctgcctcttggacctggagtacggactgccgattcaagtacgagatgcggcgctcaaagtggctgacaatatgccacaaagcgacgttaacaaggaatactacatccaaaacatagacgcccagctgcaggacggagatggcacggaggcggcaggagctgtcggtcgatccctcgccgccaacgagatgttgtccaagcttgcgcgcacagcaccctattacaaaagaaatcggccgcacatctgctccttttgggttaagggcgagtgcaagcgtggagaggagtgcccataccgccacgacaagcccaacgagccggacgatccgctatgtgagcaaaacatcaaggacaggtactacggacgcaacgatcctgtggccgagaagatcatgaagcgtgcagcctcgcttcccacactcgagccgccggaggaccgcaacatcacaactctctatgtggggaaccttcctgaagaaatcacggaacccgagctgcgagatcagttctaccagttcggcgaaattcgatcaattgcgctggtgccacgccagcagtgcgcttttgtgcaatacaccaaaagaaacgctgccgagctggctgctgagcggacctttaataaactggtgatccagggccggaaggtgagcattaagtgggctcactctcaggcaaagcagggcaccgctgcaaagacagacagacgcttcgacttggccggcattccaccgcctagcgcgaagcccaacgactacttcaatcttcgccaagagcaaatcaatgtcatgcccgccggcatgaagctgcatcagttgccatcaaatctagttccggcgtcggcttaccaaatgtatggtcagcctacttatgcagctccctacggaaacgccacttccacagccctttcttcctcgggtgtcaatttggattccatatcgattcctccgccaccgggtcaagtaccgtatccaagtcaggacgccagtcggatgggagctgttaaaaagtaggaaaaccctgtggtctacaatggttccaattcaataaatcatttttataaaattaaatacaaactttttaaagtggtcagttccataaaaatgacttaatattaatagaatttatccgtatggacgaaattgttttcgattcgaattgttaagaaaaaacaccaaacaattagagaggagaagataataataaatgatttaaactctaaaaaaaaaaagaaaaa

SEQ ID NO: 35694 - protein, 416 aa, DROSOPHILA
MSKTTNTYNRQNWEDAEFPILCQTCLGDNPYVRMIKERFGKECKICTRPFTIFRWCPGARMRFKKTEICQTCARLKNVCQTCLLDLEYGLPIQVRDAALKVADNMPQSDVNKEYYIQNIDAQLQDGDGTEAAGAVGRSLAANEMLSKLARTAPYYKRNRPHICSFWVKGECKRGEECPYRHDKPNEPDDPLCEQNIKDRYYGRNDPVAEKIMKRAASLPTLEPPEDRNITTLYVGNLPEEITEPELRDQFYQFGEIRSIALVPRQQCAFVQYTKRNAAELAAERTFNKLVIQGRKVSIKWAHSQAKQGTAAKTDRRFDLAGIPPPSAKPNDYFNLRQEQINVMPAGMKLHQLPSNLVPASAYQMYGQPTYAAPYGNATSTALSSSGVNLDSISIPPPPGQVPYPSQDASRMGAVKK

SEQ ID NO: 35695 - DNA, 3585 bp, DROSOPHILA
aactacccattttatagttcatgttaagaatatttctcttgagaattgaaaaattcgctacatagaataatcactgtatatatatatatatgtacataatatacaatatatacatgtttcaagttcatcaaagcaagttatcacaggttcacacctaacgagaatacatgtttcaacttaatattttatcaatttattgaacacttttatactggatcccattaggtttttaattatgtaagcatgttatacactgcactataaaatgtatagttcaaatttaactgtttataatttttaattataagttgatgtcgtaaaaaatggttttaaccactcaaaacatgtatagaaaatttaaatcgcttggttatgaacccatatcatctgagtcatatttaaattgggttttgagtcaatataaaaagtgaaataaaaacatttttatgcaacggcacacattgattttcaaaaattaaaatattattttctgtaagtgcacgcattgattgtttaagctttgtataaaagagatgtatgcaagggcgcaaggcttagtccgtttttgagttttcgacaaaatgaagatactcaacgtaagtatgcacaaattaatgagcggaactgctcctaatggctcccatcgctgtccacacagttcataatcctgctagtcctggtgaccatcgctctatcagcccccgctgccgccacagacaatgctcctacggtatccgtgctgcgctacaaagatgatcgggatttggctaatattcagcgggcaattattgcgcagtacgaaagaattggcggcaccactaaggttcatcagccactgacggccaatatcgtcaacccagcaagccttggaattgtcatttaatgctcgtcaaaaataaattgtttgtatttgtgattgttagccccgctgataagacagagctgcgtgccttttgggattaaccgacccgcagaagttttagtctgctcttgacactcgccgcgttcgcagagcccttacgatgcttcgcaatctgtccgtgtgtctgatatcatttatcgggctctggtgcctgagcaatactcacacccagcgcctgcccccagaagggcgaatgcgccccttgcaagacgactcgatccgctctcccgtggaccgcgacatagtctttccggagttagacgcgggaccaggcaagcccgaggagaagatgtggtttcacataacagactttcaatttgatcgggtggagggcccgacccagcccaagcccaagcccagacaataccccccgccgccgatgcccggccagccctttccgccgccccccgggggctttaaaaagaaggaaaacaagcaacgccgcctctgcgagcaaagtaagtaattcgagtgttcagccattcgatggttcgtgagtcattgactgagtttatcaccaagaatattccgaatatgtggagcgcatctttcccaatgataccgcagtggctgccgatgccaacgacgcagacttcgatggtcgggtcctggcccggcccggtgagtacccacatatggtacgaaactaggtagctgataagcctctactgaggaactaacccaagcccctcgaatctgttttcgtaggctgccgtgggcttcgagtcggacagagggcaagtggactacaaatgtggcggcagcttgataagcgagagattcgtgcttaccgcagcccactgtacatccatatacgagtgagcatgccagttagccccctgacccccagtcccgtgactgtaattttcctcttagggcgccccccaagtgggttcgcatcggggaccttgacctggcctccgagaagcggtcggtggaggcccagctgcttcggattgagcaagtgttcgcgcacccaaattacaaaaaaaagatgtactatgacgacatagccctacttaagctggagaaggaagtggagtgggtacccaacaagacagaagtgcgaccgctgtttgctaacacgattctctaagactgacggaatacgttagacctgtccgcctgtgggtctttccagagctgcccactacgatagccttcgcaatggggtacggcgcaacgagcttcgccaagcccatgacgaaccgcctcacaaatcttaacctgaccgtagtgccgaacgctgagtgcaacgccgagctgccgcctcttgctgaaactcccagtggagttctggaaagccagatctgcgcccaggactacattctcaacagagacacttgccagggggactcgggtggacccctacaactgaatttgccgggtcggcgccgagggcatagaatacactatcacctaattggcatcacctcatacggcgtgttctgccgcagtagttacccatcagtttacaccagagtgtcttctttcttggactggatcgaacttactgtttgggcctgacagatgcctacatcaggtttgtatgatgttgatgaaatttaagccaaaatatatattaaaagaaatggtatattctttccatttatatttcgattcttcctatggcatctgtgtgtatgtatatggaccaatctagcccaacaactattttcacaggagatatttaaatacattgctacaacattacactagtgaattgtaaaaataaattgtgctaaacagtggccatattgaaatttattttaaagttatattagataaacataggtgttagaaaggcaaaaacaaacatattttttggtaaattttgctgagaattgaatcattggttttagacttcattgttggcatcaataacaagttgcttcatgtcttcatagctgggctggttctacgagaccaagaaaagggttaaaaatacatagaaattatataaatctattgtgtagcgactttacaattaagagaataggccatcagcattagtaatcagcttactgtacaagcaagcagttaaacgaagacaaactctaggtctggtttggatcacgtacctgccaataattatcgtcccagttggggaacatgcgtttgaaaacccttggttccttgccctgggggacgcgaatgatgctcaccgtgtcgaaggagcgggcggtaggctctaaattaaagtaaagctgtaaatcaagaaaagacgtataattagacgtgatagaaagcgatggtgggaaacgagaaaacctttgccgtgtccagaagcttcccattttcctcctcagacacgccatagccaacccaaaggtagatctcatcgccagcatccagtagcattatgtcgtccgagtccaagtcctcttgctcgtattgagcaacttcttcaaccttcaaaaatccaccagagctcagatgacagtggaaaaggcgcgactccagcagtggagctccatcgtcacccaagctgcggtcgtactggccttcgccgtttaattcctcccagaactcatctggctcggcaccctcctccacctgctcgagctcaacgtcgtcccagtagtcagaaaagcgatcaaccgctgcttgtttttcgaaggcagatgcgcccaagccattccaaatgtagattttgtgggact

SEQ ID NO: 35696 - DNA, 1337 bp, DROSOPHILA
ccgcgttcgcagagcccttacgatgcttcgcaatctgtccgtgtgtctgatatcatttatcgggctctggtgcctgagcaatactcacacccagcgcctgcccccagaagggcgaatgcgccccttgcaagacgactcgatccgctctcccgtggaccgcgacatagtctttccggagttagacgcgggaccaggcaagcccgaggagaagatgtggtttcacataacagactttcaatttgatcgggtggagggcccgacccagcccaagcccaagcccagacaataccccccgccgccgatgcccggccagccctttccgccgccccccgggggctttaaaaagaaggaaaacaagcaacgccgcctctgcgagcaaaaatattccgaatatgtggagcgcatctttcccaatgataccgcagtggctgccgatgccaacgacgcagacttcgatggtcgggtcctggcccggcccggtgagtacccacatatggctgccgtgggcttcgagtcggacagagggcaagtggactacaaatgtggcggcagcttgataagcgagagattcgtgcttaccgcagcccactgtacatccatatacgaggcgccccccaagtgggttcgcatcggggaccttgacctggcctccgagaagcggtcggtggaggcccagctgcttcggattgagcaagtgttcgcgcacccaaattacaaaaaaaagatgtactatgacgacatagccctacttaagctggagaaggaagtggaactgacggaatacgttagacctgtccgcctgtgggtctttccagagctgcccactacgatagccttcgcaatggggtacggcgcaacgagcttcgccaagcccatgacgaaccgcctcacaaatcttaacctgaccgtagtgccgaacgctgagtgcaacgccgagctgccgcctcttgctgaaactcccagtggagttctggaaagccagatctgcgcccaggactacattctcaacagagacacttgccagggggactcgggtggacccctacaactgaatttgccgggtcggcgccgagggcatagaatacactatcacctaattggcatcacctcatacggcgtgttctgccgcagtagttacccatcagtttacaccagagtgtcttctttcttggactggatcgaacttactgtttgggcctgacagatgcctacatcaggtttgtatgatgttgatgaaatttaagccaaaatatatattaaaagaaatggtatattctttccatttatatttcgattcttcctatggcatctgtgtgtatgtatatggaccaatctag

SEQ ID NO: 35697 - protein, 392 aa, DROSOPHILA
MLRNLSVCLISFIGLWCLSNTHTQRLPPEGRMRPLQDDSIRSPVDRDIVFPELDAGPGKPEEKMWFHITDFQFDRVEGPTQPKPKPRQYPPPPMPGQPFPPPPGGFKKKENKQRRLCEQKYSEYVERIFPNDTAVAADANDADFDGRVLARPGEYPHMAAVGFESDRGQVDYKCGGSLISERFVLTAAHCTSIYEAPPKWVRIGDLDLASEKRSVEAQLLRIEQVFAHPNYKKKMYYDDIALLKLEKEVELTEYVRPVRLWVFPELPTTIAFAMGYGATSFAKPMTNRLTNLNLTVVPNAECNAELPPLAETPSGVLESQICAQDYILNRDTCQGDSGGPLQLNLPGRRRGHRIHYHLIGITSYGVFCRSSYPSVYTRVSSFLDWIELTVWA

SEQ ID NO: 35698 - DNA, 3071 bp, DROSOPHILA
tcttatcttttgtctgcaagattaggtcggagaaaagcaccaggagttgccgatgcccacaatttgctgattgcgggggcgccacagctcgtgtgaacgggtggcttgcataataagtcgatcataagtgtgatgccgcagtatttgcgtactcgtaacggatcggggaagaaacgcacgccacacggtaatttgaagcgattgtgcttcatcttggcccgcactgccatttgtgttttgataaatctccagtcatatatcaaatcgtcagcaccacttacctggcccaacagggcccccaattatgacccatgctatgacggacattgatttaagcattaggacttgccttttttcgtcagctaaatgctgaaaatataatacagaaaatacatattatgttatagatcaaattgtgcaactatgtaccaattacaatttaataattgggtcatcggaaaccaaagcaatttctgaaattcattaagacatagtgaaaaagcgaaagttttccaggtagacgccattttaaatgagactattgtgtgatcaatgcaagttgcgattcgagattttgcgttgcaaaggttcgtcaattatgatcggccatcaacagcaacaaatatccaccatcatgatcacctcaaaagctagagaaatggatgtgccaaactaatctccacatttgtatgtgtccatcgcacaagacttccaactagacgacgctttcgacttggccctaagttgaagctcgagagctttagggttttgggtgagttcccaaaaagttaccgttacctcaaggttgtatgaaaacgcaagcgagttttcgtgcggcttgagcgtttgtggtttcagtttcatttaaactttgcgttgcggacacaactttttcgtaccgacattatcgagtcagcgacataaaagtctgggcggctagtgattagcatttagttgaattttgattgccaagggaccggtgtcttcaactcaatcggaaatgcatttcttcattgtaagccctctagtgtcagccgaggtgtccaagcaccaatagtaatgacttagttttataggtgccgtgcctcctaggacttgcagccggcattcctcaaggatacaactaccaagcccagcaacagcttcaatcgtcggcgcaagctggtcaactccatctgccttctattccgcagtttgccacccttgcggagcagacgatccttcagcaggcactccaggctccaaagttgcagcaggtcctgaccggaggagaagggctcgcatcttactcaaatcaaaaccaggcctccgcttaccaacagcaggcgacgcagttcggcccaaattcggcgtacaatgcgctgccccaggcacatcagcctcagcagcagcacctcgtctccaaggacatctacgtccatgtgccaccagcagaagagcccgaggaccgctaccctcagcccgtccttccgcccgcgcctccgcgcaagcattatcgcatagttttcatcaaggcaccgacgaccagtgtctcgaaggcggcgttgcgcatcaaacaggctcctgtggaggagaagaccatcatctatgtgctgaccaagaagccggacccactagatctccagactgccatcgaggaaatcgcgccgaagcagcccagcaagccagaggtatttttcatcaaatacaagacccaggaggaagctgcgcatgcgcaacgtaccattcaaggtgagcaacacccgcatcgagcagatgctatgagacacacttgaagacctcatcagtatgcaacagacctcaaatgtttcgatttgcaagcttcatagaaatgtctatcgaccaattaatctggcttgtccaaatttttattacccgatttttaaccgatttacttcttttagctcaatatgaccagcttggcggaacatcacaggtttctgacgagggagttgcacccgttacatccgtgattggcgtactggacaaccagcgcaacaacggaatttcatccggacagttttctggctccttgccaaacagctacttgccaactaatctgcgtgcttaggtacaactccaaggccactgtcgtaattttaagacttgaactcttgtaatttacacatttagttaaataaagttcatattttgagctccgccttatgatagaaagcgactctgcagccatattcaaatatgaaatcgagtttcaatacttcaaagtaacaaaatagttttctatggaccatgttaccacatccattagtccaatgacagccatccaagccgaaaaccggtcgcataaattagcatgtgatttgacttacataacaacgattaagccacacgaaaacttgattattatggctgttggcttaatgccaaaagagatggtccaaactttcttgcgagaaagaagtcattgtcatagtctcttagcccattgaaacatttttgtgataaaaataaacagcgttttcataagaaacattaaactcaagctatgccttaaatgaaagattaattccaaatcctaaaacaaaacctatctaaaatattaaaaggattaaacttaaaaacgagtactagaaacagaaggctttttgggtttcgatttaaatttttttatatttctttcgactttcgacttttgcattaaaaataaattaaaatttactacagtatgatggttgatataaaacaatgaaagcgataggattcttactacaactttttaaaaagtctttgccggcacatacttccttgatggcgccgagggagcgaatgaggaggtggacttctgcacaaaggagctctgctgctggaccccctggaccccctggttaatagactgcagctgaacaatgggctgaccctgtggctggataatggttggcgcctgagagtggatgatggtttggccagcttgggagtgctggggcacaaagctgcccaggttaagggagccactcgaaacgctggcgatgggagccactccctcgtccgaaatgtgggttgcacctcccaaggcgtcgtactgggcctggatttcctgctgggcgcgctgg

SEQ ID NO: 35699 - DNA, 837 bp, DROSOPHILA
atgcatttcttcattgtgccgtgcctcctaggacttgcagccggcattcctcaaggatacaactaccaagcccagcaacagcttcaatcgtcggcgcaagctggtcaactccatctgccttctattccgcagtttgccacccttgcggagcagacgatccttcagcaggcactccaggctccaaagttgcagcaggtcctgaccggaggagaagggctcgcatcttactcaaatcaaaaccaggcctccgcttaccaacagcaggcgacgcagttcggcccaaattcggcgtacaatgcgctgccccaggcacatcagcctcagcagcagcacctcgtctccaaggacatctacgtccatgtgccaccagcagaagagcccgaggaccgctaccctcagcccgtccttccgcccgcgcctccgcgcaagcattatcgcatagttttcatcaaggcaccgacgaccagtgtctcgaaggcggcgttgcgcatcaaacaggctcctgtggaggagaagaccatcatctatgtgctgaccaagaagccggacccactagatctccagactgccatcgaggaaatcgcgccgaagcagcccagcaagccagaggtatttttcatcaaatacaagacccaggaggaagctgcgcatgcgcaacgtaccattcaagctcaatatgaccagcttggcggaacatcacaggtttctgacgagggagttgcacccgttacatccgtgattggcgtactggacaaccagcgcaacaacggaatttcatccggacagttttctggctccttgccaaacagctacttgccaactaatctgcgtgcttag

SEQ ID NO: 35700 - protein, 278 aa, DROSOPHILA
MHFFIVPCLLGLAAGIPQGYNYQAQQQLQSSAQAGQLHLPSIPQFATLAEQTILQQALQAPKLQQVLTGGEGLASYSNQNQASAYQQQATQFGPNSAYNALPQAHQPQQQHLVSKDIYVHVPPAEEPEDRYPQPVLPPAPPRKHYRIVFIKAPTTSVSKAALRIKQAPVEEKTIIYVLTKKPDPLDLQTAIEEIAPKQPSKPEVFFIKYKTQEEAAHAQRTIQAQYDQLGGTSQVSDEGVAPVTSVIGVLDNQRNNGISSGQFSGSLPNSYLPTNLRA

SEQ ID NO: 35701 - DNA, 2826 bp, DROSOPHILA
gttttcgaggtaccctaatgatcgtttcatgttcagtcttcactgaagccaaaatcgatttcggagtcggtctggtgcaagagctttgtagtttgcccgctgaacacagcgggctcttgcgaaaattttagacgagtgagttagtgtattcaatctaacaaattctgggaaatacattattgattagggcagcatgttcctttagaagagaagtgcacattttgcacagtgtaagatccaatctactcgggttcagtgtaggtacgtaaattgctcataaatgaatacctaaaaaatataacataactaaaatgtaattatcttcggtataatataaataagaacgttgaaattaggccgatagattgtaggtgcagtgtgtacttaattcaagaaaagggcaacgcccacttcaacgtccacaagctgcctacttttgatatacgaataatattttggttatttttaaaaaagttttaattttatttatttaaaaatttttactctaaccaacaaaccaataaatgctcgcaagtcaacaatttcttttttctgatttatgtataatttcttttctgcagataagcacaagccaacaaagtaaagaaaaaacacttaagtaacaggtatctgatagtcgacatatataagcatataagcatatatatatataacatataagcctccgcttcccattaaaacccaaacggattcttttcacacataaactacccataatgcttttatcaaaactgtatttgagtttttgttatctatagtcgtagttgaatacactgtcaccttacacgatcttctaaatctaatgtaatggacaataatccgacgacccctgctttgcttgctcagagctcctcggtaaacgtgttccacgatgaatcactgttacctcagcgtaatgtaaaaacaagtaaatcccccaataaaagctaagatattccgagggactacagcaatttgcgatttcataggtgagaatgttccaccaacttgtgcggagaaaacgttgtttgtgctgtccatgattctgatagtcctttgcctgccgtggtccctattctgctgtctcagggtaatgtcggagtacgagcgagcggtaatcctgcgcctgggtcgcctgcgccctaagcccccgagggggccaggcgtcatctttctcgtgccctgcattgatgacctcgctgttgtggacatacgtaccaggtcatttgacctacatagacaggaaatcctcactcgtgacatggtgacgatcagcatcgacggagtggtgtactacagcatcaagagcccattcgacgccatgctgcaagtatacgatccggaggaggcgaccgagaagctagcaatgaccacgctgcgtaacgtggccggcacccacaagctaatggatttgctctcgtccaaggagtacctctccaaccaaatagagggtatattgtacaactccacagagccctggggcatacgcgtggaacgggtcgagatgtaagtactttttgtcttacaatggatcaataatgcgttatgatatattcggcagcaaggagatcttcatgcctgatcaactgaagcgcgccctggctgtggaacaggaggcgatgcgtgaggccaaggccaaggtggccgcggcgcagggggagcgagatgcggtaactgctctgaaggaggctgccgacataatggagaccaaccccatagccctgcagctacggtacttgcaaacactgaactccatctgcaatgatgacacccggtcctacgtctttccttttcctgtagacattgtgaggaatttgatgaagtaggattgaattcagaaaatgcgttccgtttttatgtacgttccatataaaaattacttacctattaaatagaatttagttcatctgaagaggggacccaatccgaaacatttctctggacacacagtttcgaaatcgtttaacaccatatattagaagcatactaccatcttacagtaaattaaatcgatattttctagcagataaggggaaatgccccagtactttgctttaaataagcaaaaaaaaaaccgtaacttcgataattgcttgccggatgtacaaatttcagatgctgtatttatttggtcaaggtgtattgtattgatacaatactattttcaactcaaggctcgttattagccacaaactcaaaagattacacgtactatacgacgtcactgtcgtagtatttactatttgctgtttatatttcattttaaaaagaccaaataatgtccaatatttgccccgggacttcgctgctgtcagttagaaatctccaaagcttttgtcaaagaaagctatttcattcgatgtctaaaccaactcccagaaaaaactttgccgagtttaatatgagcttttggatttgcagtttgtacttacatatatatttcaacatattttcaatctaataacacaaaaccagtcagatcgtgcgcttgaaaaggaattcaaatttataatcaataatataagtgtgcaaaattattcaatgttattttacctgggcttaaagaaaatcactcgactggatgtccaacattaagcaatcagcaatcattttctgcggatgacctgtgcccacttattattgattgtttttggtatttctatattttaattatttaattcaatcctaatgtaggcgccataagccttggccatgcaaatagccgacacacgaaacgccatgaaataaaaattaatgaagtttgaaatttgaacagggaagagctgtaaacgaagtacatttctgcggcgtatccaaagagtgcgc

SEQ ID NO: 35702 - DNA, 771 bp, DROSOPHILA
ccaccaacttgtgcggagaaaacgttgtttgtgctgtccatgattctgatagtcctttgcctgccgtggtccctattctgctgtctcagggtaatgtcggagtacgagcgagcggtaatcctgcgcctgggtcgcctgcgccctaagcccccgagggggccaggcgtcatctttctcgtgccctgcattgatgacctcgctgttgtggacatacgtaccaggtcatttgacctacatagacaggaaatcctcactcgtgacatggtgacgatcagcatcgacggagtggtgtactacagcatcaagagcccattcgacgccatgctgcaagtatacgatccggaggaggcgaccgagaagctagcaatgaccacgctgcgtaacgtggccggcacccacaagctaatggatttgctctcgtccaaggagtacctctccaaccaaatagagggtatattgtacaactccacagagccctggggcatacgcgtggaacgggtcgagatcaaggagatcttcatgcctgatcaactgaagcgcgccctggctgtggaacaggaggcgatgcgtgaggccaaggccaaggtggccgcggcgcagggggagcgagatgcggtaactgctctgaaggaggctgccgacataatggagaccaaccccatagccctgcagctacggtacttgcaaacactgaactccatctgcaatgatgacacccggtcctacgtctttccttttcctgtagacattgtgaggaatttgatgaagtag

SEQ ID NO: 35703 - protein, 225 aa, DROSOPHILA
MSEYERAVILRLGRLRPKPPRGPGVIFLVPCIDDLAVVDIRTRSFDLHRQEILTRDMVTISIDGVVYYSIKSPFDAMLQVYDPEEATEKLAMTTLRNVAGTHKLMDLLSSKEYLSNQIEGILYNSTEPWGIRVERVEIKEIFMPDQLKRALAVEQEAMREAKAKVAAAQGERDAVTALKEAADIMETNPIALQLRYLQTLNSICNDDTRSYVFPFPVDIVRNLMK

SEQ ID NO: 35704 - DNA, 2294 bp, DROSOPHILA
agatccaggagcccgcatttgcaccatatacagaagtgtttaggacccgattacaatatcttgacctgagtatggcttccatcacccgaagctcactgctgacactattgtcccactgccgccagctaaagaaaataagcttagagaatattgagctcgatgatgacatctgtgcagagatcgcaaagaatgaagctttggaggcggtcaatctgactatggctagtggcctgacgtccaacagtgttcgcctgatgatggagtcacttaccagcctaagcagcttaaacatatcgtggactgacctaagtgcggatgctgttacggcgttggttacccacatttcccccaacttaattcggctcaatatcgctggctgccgccgcgttttgtttgactcgcgtaagtagttcccaccgtcttcaatgatatatttcctttttgatttgaatttaatttgtttagatgttgcaaccctgcaaaaacggtgtcctcagttgttggagcttgatctatctgattgcaatagtctaacaccaacagtcattactgcaattatgaagttcaagatgctggaatatttgtccgtctcccgatgctatcttattccagcaaccaaatttatgtaagatttttccagcaagcgtctgattaatccctacccagtcattttccttgcagtgaacttaagagtatgccctcgctaacctatttagacatatttgggatgctgtcggacactgcaatggaagtccttgagaaacaactgccaaaaatgggtataaacaaattcattcacagttcggtatcccgcccgactgttggcacgcgacgcacctccatttggggtctgcgcacgcgcgactaagtctcgactctgctgcttccgttaccatttgaatttgttttgctgcgtaagccacccgtaacgcagttattttattctcaattcaacaacataaataatcacatttagctgttcttatttttgtgcgtttggtcactgatccgcttcgctaaggggctccactggtttctcccattcccattcctcccagttgacgcagttcttgagactatccatgaatcctgtttcgctggggcacttgatttcaatggctggtttgttaagtgtctcacacttccaatacgatgtggcatcccaattgttgcggaaaactacaatgtctagctcggcttgggtcttgcaacccggctgtccgtcaccatcataggcgagggcaatgccaaaagaaatcactagtagggaggttagagcgagctgaaccttcatctttcaaaaaatgttctatggtctactggaagtactcgaagccttttatagttacatagttgcagcggtatagtatccaagtgcagctactaccagaaaatgcttttataaattggcattaatgtaaacactcgagagaggaaggaaaagataacagtacttgcccttgactccaatctgttcaaactaaaaaaggtacaatgagtcacccaattttccatttaaaaattcattgtttttatactatattaaatatttaagaaaataaacaaaaaatatgtcttttatcaaggaaagcataatcaagccaattcaaaacaaaatcatatagggaaacgacaaatataaatattttcgatctagttcgtaatcataggttcaagaacaaagttcgtattggacagcctgccaaatttaaagattcagcaatataaaagtaactaaagcaagagagaaggctatggtcgagttcctcgactatcagatacccgtcacccgtggcaacatgggtcaactaacttgcgctgggtatttgtctctagaatctgtatgcttaatctcaaccttctagcttttatagttcctgagatctcgactttcatacggacagacgtacatggccagatcggctattgatcctggtcaagaatatatgtacttcatatggtcgggaacgcttccttctgcctgtttcaacgaatctagtatactctattactctacgagtaacgggtagaaatataaaattgaaactattttgagtcatccctccaattggtaatttttttatatattaacggaaatttaaagtgcgttacaaaagtaaaaattcttttggtgctagtatgcttaacggggtggacatttcggcgttttccacacttcttgggaaatcactttagacaaatttgtaccaatgtcggtacttaatagtatttaactataacttaccttttgcctttggtgtgaataggctattaagccaaagagtaaacattcg

SEQ ID NO: 35705 - DNA, 294 bp, DROSOPHILA
atgaaggttcagctcgctctaacctccctactagtgatttcttttggcattgccctcgcctatgatggtgacggacagccgggttgcaagacccaagccgagctagacattgtagttttccgcaacaattgggatgccacatcgtattggaagtgtgagacacttaacaaaccagccattgaaatcaagtgccccagcgaaacaggattcatggatagtctcaagaactgcgtcaactgggaggaatgggaatgggagaaaccagtggagccccttagcgaagcggatcagtga

SEQ ID NO: 35706 - protein, 97 aa, DROSOPHILA
MKVQLALTSLLVISFGIALAYDGDGQPGCKTQAELDIVVFRNNWDATSYWKCETLNKPAIEIKCPSETGFMDSLKNCVNWEEWEWEKPVEPLSEADQ

SEQ ID NO: 35707 - DNA, 3282 bp, DROSOPHILA
cccaataaagctgagtcgatatggccatgtccctatccctatgggtgtctagtcatcaggggaaatacaaatgcttgaaagttgagtgtgcatatgtactgaccaaaacagtcatgccggcactttaataaatattttttgtcttgccattttttactcaaacacatctcaaatcgtaaaatgtccataatatttagaaatgttatttattttaccttatttattccaaagcgatgcaattttactttggtgttttataagaaggtatacaaatatttaccttcaatgggtttgaaaatgcgctattaaaatatatcttattcttcgttaagaaatcaaatgccacatttttccgccaatattaaaatattaaaatttgaaatgaaagctactataaagcttgaaatagaaacacaacagtttcttgtaaaagactaactaatgactattttatttaaggtctcaaattgcacttcgaaaagcacaatatccaagtgcctcgaccctgcgacaggaccgatgacgcctgcagctaatcagacaagaagccaacgtgaccaggttgagagctataaaagtgtttacgaaacgaatttatagatctttaatatgtatttccattacttatcatgcacatgtatataaattagcatgacgccttttttatcagattgagaggacaaagaaaataaaacgcatttagatagtggacttattgcactacaggtttcctatgcagagcatattaaggcatatttctcatatgaacactctttctgtctatgcttagatcaattgtacttaagtaaaataaaaatattaggattgcttagattgttaaagtattaaaaagtgataagtgcactaattactatgcatatttataagtttatagctatataattgtacgtcttactgtattgaaaatgattacacttaaataagaccaataaagaaccaggttcgatttaagagtcctttaatctctaacagtcataaatcacgtggtgtcattagtatcttcttcggtgccttgactctgagtactgttagttgcatcgactgtggttgtgatgtagctgacatcaagcacacaaaacttggctcggcacattgggcatgtgcacttctgctccagccacacctcacgatccacgtcactttggcgagcggcaaaccagcgcgctaggcactctacacaccacatgggccggcagtagcagtttgagcagcacgccccgttcgccaagggagcgccattgcgatcaaagtcggcacactgcttgtggatcttggtgtttggttcgtttagcatgcaggcaaaacacttttccgtagtagcatcatctggaaaaatgggattttgggcgacttgcgccttgaagacgtccacaaaacggtctataacattgcggtgtaactgaatgttggagggaattgcgattggtcgtcggactcggttctctagattcctaaactccagggcattaattcgtatgtggaagtcgctcacaccctgcctcattggccgtacaataatgcttatcatctgcaaggtgtcgttttggtcttgatgcgatatgttgtaagtttctgcctgcggacaaaatattagggtcgcacatacaaaggaatcgtgtaccactgaccttagctacgctaagcgacgtgttgctctgatgggcgaagtgaacattgtacatggtggtttttattatccagttctgcgtggcaatcaccgagctaatggaatttagcttcttcttgtatatttccggttgccggaactctataccaatttcgctagccacggcactgtagctgcccggcgtgatggagtacttggagagcgccttgctgatcgggtgccgacgccagttttcctggtgccagttgaagatcagagcgggcatcgccagaacggccaacacactgaaccgctgggcggttttccacgtaagcgttttaaacgctaccgcttcctggggcatggggaaatccgggtccaggtcgaagtcctccaagggctcctgcgtggcgaagacggagaacttgagcctatgaataagaaagtaggagaagggcagacaggagtgcacgaagagattcagcgaagtacggcgctggtggtagcctacaaagtccaggtactcttctcccaggaaccgagcgaacaactgttcaatggtgaatcccaggcgttggaactcctctggcgggtagatgatcaccatgcacaacagaatataaaacagattgaatagcagctccgactcgtccatgttgcgaataatttcggattttgtttggctcagtggtttcgtcgaacactagaggtgtccaacaaattcccgattattgttcttaagatatcgatattatgaatggtacgcgatagcacgggaccaatatcgtaccgcgcccgccatagcaaatgagaatttaaataaaaacaaggtgcgagacatttttaattgtcagcagtttgaagatcgactattctgcgtgccacgggcacggggcattagagcaaatgtggagtaatactgtttgctgtttcgaacaacaaaaataaaacaattaaaatcaaaaatttgcagttatacggaaaaggcaatggacatgtcatccgaggagaaaggtaagtgtacattttggaacggacaacagtgtattaatttagtaactaaacgaaactaacctgtgcacataaataaaatagtacaaaaattacatacaaaatgcattcgttcatttgaaaaacctaaagttttttcaccgagaaaaaacagtcgccttaaactcttgaacttacagccctgaaaaaggctttgacttaagcggtcatgtggtatattatcagtatgaacgtcgagaaaaacagacaatgttttcaaaaatattttatttgtatttagccattatatcgtacttgtgaaatattttaggcaacaatcaattaataacgaaaaatgtcataagatcgcagtttgtcccaagacaaaactgtcacagaaacccattatgcgtttaaggaaatttatactagaaaatgaaggagtatttcgtaagtatacaaaatttgttaaattttggtattgggttatggctttcttgaaacggaaatatttgatattgccgtacttgtcatgtactgtcacgattacagacgtgatatgaacaaatcgtgcactgaatcttagattctagttggacctcatgcataacataagaaggtccacacccagctgccaaatgaatacatctgggttgcataagtta

SEQ ID NO: 35708 - DNA, 1230 bp, DROSOPHILA
atggacgagtcggagctgctattcaatctgttttatattctgttgtgcatggtgatcatctacccgccagaggagttccaacgcctgggattcaccattgaacagttgttcgctcggttcctgggagaagagtacctggactttgtaggctaccaccagcgccgtacttcgctgaatctcttcgtgcactcctgtctgcccttctcctactttcttattcataggctcaagttctccgtcttcgccacgcaggagcccttggaggacttcgacctggacccggatttccccatgccccaggaagcggtagcgtttaaaacgcttacgtggaaaaccgcccagcggttcagtgtgttggccgttctggcgatgcccgctctgatcttcaactggcaccaggaaaactggcgtcggcacccgatcagcaaggcgctctccaagtactccatcacgccgggcagctacagtgccgtggctagcgaaattggtatagagttccggcaaccggaaatatacaagaagaagctaaattccattagctcggtgattgccacgcagaactggataataaaaaccaccatgtacaatgttcacttcgcccatcagagcaacacgtcgcttagcgtagctaaggcagaaacttacaacatatcgcatcaagaccaaaacgacaccttgcagatgataagcattattgtacggccaatgaggcagggtgtgagcgacttccacatacgaattaatgccctggagtttaggaatctagagaaccgagtccgacgaccaatcgcaattccctccaacattcagttacaccgcaatgttatagaccgttttgtggacgtcttcaaggcgcaagtcgcccaaaatcccatttttccagatgatgctactacggaaaagtgttttgcctgcatgctaaacgaaccaaacaccaagatccacaagcagtgtgccgactttgatcgcaatggcgctcccttggcgaacggggcgtgctgctcaaactgctactgccggcccatgtggtgtgtagagtgcctagcgcgctggtttgccgctcgccaaagtgacgtggatcgtgaggtgtggctggagcagaagtgcacatgcccaatgtgccgagccaagttttgtgtgcttgatgtcagctacatcacaaccacagtcgatgcaactaacagtactcagagtcaaggcaccgaagaagatactaatgacaccacgtga

SEQ ID NO: 35709 - protein, 409 aa, DROSOPHILA
MDESELLFNLFYILLCMVIIYPPEEFQRLGFTIEQLFARFLGEEYLDFVGYHQRRTSLNLFVHSCLPFSYFLIHRLKFSVFATQEPLEDFDLDPDFPMPQEAVAFKTLTWKTAQRFSVLAVLAMPALIFNWHQENWRRHPISKALSKYSITPGSYSAVASEIGIEFRQPEIYKKKLNSISSVIATQNWIIKTTMYNVHFAHQSNTSLSVAKAETYNISHQDQNDTLQMISIIVRPMRQGVSDFHIRINALEFRNLENRVRRPIAIPSNIQLHRNVIDRFVDVFKAQVAQNPIFPDDATTEKCFACMLNEPNTKIHKQCADFDRNGAPLANGACCSNCYCRPMWCVECLARWFAARQSDVDREVWLEQKCTCPMCRAKFCVLDVSYITTTVDATNSTQSQGTEEDTNDTT

SEQ ID NO: 35710 - DNA, 3425 bp, DROSOPHILA
caagtccatcatcttttttcgcttcaattgttatatattattttaataaacatcgagtaccacccagatagttcggtaaaattgtaagctgtgatcactgcgaataaggtattaaaaactaaaaatagataaattttatattattttctttatttatgtttcttgtagataaaggaatcgaaggataaactataattaacacaggctcctgccccggcttaggattttctaaatgtaactcttctgcaaggtccctaaggaatgttttatataaaaatataaaagaatctttagtgatgcgactaagactatgtaataaacaaaaaaaacaagatggaatgctatagtcgaaatccccgactatcagatacccgttactcagctagtgtgaatgcgaacgcgaaatttcattaaaaaaaacaagagggaacgctatagtcaagttccccgactatcagatacccgttactcagccagtgggaatgcgtttttagggcgttagaatgggtgtggtaaaaagtttcttggcaaatcgatagaaaatttcaagactaattaaattatgaaacaatatcaacacattttttaaaagtgtgggcgtcacagttttgtgcggtttgtgggcattagaatgggcatggcagcatgggtcaacaaacgtgagccgcgtctctaaaatctgtatgcttaatcccaacctctagattttatagttcctgagatcacgacgtttatacggacagacggatagactcggctattgatccggattatatataatatatatcccttatatagtcggaaacgctgctatctgcctgttacatacttttctagtacgaatctagtatacttttttactctacgagtaaggaataagaataatacacacgactttagaaattcaatcctaatactgtttattttataacctactattaaacttttaagtatgtacagtcaataacagtaatattagtgataggtgccaaccaagatatcatcgtatggcctgtgacatgtgcaatggggtcaccattagggtaagctccgcgtcctttaaatttgccccacgcaaatttgcctcctgcaagtcgctgccagaaagattgcatttttccaagtcggcacctgctaacaccgcagctcgcaaattacagttcttcatattggcgttcttcaaatttgccacacgtaagttaacaccggccatgttgctgctttccaaacatgctcctttgaggttaacaccctctagattagttcgaactcctgttgggtcttcaaaattacacccacgcaagtttgcaccttcctgaaagattaggcagattagttttcttagctaattggatggcgtaaatctgttacaactagtttcacaaatgatgtgattatttaatagcgttttctgttaaacctgtgcttaccatattggcgcaaagtccccgcactgacactagttgggcacattccaagtttgcgtactgaagatccgcccgttcaagacagcagtagttaagattggtgtgggacaaattgcagtgagacatgttggcatactgtgaaggaaaagggatagtctttagtataattattgtcttcaacttgatagatctccaccaataattttccatttttttccggacgaaaatatctcctttactgcgtagcaaactacaataatattaaaatgcagtcgtgttacggcgttggaaagacttaaaatgttgtattacacaatgtatgcattgaaatgaaattcgtttgcgcacaccttgaagttaatgttgcgaaaatctagctttcgtagatcggccccagacagattaacgccttgaaagcgcagctccgttatcacggaggtctgaatgatggccttgatgacgtcgttgcgcgtcaatggtctgtcccccagcggcgtctcctgctgtcccaggcgttcctccaaatgggtgacaagcgaaaagattccgaagaaccgcgcctcctccaaaacacccaacacactgatgttcgaatcgcatacgaattgtccgtggcggaggtagttgatgatcggctcgaaatatcgaggacttcgatcaatcaggtatgctccctgctcgtcacgctcgctgggcttcatgctgccattttgcaggaacatcctagcaagcattgaatccggttctctgcccaccagagtgtcgatggtagtggcgtagatttgtccacccacgttcagtttgacccaacgattgggagcgaatccgctagcggcgacgaaatcgccggctgccggtgcggcgtcgtcttttctggctccggaaccactctccttcagatcactattcatttgattgggaagtttaaaaaatttccacaatgcctggcaattctcagctgctttatcttcccgttcttcccccgtcattccattaaagtcgtcgattagggctgttcacacgaggccgcaacagcagcagcgttacatttaatagttgtgtgaattatgagatattggtgaatttagctaataatttaaattaataatttaacgaagagaagaaatagctcaaataaacaattatcagaaaactggatatgtcttatcttattactgtccattagctacaaaacatattattatttgaaatttaatattcatataacgatgatttaatattcatataagatggtataaaataacaagcgaattgaattatgaagaaccaattttcagatgtgaaaataaaaatatttgtggacattggacattgcaagcagaaaactattaaaaccataaaaggtgttttacgaatgcattttaaattaccaattgattggttagaagtgtaaaccctcaatttttgttttgacattgggcgcctgtgcaaagagtgttatagttggcaatcgacaccgatagtttgtcatcgggaagctggtatatgtaaatacaaaataaattataaaaattggcttccacataattgagaaggtcgctgaaagcgtacgaataaaccccgcaaataaccaaatgtctgccgccgagacaggtccaatagccagcggcagtgcggtgtccactggacagcgcggtgtcagccgagtacttgccaagttgtcccagtctctggcaggaggagaattctatgaagcgcacatgatgtataggacgctgtattttcggtagactatttgtataatccgtgcaaggaaatgcaatccaataagaaattcgattccttaggtatacggcgcagaaacgctatcaggactgcctggaactgctctttgatggagcacagcagcttattgccaaggaacaggaaagcagcgccgcggacctatgtctccttctggtggacacgttagagaagcgaggaccacaggcggaagataccgacaacttcctgtgggttccacgcctaggggctttg

SEQ ID NO: 35711 - DNA, 1095 bp, DROSOPHILA
tttaatggaatgacgggggaagaacgggaagataaagcagctgagaattgccaggcattgtggaaattttttaaacttcccaatcaaatgaatagtgatctgaaggagagtggttccggagccagaaaagacgacgccgcaccggcagccggcgatttcgtcgccgctagcggattcgctcccaatcgttgggtcaaactgaacgtgggtggacaaatctacgccactaccatcgacactctggtgggcagagaaccggattcaatgcttgctaggatgttcctgcaaaatggcagcatgaagcccagcgagcgtgacgagcagggagcatacctgattgatcgaagtcctcgatatttcgagccgatcatcaactacctccgccacggacaattcgtatgcgattcgaacatcagtgtgttgggtgttttggaggaggcgcggttcttcggaatcttttcgcttgtcacccatttggaggaacgcctgggacagcaggagacgccgctgggggacagaccattgacgcgcaacgacgtcatcaaggccatcattcagacctccgtgataacggagctgcgctttcaaggcgttaatctgtctggggccgatctacgaaagctagattttcgcaacattaacttcaagtatgccaacatgtctcactgcaatttgtcccacaccaatcttaactactgctgtcttgaacgggcggatcttcagtacgcaaacttggaatgtgcccaactagtgtcagtgcggggactttgcgccaatatggaaggtgcaaacttgcgtgggtgtaattttgaagacccaacaggagttcgaactaatctagagggtgttaacctcaaaggagcatgtttggaaagcagcaacatggccggtgttaacttacgtgtggcaaatttgaagaacgccaatatgaagaactgtaatttgcgagctgcggtgttagcaggtgccgacttggaaaaatgcaatctttctggcagcgacttgcaggaggcaaatttgcgtggggcaaatttaaaggacgcggagcttaccctaatggtgaccccattgcacatgtcacaggccatacgatga

SEQ ID NO: 35712 - protein, 335 aa, DROSOPHILA
MNSDLKESGSGARKDDAAPAAGDFVAASGFAPNRWVKLNVGGQIYATTIDTLVGREPDSMLARMFLQNGSMKPSERDEQGAYLIDRSPRYFEPIINYLRHGQFVCDSNISVLGVLEEARFFGIFSLVTHLEERLGQQETPLGDRPLTRNDVIKAIIQTSVITELRFQGVNLSGADLRKLDFRNINFKYANMSHCNLSHTNLNYCCLERADLQYANLECAQLVSVRGLCANMEGANLRGCNFEDPTGVRTNLEGVNLKGACLESSNMAGVNLRVANLKNANMKNCNLRAAVLAGADLEKCNLSGSDLQEANLRGANLKDAELTLMVTPLHMSQAIR

SEQ ID NO: 35713 - DNA, 5189 bp, DROSOPHILA
taaataaaataggtctaagctacctttgtacatattagatttaagtctaaaagcaaaataaacgggtaattttcggtcaagtttatttttacgatttttttaatttttatttcaagttatatttcattcatgtttcatattttttttttgtaatgccttttgtgtataaaaaaagggtaaataattatgttctgccttgtataattatgttctgcattgtataattcttgctttcacacatttcttgttcttctgttaaaaatattattaaatttattgatgtttgcggtgaaagttggaaaagactaaccaaatgcaacatgtaaatattttgttaattcattttttcttactcgcggtatttctcatttatagggcattcctattagtattacattttagaacattacttcaacttcaacgcactcaacttcaagccctattactagcagctcaactgcttaacagagatacagcaaaacgatcttattgctgaggtgtgaaatcaaattaacaaatattcagaagttctaattcagaattgtaacaagtcacaagaagttagtaaaaggattatttagaagaaatggtgttccactttgcatttgtggaacgagtatttctgcaatcgttttaattttcttaggcaaaaaacaaatgcaattgtttagaaaaagcgtcaatgatttgtgttctcgttagaaagagttgcgtttgattttcttgttggttagaataatgacggagaagaagaaactacaagctgcaaaacatgatattcagtgtatgcacaagtgtaattgccagcgtgtatttagtgagtgtgtattttgagtgtactttgtgtttgttcggagttcgctttctatttgttttttgtttggtatttcccgattttttctaaacaaaatgttactttttttcgttgaactccaaacattgcgctgtcggcggaagtccgccgcgaccgttcattggctgcgccaagcgcaaagtcatactatactgtggtggtgtcgacagcttcgatgcgtgcaccacccacgtcgcctcctgccacagttacggcctcccctccgttttgcgcgtctgcttttccatcctcgcctgcaccggcattggcaccagtggagctagcacttttcttctcgccaaattggatcagttctacgttgacgagaatagtcttggtctgcacaggcgttgcagtctcagctgactctgctttctcaccgccctcccctgcggcggcagctggggctgtctcgccaccagtggtaatggtgagcgagagatcgttgagagacttcaacaccttgtccatgtcgtcctgggtactgggaacccccttgcggtttccaaagtgcaggaaacactttccgaagtgtcctaaagagaaggtatagttagcgtagagcttttaaaccaaatataagtgacatacccttccaagaaattgacatcggagtgcattcgcgtttgcggagctccgactttaagtccttgacgcgaatatcacgagacagatttgtcaacttaatgcaaaaatcactgttcttgttcttctttgaacgacgctcatcagtgccagcctctggtaacttacgatcatcagttttagcacctgcttccacaccagactgatcgccctcagactaaaattacgttgattaggctggcttcggctgtcatatttaagctacttaccttagttgtacgtctgcggcgattgacgaaacgacctttgcgccgcggagtgcgtttctgagcagtctcctaaaaatgcagagttaaaagttactcaatagtgccgacagtgtggtggattcgacttacgccctgcggctgttcgttgtcagtctgcgaagtggtgcgacctgggtttcctcgttggatgcgccggcgcacaggcccacggcggcgtctgttgttttgatgttgctccacatcggtgtcttcctccttgagggatatggattttcccgccttctcctccctttccttaagctgctgcagcacgggcaatatttttagacggcgctcggacagcagctcccagtaaacgccattggggaaagacaagcgctttggcaccctgattatttctgtgggtgttgcaatgatatcaactggcgtatcgtacttctggaatagattcgggggcagtgagtccaccacctgcatgtcgtgcacgattgtgacaataattgtcttcggtgtaatggctcccagttcaataaggaggccgatgtccagatcagcgaaaccatttccgcgtccaatgcggtaaccctcgcgtgacactacaacagagccaataaccacgatgtccagcttcagaccgctgtccaatccaatttccgagcgaaacttttgaatatcttgaacgcgcagagcctcctttttctgctcctcggtggcatcggccagcacatctacctttaggcacagtgcagaagattcgcgggtgctgggcaagtatacggacttgtcggccagcaatgccagttccttaaactcatgcaagacgcgatcgatgttcaccttgatgtgctctgcaatacgggaaagagtgataattggtgcactgaaaacggggctgtggtactcccttacgtgctttcttgaactcctcttcattggcaaacaaggcagcagccttatcggcacccacgaacgaaggaattcggttaaatatgttgttgaatccaatgccaaccttgccctcttggatctttttccaggtctgcacgcgcagcgagcgctttgtgggctctatgggctgagctgtaacgacatgtttgttacaataatatgctccaataacataaacagatgactaaaagaaacatattttagtttattgcagcggtgagctcatttgtatttgtgttagtgatagctagccttcattaaatcaagccacattccattccagagctgatctgtaggtatgataacgtgcggacccaagcgattccccaacttctcggacatgttagtttttgttaggggaggttgactgtaaaagtgcgaatcaaatgtgctgaatagcaacacagccgctgcccttatcgtctgtaatgaacgcgtgttatcacgctagttggcgctggactaaaagtgataccgcggctgatataccggtttccacgcccagtaatcagatgtgaaagtgacccaaacatacaccagcaaacgccggcccgtatcattgaaaacaaaaatctgcatgcaaaatcgggacggcagggttgccacctgtgctggttaaagaacacacgtcaacatgcatgtgtgtgcgcttgttgaattgaaactgaagtatgaattggccgctaaaactatttcggccgtctttcttggcgggttcaatgagaaatacaaattaagaacccatatcccgatattaacgcatgaccaataagttggcaacgcttcgacacgcacacactcgcacgcacacatttctgggcgatgagcgcatcgactcgcgaatttctcaattaatatgtattcgtatgagcagtgccgcgagcgtgtagtggtgtcgggcagcgcggggcgcaagcgagcgggtgaattgacactgcgagcacagaatctcgaaatcgaaatcggccaagagcaccgaaaatgattcatttcactttttgtaattgtgggaagaatgcgcgcaaagatgacgtaattagtgtcaacaacaagcaacttcggcgtttcggcaactcttatttacagctagggtctcctagaaataaatatggcggaattcgacaatcttccgcttctacactggcacctagaaaatggctgaatcgggcacctgcccctctggaacatgggtattcactttggatgcccagcgagcaaggcgcggcgcggcgcaaaacatttatggaatcaccagcactcgcgagaattacacgcaattttcgtcggcgagcgggcggggtagtagggcaggccacttacttgtcgaagacacctcctgcgcggtgtttccgccgttctccgcggcgacagcgggggctgcgttgctttggtcctccatcgaatcgctcgccaattgtgttttagttctgctcacaattttttaccggctcaggctacggctacacagttcacagttcacaagcaacgtctaccgttctccgctggcttccaacaaaccacgtttgaaaattgacgtttctctggtgacgtaaaaaaacatcgccgatgcgatacatcgatacatttcgtatagagttgcttgcgatggttctagctaaaaatataataaaagttatacatctgagcttatacacgccaccgacaatatacattagatctacatgcaagtccatcatcttttttcgcttcaattgttatatattattttaataaacatcgagtaccacccagatagttcggtaaaattgtaagctgtgatcactgcgaataaggtattaaaaactaaaaatagataaattttatattattttctttatttatgtttcttgtagataaaggaatcgaaggataaactataattaacacaggctcctgccccggcttaggattttctaaatgtaactcttctgcaaggtccctaaggaatgttttatataaaaatataaaagaatctttagtgatgcgactaagactatgtaataaacaaaaaaaacaagatggaatgctatagtcgaaatccccgactatcagatacccgttactcagctagtgtgaatgcgaacgcgaaatttcattaaaaaaaacaagagggaacgctatagtcaagttccccgactatcagatacccgttactcagccagtgggaatgcgtttttagggcgttagaatgggtgtggtaaaaagtttcttggcaaatcgatagaaaatttcaagactaattaaattatgaaacaatatcaacacattttttaaaagtgtgggcgtcacagttttgtgcggtttgtgggcattagaatgggcatggcagcatgggtcaacaaacgtgagccgcgtctctaaaatctgtatgcttaatcccaacctctagattttatagttcctgagatcacgacgtttatacggacagacggatagactcggctattgatccggattatatataatatatatcccttatatagtcggaaacgctgctatctgcctgttacatacttttctagtacgaatctagt

SEQ ID NO: 35714 - DNA, 1773 bp, DROSOPHILA
tcaattttcaaacgtggtttgttggaagccagcggagaacggtagacgttgcttgtgaactgtgaactgtgtagccgtagcctgagccggtaaaaaattgtgagcagaactaaaacacaattggcgagcgattcgatggaggaccaaagcaacgcagcccccgctgtcgccgcggagaacggcggaaacaccgcgcaggaggtgtcttcgacaactcagcccatagagcccacaaagcgctcgctgcgcgtgcagacctggaaaaagatccaagagggcaaggttggcattggattcaacaacatatttaaccgaattccttcgttcgtgggtgccgataaggctgctgccttgtttgccaatgaagaggagttcaagaaagcacagcacatcaaggtgaacatcgatcgcgtcttgcatgagtttaaggaactggcattgctggccgacaagtccgtatacttgcccagcacccgcgaatcttctgcactgtgcctaaaggtagatgtgctggccgatgccaccgaggagcagaaaaaggaggctctgcgcgttcaagatattcaaaagtttcgctcggaaattggattggacagcggtctgaagctggacatcgtggttattggctctgttgtagtgtcacgcgagggttaccgcattggacgcggaaatggtttcgctgatctggacatcggcctccttattgaactgggagccattacaccgaagacaattattgtcacaatcgtgcacgacatgcaggtggtggactcactgcccccgaatctattccagaagtacgatacgccagttgatatcattgcaacacccacagaaataatcagggtgccaaagcgcttgtctttccccaatggcgtttactgggagctgctgtccgagcgccgtctaaaaatattgcccgtgctgcagcagcttaaggaaagggaggagaaggcgggaaaatccatatccctcaaggaggaagacaccgatgtggagcaacatcaaaacaacagacgccgccgtgggcctgtgcgccggcgcatccaacgaggaaacccaggtcgcaccacttcgcagactgacaacgaacagccgcagggcgagactgctcagaaacgcactccgcggcgcaaaggtcgtttcgtcaatcgccgcagacgtacaactaagtctgagggcgatcagtctggtgtggaagcaggtgctaaaactgatgatcgtaagttaccagaggctggcactgatgagcgtcgttcaaagaagaacaagaacagtgatttttgcattaagttgacaaatctgtctcgtgatattcgcgtcaaggacttaaagtcggagctccgcaaacgcgaatgcactccgatgtcaatttcttggaagggacacttcggaaagtgtttcctgcactttggaaaccgcaagggggttcccagtacccaggacgacatggacaaggtgttgaagtctctcaacgatctctcgctcaccattaccactggtggcgagacagccccagctgccgccgcaggggagggcggtgagaaagcagagtcagctgagactgcaacgcctgtgcagaccaagactattctcgtcaacgtagaactgatccaatttggcgagaagaaaagtgctagctccactggtgccaatgccggtgcaggcgaggatggaaaagcagacgcgcaaaacggaggggaggccgtaactgtggcaggaggcgacgtgggtggtgcacgcatcgaagctgtcgacaccaccacagtatag

SEQ ID NO: 35715 - protein, 545 aa, DROSOPHILA
MEDQSNAAPAVAAENGGNTAQEVSSTTQPIEPTKRSLRVQTWKKIQEGKVGIGFNNIFNRIPSFVGADKAAALFANEEEFKKAQHIKVNIDRVLHEFKELALLADKSVYLPSTRESSALCLKVDVLADATEEQKKEALRVQDIQKFRSEIGLDSGLKLDIVVIGSVVVSREGYRIGRGNGFADLDIGLLIELGAITPKTIIVTIVHDMQVVDSLPPNLFQKYDTPVDIIATPTEIIRVPKRLSFPNGVYWELLSERRLKILPVLQQLKEREEKAGKSISLKEEDTDVEQHQNNRRRRGPVRRRIQRGNPGRTTSQTDNEQPQGETAQKRTPRRKGRFVNRRRRTTKSEGDQSGVEAGAKTDDRKLPEAGTDERRSKKNKNSDFCIKLTNLSRDIRVKDLKSELRKRECTPMSISWKGHFGKCFLHFGNRKGVPSTQDDMDKVLKSLNDLSLTITTGGETAPAAAAGEGGEKAESAETATPVQTKTILVNVELIQFGEKKSASSTGANAGAGEDGKADAQNGGEAVTVAGGDVGGARIEAVDTTTV

SEQ ID NO: 35716 - DNA, 2302 bp, DROSOPHILA
gctaaaaggtataacatttttaaaaactgtaaaattggctgttcctgcttttttttatttttatgtatgttctattctgttaagaatattttttctttcttaaatgtgggaaatcaaagaaaaacctttactgacggggtccaaataaagtggcaatcacactctcaatatacaaaacacctgttttcaggacttttataaatacactttataaaatgcatttacccaccgccaggtaaatatttacttgtccactacaaaatttggtattaaagaatgccgaaaagtaaattttatgtagtgcatctttaaagtcaaatgcacaaattattattcggcacaaaagttacaattttatttgtatattatccgtttggattggacaaccactgcatattttctatacctcgtgtacatattagtagttagtgaatttacgtttcaaaatagaaaaaaatgtatattataaaaaatattctgttagcctgaaaatcgcataaagacaaatcattgcatcggtgaatgcttacatatatcaataggtggattcgttcagcactgttggcacaattcaaattcacatatattgtgtgtgtgtacgtgtgtgttgcggttgtgtggcctggctcacctgtttaggccttcaggagcaaactcacatgctctggagctgcggtggaaagagtttctggtgactgctctcttcgacttcattactccatcgggtggttgtcatttggcttttttgaaggcagaagcggcagtcgcagagcacaagctccacgggaaccacgcgcgacggcattggattcggaccaactttggccgacacgaacgcaccaaaacaaaagacatccgaaccggtggaagtgcgagttcgactgtagcccagtgttcggtcctatcagctggagtgtcaatatcggaaccaccgatcgcaaaaaaaaaaaaaaaagaatccgaactaatttgatttgcagttggtcctcttccgggcaccatgagcaaagccaagtcaaccgcccacgagccgacgatccactacctggacagcgtgctgagcgatgaggagaagcggtgcgcctatggccaccagtggcgcaacttctccatctcccgatccggacgctttcgttcgaagaacaagaagcgggatgcggtcgacggaaagttctttgacggaggatctggatcaggatctctgcaggacttcgagaaggtgtgcccttttgcgcatttcattattgtacctataaaccataacaactcaccttatagagcccatatctaacaatcacttagtgagcagcccgttttgccaatggcgttcgtgatttgcgggtgtgagttgtgtatctgcgattgacaatctgcaccgcttccagttcgttagtattggtcgcaacaaagttaggaatactgtgttaagttggatttctaagtggttcatcggaaatgctcgtataaccttcggaagcggccattctggggcaaggaacaatctcgggaccttgaagtcatttgctgatggagaagcgattcgatctgagatacgaaagcgattttgtagatcgatcctgtagtgataaaacctgtataggtccaagcttgaagatgtcgagcttaaatcatattgatttttttacgcacgaattatgttcccaaactttttgcagagttaacatgacattttaaccaataatctagtatttttgtactttacccctgggtgtgaaaatttgcaaagatttatatgtaaagaaaaagtaagtgacgataagattagattgttaaggaaatttgtttttttcgacttaaaataatttacggaaatccagattttcacatcaaaaacacttagcggaatgttacagcactgctatgttaactgtgtataggaaaaaataacatcagaagtatcgaattcctaatgtttaaaaaatattaacggtttaggaaaaaagcggtgtaatagcataaaatttattttcggggtgtcagtccagtttgagtcaatcatttgtttggatataggaaactttaggtctactactttcggaaatccacggaaagcacagcggtctatgccaacaacaattccaatacacctttgtctaaaactcaaatgtggagttttggaatgcattgggggcgaatttggagtactaaagtataggattttattttacatcacctttggttcacgtccttcaacattgatttccatttttaaattggcaagtgaaataacaaaaatatatattacaaatactcgcagatccgaatggaataccaaattagt

SEQ ID NO: 35717 - DNA, 243 bp, DROSOPHILA
atgagcaaagccaagtcaaccgcccacgagccgacgatccactacctggacagcgtgctgagcgatgaggagaagcggtgcgcctatggccaccagtggcgcaacttctccatctcccgatccggacgctttcgttcgaagaacaagaagcgggatgcggtcgacggaaagttctttgacggaggatctggatcaggatctctgcaggacttcgagaagagcccatatctaacaatcacttag

SEQ ID NO: 35718 - protein, 80 aa, DROSOPHILA
MSKAKSTAHEPTIHYLDSVLSDEEKRCAYGHQWRNFSISRSGRFRSKNKKRDAVDGKFFDGGSGSGSLQDFEKSPYLTIT

SEQ ID NO: 35719 - DNA, 5447 bp, DROSOPHILA
cgaaactattaagaaatcacagcctatctaattacccataaaaagtttcattaatttattacgaataaattatgccgctaagctacataaatccgaaaacgcgaaatgaacttgcatcttttgatcttagaaaacggtgtatgcccaacaaccacacagcaacatcaaatacagattaaaaacacaaaagggactaaccataagatcgatccacttcaaagcgagcattaaattagtaaattgttgcaatcaaaaaacaaaatagactgtaagtcccacactctaggtatgcaattgcaatacgttttgtatgcgtaatagccatttttgtgcaaacattacctatgtaattaatattatacaaatacaaaaacaaaaatatgtagaaaattaggtggaaatggagtggagcattttttcaataaaatcactaaaattaactactacagccttaatttatctagccagccaaccatttcaatttcggagaaatcgcattttccattcacaagattaagggtcatatgttgcgttaattataattttattaacattattgttggtttaatttgaatgtgttaaattataaacgtgtgccgtcgcatttgcttaaaaatttatgaaaatagtaaagttagaacttagaactaaagcttatgctaagaactacgtgtgacaagctggccgtcgaagagggagcaaaaacaaaatattaaaacatagatgtagtggaaggcaattttacaattcaatgtgtcaaaaaacgtcacgtaatgaaatcaaaccagctccaagagttgatatggcctttgaactaaaaaacatacaacttcgggcgctgtaggtccttacggttagagtaggaaatgtggatggacaggtgctgcagtcgcggtttgcttggaagtgagttaaggccaatcagccgacggcgacacattgggtagattataagtgtatgttagagattttaaaacacttaagactatgaccgtgaggcttagttacgtcgcgttcgacgacgagcatttcctgcaaaggcgttgtgcgcccccggatgctgtccgctgtacaagttgtccaagaactcatgcaatgtagcctcgctgcaaagtgagattgttttattttatgttttgcagattgctcgaagaagttcgcccttacctaacgccgctcactcccccaccaggatgatgtacaccccgatcgtgatgtggctgctgcgggtgctggtggtgttgttgttgttgctgctgctgctgctgctgttgttgttgctgctgctgctgagcaccgcgcacgatgcggtactgcaccatgtgcgagtttggttccaaatgtgacagagctcctttttggcagttagcccactcggttatgtcatagaccttgccgtccattagcgccaagtatttccaccgcaagcccatcatgcttgtctcggcccaaatgtcaccctattgcgaaaacaaaaacacatttttcaaagtatgagtatatccaactgtggatttctgcacccttacatctttggcggagtgccgtattttgcaggaagcacactcacgcgccgcatagtgagggcgttcggttagcttgcgaggatgacgctgggcacaagtgctgcacctgtattaagcggtaaccagaacgattagtaatttgctatctatagagacgcgtttggtacatacgcaccttatggtattggccgcctcagccattttggtttgaagttgggaaagcaggtcgtgcaactccgtccacgccttctcggtgtgcagagtttcggcaatgctttggtcgtaaattagtcgattctcctgcaaaaggaaacttttaagatagccatcgatcatttaaagtgacaatgcattaccggttctccgattaactcaaaggcgcgctgcagcaccttaaaagcctcctcagcaccggcttgtttgtttttgtcgggatgtacaagcacggcaatctttttgtagtgcttgcggatctgctcctgggagctgtctgggggaacaccaagtatgctagaacaagaagtaagaactgttgcacacgttcattaatagttgagcagagctcacctgtatgcatcctttcccttgcaattaagcagagagtacattgcttcttcacccgtttgtggcagacgaccagttttgaattgctcggaagtggtttctggcggtttgcgtttgtagaaaagtcgccatacggccaggcgcgagttcttagcaaagcgagcgtcgaatcgccgccaataacttcgccaccatatgcttggcttgccagagttctgcttcagttccttttgcagctgccgcgcataagccaatgcagccacataggccaacgttatccgctcgtatcccatgctaaagcccagaaccacgatatcgtacaccaaataaaacagccacgttaaaagtttcagggtgtaaatccaccaggtgtggataatacgtttggccaactcgtagttgcggttactggaaaagctgttggcatgggtgggcgagtttgtcgacgaataggcattgcttcgattgcgcttcgatgagtaggagtagccagaactgttgttcgggttaagattcgaggaggaataccgtttggccgaagaggaactaacattgttattgctggagtaatttacgctgctactgctactgctgcttcccgcatgtgtgtttgcgccagtgtgattcgagtgactcgcgttggagttgattttgttactgcctgatttacgtgatgaagtgctagaattcgttgccggagtaaaattgagaacattgctgtggttctgcaagctgctgttggcggacaccggagtggtcttatgctccgaaaacttaggggcgttgctatttacgttcttcggttgcagtggccgcttcttttccggattatttagtttgtttgatttaatctgcggctgtagatttggctgtgctagagactgagactgttgaaccttgagcggcgcggtctggctgactttacttcgcttcttgcctcggctggcatgcgcatgaccaacaccgggcacaaacgaacccgtctccttggcatcgtgcagcggtgaacgttttgacgtccgcatctcgcgatttccatatgcatcctccttttccggacgcctctgcgattgtacactgtagtccccaccgttgtctgcgcgcatatctcgccctgcagcactcggttttgtgcctttgctgagcacatcggagtacgacatgggcatgggcttcacctcggccacgattcgctttttgccttcgggttggccaggcacggcgacgctcgacttgttgatggcagttggtgaaacggtggcagtggccaaaggcattttcagagacttggctggcttggaagccgctggcagtgtattgacggattgcgacagtggctcaggctgctgcaggttctgattaggaacctgtggctgttgggctatcgaagtctcgagaacgacgtccatctcgttggcctcgccatcaaattgaatgtagcttccaccagtcaaattgggcgaccagttgtttacaaggttgttaatgagaaggttagcactgctcgacgagtgattgacttgggacactgttggggcctgagtctgcgtctgttggggctgtcgatgctgggcgtcttgctgctgtgcatgtggtaaagtcaaaggatttgtggcaaacagttcatacagtggagtcggctgcgaaggtgtcggcggagcggcctggtgttggtgctgcagctgatggtgattaatcgaggccatgttgatatgcgtgaagagtggggtgccggcttcgctgacctggttgtccgggcagtggtacactttgagaaagttgccgggtcccacaggcagcacggagtaggtctctggctggcctggctgaccggagtaggacagattgaagagatactcattgtacatgtggggctgctgctgctgaagatggggcgcaaatggggggccggctaggtgcggtggtggaggtggccacatcagcgggacaggtgcttgtccatgctgctgctggtggatcagatagttttgggtttgatgttgatgctgctgctgttgctgttgctgctgttggtgggccaggtagttgcccacttcgtcagtgtggggcaggacgcgaaagggtgcagactcagtgctgccccctccaatctcgtcgtcctgacgagtcgccatgtcctgcgatggggcctatgctttttgcgcaccagctccgctcgcctattggaatttcaagcgtgctccatgtattcaccgcagcgagtctgtcacggatgtgctgcaatcgcaggtgacaggtagttggttttctgtggccctagcccactttttcactccaaactctaaataattcgcagagcgtccgtgtgtaagagttttatatctttttattgcaaacgtcaaatgtagtgttgccagatgggtggaattccattttcctaactgccctcgaccaaccctggtagtaacctatcgaaagatttccctccaacgtattttccgaattgttgttaaactgttggattattaatcgaagtttcctcaaataaaaaaacaaatttcgccaacttttccattgccaccaatcagccgtttttgaagatacatatattgatgaacccgctgatcgtgcagccctggttaatatttgttgttttaaacgttgcagtcaaatgatttttaaacaattaaaaaaatgccttttgtccgaccgctggtgaccgtggtgcgggccgggcggcatagctattcagcaggattacagctacagcaacgtcttgcaaggtccaaccagatcctgaatccgccagcggagttccgaaactacctggtgcttcaggagcacgacccggtctacacagtcggactaaggacaaaggactatacggcgcaggatgaagaccgactccgccggctaggagcagacttccatcgcacagatcgcggtggcttgatcacatttcacggccccggccagttggtggcctatcccattctgcacctgggtcagttcgtgccgagcatccgctggtacgtggcgacgttggagcggatggttgtcgaggcctgccaccagatgggcatttccagtgccaaggcgaccaaggacaccggtatctgggtgggtgacaacaagatctgtgccatcggtatccacggctcgcgttacgtcaccacgcatggaatcggcctcaattgctgcacggatctgcagtggtttgagcacattgtgccctgcggaatcgaaggcaagggggtcacctcgctcagcaaagagctggacagacattttcctgtcgaggaggccagtggcgcactcctcaatagtttcgctaaagttttcgaatgccgccttcaggaacacgccaaaaaaccagcaagttctgctgaaatcgga

SEQ ID NO: 35720 - DNA, 3135 bp, DROSOPHILA
tttgcaataaaaagatataaaactcttacacacggacgctctgcgaattatttagagtttggagtgaaaaagtgggctagggccacagaaaaccaactacctgtcacctgcgattgcagcacatccgtgacagactcgctgcggtgaatacatggagcacgcttgaaattccaataggcgagcggagctggtgcgcaaaaagcataggccccatcgcaggacatggcgactcgtcaggacgacgagattggagggggcagcactgagtctgcaccctttcgcgtcctgccccacactgacgaagtgggcaactacctggcccaccaacagcagcaacagcaacagcagcagcatcaacatcaaacccaaaactatctgatccaccagcagcagcatggacaagcacctgtcccgctgatgtggccacctccaccaccgcacctagccggccccccatttgcgccccatcttcagcagcagcagccccacatgtacaatgagtatctcttcaatctgtcctactccggtcagccaggccagccagagacctactccgtgctgcctgtgggacccggcaactttctcaaagtgtaccactgcccggacaaccaggtcagcgaagccggcaccccactcttcacgcatatcaacatggcctcgattaatcaccatcagctgcagcaccaacaccaggccgctccgccgacaccttcgcagccgactccactgtatgaactgtttgccacaaatcctttgactttaccacatgcacagcagcaagacgcccagcatcgacagccccaacagacgcagactcaggccccaacagtgtcccaagtcaatcactcgtcgagcagtgctaaccttctcattaacaaccttgtaaacaactggtcgcccaatttgactggtggaagctacattcaatttgatggcgaggccaacgagatggacgtcgttctcgagacttcgatagcccaacagccacaggttcctaatcagaacctgcagcagcctgagccactgtcgcaatccgtcaatacactgccagcggcttccaagccagccaagtctctgaaaatgcctttggccactgccaccgtttcaccaactgccatcaacaagtcgagcgtcgccgtgcctggccaacccgaaggcaaaaagcgaatcgtggccgaggtgaagcccatgcccatgtcgtactccgatgtgctcagcaaaggcacaaaaccgagtgctgcagggcgagatatgcgcgcagacaacggtggggactacagtgtacaatcgcagaggcgtccggaaaaggaggatgcatatggaaatcgcgagatgcggacgtcaaaacgttcaccgctgcacgatgccaaggagacgggttcgtttgtgcccggtgttggtcatgcgcatgccagccgaggcaagaagcgaagtaaagtcagccagaccgcgccgctcaaggttcaacagtctcagtctctagcacagccaaatctacagccgcagattaaatcaaacaaactaaataatccggaaaagaagcggccactgcaaccgaagaacgtaaatagcaacgcccctaagttttcggagcataagaccactccggtgtccgccaacagcagcttgcagaaccacagcaatgttctcaattttactccggcaacgaattctagcacttcatcacgtaaatcaggcagtaacaaaatcaactccaacgcgagtcactcgaatcacactggcgcaaacacacatgcgggaagcagcagtagcagtagcagcgtaaattactccagcaataacaatgttagttcctcttcggccaaacggtattcctcctcgaatcttaacccgaacaacagttctggctactcctactcatcgaagcgcaatcgaagcaatgcctattcgtcgacaaactcgcccacccatgccaacagcttttccagtaaccgcaactacgagttggccaaacgtattatccacacctggtggatttacaccctgaaacttttaacgtggctgttttatttggtgtacgatatcgtggttctgggctttagcatgggatacgagcggataacgttggcctatgtggctgcattggcttatgcgcggcagctgcaaaaggaactgaagcagaactctggcaagccaagcatatggtggcgaagttattggcggcgattcgacgctcgctttgctaagaactcgcgcctggccgtatggcgacttttctacaaacgcaaaccgccagaaaccacttccgagcaattcaaaactggtcgtctgccacaaacgggtgaagaagcaatgtactctctgcttaattgcaagggaaaggatgcatacagcatacttggtgttcccccagacagctcccaggagcagatccgcaagcactacaaaaagattgccgtgcttgtacatcccgacaaaaacaaacaagccggtgctgaggaggcttttaaggtgctgcagcgcgcctttgagttaatcggagaaccggagaatcgactaatttacgaccaaagcattgccgaaactctgcacaccgagaaggcgtggacggagttgcacgacctgctttcccaacttcaaaccaaaatggctgaggcggccaataccataaggtgcagcacttgtgcccagcgtcatcctcgcaagctaaccgaacgccctcactatgcggcgcgtgagtgtgcttcctgcaaaatacggcactccgccaaagatggtgacatttgggccgagacaagcatgatgggcttgcggtggaaatacttggcgctaatggacggcaaggtctatgacataaccgagtgggctaactgccaaaaaggagctctgtcacatttggaaccaaactcgcacatggtgcagtaccgcatcgtgcgcggtgctcagcagcagcagcaacaacaacagcagcagcagcagcagcaacaacaacaacaccaccagcacccgcagcagccacatcacgatcggggtgtacatcatcctggtgggggagtgagcggcgttagcgaggctacattgcatgagttcttggacaacttgtacagcggacagcatccgggggcgcacaacgcctttgcaggaaatgctcgtcgtcgaacgcgacgtaactaa

SEQ ID NO: 35721 - protein, 970 aa, DROSOPHILA
MATRQDDEIGGGSTESAPFRVLPHTDEVGNYLAHQQQQQQQQQHQHQTQNYLIHQQQHGQAPVPLMWPPPPPHLAGPPFAPHLQQQQPHMYNEYLFNLSYSGQPGQPETYSVLPVGPGNFLKVYHCPDNQVSEAGTPLFTHINMASINHHQLQHQHQAAPPTPSQPTPLYELFATNPLTLPHAQQQDAQHRQPQQTQTQAPTVSQVNHSSSSANLLINNLVNNWSPNLTGGSYIQFDGEANEMDVVLETSIAQQPQVPNQNLQQPEPLSQSVNTLPAASKPAKSLKMPLATATVSPTAINKSSVAVPGQPEGKKRIVAEVKPMPMSYSDVLSKGTKPSAAGRDMRADNGGDYSVQSQRRPEKEDAYGNREMRTSKRSPLHDAKETGSFVPGVGHAHASRGKKRSKVSQTAPLKVQQSQSLAQPNLQPQIKSNKLNNPEKKRPLQPKNVNSNAPKFSEHKTTPVSANSSLQNHSNVLNFTPATNSSTSSRKSGSNKINSNASHSNHTGANTHAGSSSSSSSVNYSSNNNVSSSSAKRYSSSNLNPNNSSGYSYSSKRNRSNAYSSTNSPTHANSFSSNRNYELAKRIIHTWWIYTLKLLTWLFYLVYDIVVLGFSMGYERITLAYVAALAYARQLQKELKQNSGKPSIWWRSYWRRFDARFAKNSRLAVWRLFYKRKPPETTSEQFKTGRLPQTGEEAMYSLLNCKGKDAYSILGVPPDSSQEQIRKHYKKIAVLVHPDKNKQAGAEEAFKVLQRAFELIGEPENRLIYDQSIAETLHTEKAWTELHDLLSQLQTKMAEAANTIRCSTCAQRHPRKLTERPHYAARECASCKIRHSAKDGDIWAETSMMGLRWKYLALMDGKVYDITEWANCQKGALSHLEPNSHMVQYRIVRGAQQQQQQQQQQQQQQQQQHHQHPQQPHHDRGVHHPGGGVSGVSEATLHEFLDNLYSGQHPGAHNAFAGNARRRTRRN

SEQ ID NO: 35722 - DNA, 5240 bp, DROSOPHILA
caaaaattttacaagaaacacaacgcagcagtgtgaccattccgatacataaaaaaattccataaatactataataatactgttctgtttcaataaaaatatcatttttttaataatttttttatgtcttataaataaatatttcttattaaggtccaaacaacttaaaaattaaaaataaatatggttttttttttagaagtatttaaagatttgtacgatagcacatataggagtttttagagcaatatattaaaacttttgttaaacggcttccgtttcagatacccgccaaatggagtaagcgtcgtcgtataacttacactacatacatatgtatgtagcttccttcctcgccaatatgcttcgcagatatagattcaaaggagattttgattttgtaacggtttgccatgtagttggtagtggtcttaatagaagattaaatgaaaaagtctatggatatggatttttaagataatcttgattaccagtgtttcaaaacttgggcgggaacagaagaatttcttgtttcaacaagatgtgttcaaataatttttgtgaggaaatggctcttttttaattcatttggaaaaattcaatgttcctaatggttatgttttaatatttgctaataatgttagttctcactgttatttacaacatttctgtgttccaagcagattcacttgaaattacatacccctaatcttaaatcattgtagatctaaccatgatttgcattaaccctactgtgactataatatgctatgactgtatagcggctattgatcctggtaaaaagtatatatactttatatggtcgtacatacatgcttccttccgccttttatgactactttagtatagcattttactctacgaataaatgatataagaaggacaacacagaacactatccaagaccccggtcgagccacgccctgagcctgcccagaaatgtttcgggcaggaactaacgaacgatttcaacaacaaactatagtatatcccggcgacacttgcggagctgtttgcgcaacaacatagcattcaattcggcctgctttcgcctctcttcttcctcgatggctcgccgaatttcctccgcctcgttgttggccttctccgagatgatgtggacttcgggcaggacgtccaagatgcccttacgaatgaggtactgatagttcatcgccactgagtacttaatctcctggccagttatcgcgcttagttcttgccagtgaatgtacatccagttctcatttcggatatccttaatgctgttgtaaactggaacgaaatcgtcgatctttgcaatgaacgttttggccacatccatgatctcgactttttcatgaaatattttcattgactcgttgagttcgtcgcgaagcctcatcaagttattccacacatcttccaagtccagttgcgctatcgggttgcccaaggtagcgtcctcgagcttcagaaagttggcgcagccgtaccacaggttcttgtagggagtgaagctagcgattatgctctccaggaactcaacagagagtggctccagctcaaatagctcctgccgaaattgcagagtttggctgaccttctcgagctccttaatcagagcccacgtcttcttaatgtccactgacgtctcctgtgcgcggttcgtgttaaacgccagtgagtaggcctgcacctcgtcgttgagggactccagacgctcctcgaacgcttggcactcgctggcgtgcaggcggagaaagtcctcgatgtccaccttctgctcgtccttcaatgtcgataatcgcaccattatctggtgcggccatgcgtacacgttccacttcatggcgaactggtggtcactcaggttgtaaaagaagctatccagcaggtcgtactccagccacatgacctgaatgtcagccttaagctcatccactaaatccggaacagtctgcgcaaagtcgcgaatctcgtacaggtgttcaatgctaatcggacgctcggcgattctgcggaacatctccaggcaacggtccagcaaaacctcattcgtctcatacattcggtccacatagtactcgaatatccgtctcacgacttcaatgcgcttctttatcatgaactgcttcattgtatccacgtttatgtaaaacggtccaatagtaataaaggcaggcaggatttcgcgcagttcctccttcaatcgcttgttttccagaatgtcccgctttacctccgaggacggcttgtgggcttgagcatatgcctgcatataggtgtttacattgagaaggtaaaagtcgatgaatctctcgtagagtcgggcgtacgccctgagaggcagcaccgccttggcgtagcagttcttcagaagctcattctccctcaggaacctatcctcgataagctccaccgtcaggatatacaggttaggggcgaacttcaaaaaactcatgacagacccatcaatgcatcttactccagacgatttctccaggcacttcttaaagatctcgaccagccccggctggaactcatccgggtcagtggagtaaaacaccttgcgatcctcgctgatgccaagggtcatggcgaatacaggtttttgaaaggggaactcggtgtcgatgtagttattggtccacttgtagttggacttcagttcaaggaattgcaggcaggggtcgcaaacgaaatgcgagaagttcatcagcgacgtctcgagcagcacctccattgactcttgcatacggaacttgacctgcagtataaaccgcgagatcttgcacatgagatagaccgtccaggtgttgagggagatgtccagccagccctttcccagggctcggaggaccacggtgatgaccgttgtcagctgttgcggccaatagactttaagaaacgtggccacgttgtcgctatgcgcctcctgcgcttgcaggaagtccactagcgccaggggcttgctaaagctgcagatgaagatcgaaagtgtttcgatgtactggcactcgatggccactccggccatggcctcgatgccaccgacgcaataaaacagactggccttcaggtagtcgtaccgcttctcctgcatggttatgccaagggcctgcagttcaagacgctccttcccggagacgtccacggcgaaagaccggggcagaaattccttgaggttgatgttccgaaactggggaaattccttgggcatcttaaggataaactgctccagctcgtatagggccattaggcgctcgaacaccaagttcacctcggagcgtagtcgtcttttgcactgctcagacaccttagccgcctgcaggaccgattcgatgggcttaaagctataaaacacggtggactcaatgtcctcgtgcaggacacaatccacgatcagctccatcaacataagctgctcccccttgtgccgctcgtgaacagcggcctgcagccgcttgatgtacttgtgcgggtcctcagccatgaacatgaactgaagcttgggtaccgtgtaggtgcatccgtcctccagcgatagaagcgtccagaggtcggagtcctcgtggtgcgcggtaacagctgccatgccccactggcagttcagcaggctttggttgtaaggcaggtacgccttcgccggaagcgggtagtgcgcatctccgacaactcccagctcaaaccaggccgccggagagttgatgtcaaagttgctgtcgtcgaagtagctcaggggaaacttgtgtgggaaggcgaactcggacattacattatactgctcctcggtgggctgcagcacgtcgtcagtgaggcccgccttggccagctcattcaccaagttaatcttctggtactgacgacgcctccgatccacttcgacgtcctttggaagatgccgctttggcacgtagcgggtctggatcactttcggcaggatcgtgggcagcggaaaacggtgtgccttgcccatcttgtccatcagagtgagccatcgttgggcctcctgaatggggtaatatacatcagtaagctgattccgcggaatatatagctcctgatagttcatcatagtcgttcccggtcggggcggcatgatgcaaatagctttctcagcctcacgcttgaattgactgtcatccgggcccttgttgctaattgagctggtgctgctctcatcgaattcctgggaaccttcataattttgtcccacctctaagttctccggatccatatgaaatatattgttaaagtggatttaaatgagaaagtggcgttcctttcaaagcagtgtatttgttgattgttacaaagcccgagcattaattactgctgtttagtcaaattaaaccaaaaaattcgattttataaaattaatgtgaatatggcggtctcagcaatatttaatatttttattaaattatatgtaaactattttatttccaaaaggatacattgacttcagtaaggtgtttgcatcgcagtgaatgaggcatttgcgaccatataaagctcactttatactttcttgatcagtatgaacaaccgagtcgaaatagccatatgaacaatcgaatgtaaaatttggtcgtttaatttggtatacattttttactacatttttttaattttgaacaatctttaatttcaatttcaagcttccgttgttgtttattcattttttattatttagcgcacttttatgagaattattttttttgccgtaaaaggttttactaaattcgataaaggtaaaaagaagcatttccgactctataaaatataatattcttgaacaggccaacaagccgccccaaactacgacgctaacacgcaagacttcacgagactttcactgtcacaattacaaagtaatttgattgtaatgcgaatttctatagatataccattttgcaacatctcgctcgcagtaatgcgaatttctatagatataccattttgcaacatctcgctcgcaaagtcgaggaaccctctgacttttgtctgtttttcgtcccttataacaccaacaaaccgcccaaaactcccacgcttttgaaaaattttttaaatagtttattttgttttttaaatttccttcgatctgctaaaagaatgttggaatttctcattcgcacttagtatacgacttgagtaacaggacttttaaagtaggggaactcgatcttgttttgattacaagaaatattaaaaaacatttaacattctacatt

SEQ ID NO: 35723 - DNA, 3240 bp, DROSOPHILA
atggatccggagaacttagaggtgggacaaaattatgaaggttcccaggaattcgatgagagcagcaccagctcaattagcaacaagggcccggatgacagtcaattcaagcgtgaggctgagaaagctatttgcatcatgccgccccgaccgggaacgactatgatgaactatcaggagctatatattccgcggaatcagcttactgatgtatattaccccattcaggaggcccaacgatggctcactctgatggacaagatgggcaaggcacaccgttttccgctgcccacgatcctgccgaaagtgatccagacccgctacgtgccaaagcggcatcttccaaaggacgtcgaagtggatcggaggcgtcgtcagtaccagaagattaacttggtgaatgagctggccaaggcgggcctcactgacgacgtgctgcagcccaccgaggagcagtataatgtaatgtccgagttcgccttcccacacaagtttcccctgagctacttcgacgacagcaactttgacatcaactctccggcggcctggtttgagctgggagttgtcggagatgcgcactacccgcttccggcgaaggcgtacctgccttacaaccaaagcctgctgaactgccagtggggcatggcagctgttaccgcgcaccacgaggactccgacctctggacgcttctatcgctggaggacggatgcacctacacggtacccaagcttcagttcatgttcatggctgaggacccgcacaagtacatcaagcggctgcaggccgctgttcacgagcggcacaagggggagcagcttatgttgatggagctgatcgtggattgtgtcctgcacgaggacattgagtccaccgtgttttatagctttaagcccatcgaatcggtcctgcaggcggctaaggtgtctgagcagtgcaaaagacgactacgctccgaggtgaacttggtgttcgagcgcctaatggccctatacgagctggagcagtttatccttaagatgcccaaggaatttccccagtttcggaacatcaacctcaaggaatttctgccccggtctttcgccgtggacgtctccgggaaggagcgtcttgaactgcaggcccttggcataaccatgcaggagaagcggtacgactacctgaaggccagtctgttttattgcgtcggtggcatcgaggccatggccggagtggccatcgagtgccagtacatcgaaacactttcgatcttcatctgcagctttagcaagcccctggcgctagtggacttcctgcaagcgcaggaggcgcatagcgacaacgtggccacgtttcttaaagtctattggccgcaacagctgacaacggtcatcaccgtggtcctccgagccctgggaaagggctggctggacatctccctcaacacctggacggtctatctcatgtgcaagatctcgcggtttatactgcaggtcaagttccgtatgcaagagtcaatggaggtgctgctcgagacgtcgctgatgaacttctcgcatttcgtttgcgacccctgcctgcaattccttgaactgaagtccaactacaagtggaccaataactacatcgacaccgagttcccctttcaaaaacctgtattcgccatgacccttggcatcagcgaggatcgcaaggtgttttactccactgacccggatgagttccagccggggctggtcgagatctttaagaagtgcctggagaaatcgtctggagtaagatgcattgatgggtctgtcatgagttttttgaagttcgcccctaacctgtatatcctgacggtggagcttatcgaggataggttcctgagggagaatgagcttctgaagaactgctacgccaaggcggtgctgcctctcagggcgtacgcccgactctacgagagattcatcgacttttaccttctcaatgtaaacacctatatgcaggcatatgctcaagcccacaagccgtcctcggaggtaaagcgggacattctggaaaacaagcgattgaaggaggaactgcgcgaaatcctgcctgcctttattactattggaccgttttacataaacgtggatacaatgaagcagttcatgataaagaagcgcattgaagtcgtgagacggatattcgagtactatgtggaccgaatgtatgagacgaatgaggttttgctggaccgttgcctggagatgttccgcagaatcgccgagcgtccgattagcattgaacacctgtacgagattcgcgactttgcgcagactgttccggatttagtggatgagcttaaggctgacattcaggtcatgtggctggagtacgacctgctggatagcttcttttacaacctgagtgaccaccagttcgccatgaagtggaacgtgtacgcatggccgcaccagataatggtgcgattatcgacattgaaggacgagcagaaggtggacatcgaggactttctccgcctgcacgccagcgagtgccaagcgttcgaggagcgtctggagtccctcaacgacgaggtgcaggcctactcactggcgtttaacacgaaccgcgcacaggagacgtcagtggacattaagaagacgtgggctctgattaaggagctcgagaaggtcagccaaactctgcaatttcggcaggagctatttgagctggagccactctctgttgagttcctggagagcataatcgctagcttcactccctacaagaacctgtggtacggctgcgccaactttctgaagctcgaggacgctaccttgggcaacccgatagcgcaactggacttggaagatgtgtggaataacttgatgaggcttcgcgacgaactcaacgagtcaatgaaaatatttcatgaaaaagtcgagatcatggatgtggccaaaacgttcattgcaaagatcgacgatttcgttccagtttacaacagcattaaggatatccgaaatgagaactggatgtacattcactggcaagaactaagcgcgataactggccaggagattaagtactcagtggcgatgaactatcagtacctcattcgtaagggcatcttggacgtcctgcccgaagtccacatcatctcggagaaggccaacaacgaggcggaggaaattcggcgagccatcgaggaagaagagaggcgaaagcaggccgaattgaatgctatgttgttgcgcaaacagctccgcaagtgtcgccgggatatactatag

SEQ ID NO: 35724 - protein, 1079 aa, DROSOPHILA
MDPENLEVGQNYEGSQEFDESSTSSISNKGPDDSQFKREAEKAICIMPPRPGTTMMNYQELYIPRNQLTDVYYPIQEAQRWLTLMDKMGKAHRFPLPTILPKVIQTRYVPKRHLPKDVEVDRRRRQYQKINLVNELAKAGLTDDVLQPTEEQYNVMSEFAFPHKFPLSYFDDSNFDINSPAAWFELGVVGDAHYPLPAKAYLPYNQSLLNCQWGMAAVTAHHEDSDLWTLLSLEDGCTYTVPKLQFMFMAEDPHKYIKRLQAAVHERHKGEQLMLMELIVDCVLHEDIESTVFYSFKPIESVLQAAKVSEQCKRRLRSEVNLVFERLMALYELEQFILKMPKEFPQFRNINLKEFLPRSFAVDVSGKERLELQALGITMQEKRYDYLKASLFYCVGGIEAMAGVAIECQYIETLSIFICSFSKPLALVDFLQAQEAHSDNVATFLKVYWPQQLTTVITVVLRALGKGWLDISLNTWTVYLMCKISRFILQVKFRMQESMEVLLETSLMNFSHFVCDPCLQFLELKSNYKWTNNYIDTEFPFQKPVFAMTLGISEDRKVFYSTDPDEFQPGLVEIFKKCLEKSSGVRCIDGSVMSFLKFAPNLYILTVELIEDRFLRENELLKNCYAKAVLPLRAYARLYERFIDFYLLNVNTYMQAYAQAHKPSSEVKRDILENKRLKEELREILPAFITIGPFYINVDTMKQFMIKKRIEVVRRIFEYYVDRMYETNEVLLDRCLEMFRRIAERPISIEHLYEIRDFAQTVPDLVDELKADIQVMWLEYDLLDSFFYNLSDHQFAMKWNVYAWPHQIMVRLSTLKDEQKVDIEDFLRLHASECQAFEERLESLNDEVQAYSLAFNTNRAQETSVDIKKTWALIKELEKVSQTLQFRQELFELEPLSVEFLESIIASFTPYKNLWYGCANFLKLEDATLGNPIAQLDLEDVWNNLMRLRDELNESMKIFHEKVEIMDVAKTFIAKIDDFVPVYNSIKDIRNENWMYIHWQELSAITGQEIKYSVAMNYQYLIRKGILDVLPEVHIISEKANNEAEEIRRAIEEEERRKQAELNAMLLRKQLRKCRRDIL

SEQ ID NO: 35725 - DNA, 5829 bp, DROSOPHILA
acggcgacacagctgtcctttttagaaataaggtttctaaaatgtcttgcctcgcaacaagctttgcctcgccaacaaggttaaaatttaaacaagagcatattcgctcccaaaacgtacctgaataaaattcgggttcttcaggcaaaaactctgaggaagattacaggctctccgtggtacatgaggatcagagatatcgaacgcgatctgaatgtgacacaaattggagacaagattcaggaaatagcgaaaaaatacaacgactaatatctcatcctaatagtctagctagacgactaagtatcgcagcccaaagccatcggacaagtacgagaagaagattaaaacaccacctgtctgaccggaacttgacataaatcatacttaattcaaatcttctaaatattactaaacattccatttctttaatactcttaatcatataatctttgtaaataacaacttagataataagaatagttaaaatgataccgattatatattaagttttccaagaaggataatagtacgctagtcaaataaataaaataatttcgttaacaaaaaaaaaaggtacgtggcacttttggctggcatgtgggcgttagagtgggcgtggaaaaacgggtcagcaaacttgtgctgcgtctatgtctctagaatctgtacgcctaatcttaaatttctagcttttcgttcctggatctcaacgttcatacatggccagatcgtctcgactattgttcctgatcaagaatatatataaattatatatttcaattgttattatatcgactatgtattttcacttctttttttcgtacacgctcgtagctataaattttaaattaaatcaaactttattttaataaatacaatgattgactttcccgtcacgaaattccttcaagcggaacctacgcgtttcaaattattagattttcactacccgacttgtacacatttttggttagtgtattttaataatcccgacaaaatgcagaactccggacgtggtgcagaccactttaacttcatcacgcggacggaccgcaaaagtctgcatacccaaatcggtttgctggtgaacaaggcgaaggaagtgaccgcagcggagctgcacgaacggagcaaaaggctgaagaacatgctggatgaggaggacaagcggtacgaggaggaattttcaaacacggtgaagaaccggatcgaccaggacatcaaggaacgaaaggagcacctccacgccatcaaggagcaggttgccaagcagcagaagaagttcctcgaggaaaagcacattcagcaggtcatgctcgactgttatgagatccgcgaggctcttcggcatcaggaccttgtggagacaaagatagtccaagaggagcaaattctggagaaccaacggaagaagcggcgcgagtgccagcaggataactattggctggagctgaatcgccgtcggtgggcccagttcgactgcaaccaagctgaggaaaatcagaggcgccaccagatgcaacagcaagtgaatcatgtcctggccgtccaagtagctgagcacgaggagaagcgcaaggcggcactagcagaaagaatggaggacgagcggttaattaattctcttctggaggagattcgcttggaggagtttgagaaagagcaccaagctgcgccagtggaccaactagcctaccaggacgagctactgaaggagattgagcgaaagagatgcgcccgcctggcggagtgggaggcggagaaggcgaaccacgtggccttctgcagggaaacgcaacggttagaagccgaagctctggccaatatcgcccagtctaagaaggacctcaacagagctactctcgaatacctggcctaccttcgccgtatgcaatctcttgaattgggaatcgaaaagatgatggacgagcgcatcgccgatctctaccagctggacatgtgcacaaaggtcaacattacagaaagggtacgggtgaagcgggaggctgcagagaagtgccacgagatcctccggaagcagatctgcgaggactacgaacgcaaaatccggtctgatgctgaacttcgggagaacaaaatgatggagaatcgctttgttcatccggaggtcacccatgaaatgattgcgtgccgccagatccagcacaaagcagacctggatgcacaaataaaggagatgaagcgtatccaggaagaggaagagaaacgatttgatagtcgccttatggccgctgtcgatgatcccgtcctatgcaaaagattagctaaggagatcttggacaatggtgttgattacctcgctccgcatccaaactggcgggttatggcctgtaatcccaacaagtacatccccagacctccggccaccgagcaagatttcaatgccagagttgcctgtgccagtgtggacaaatgcccttgccccagagaagccagaaagcattgcggcttcatggctatactgggtaagcaggatgtacctcccgagggagccaagaaccgtgtggaagccgcctcgatcgacccggcccaaaagaaatccgcctttcgaaattgccgctgtaaattctattagttttttggatggcattgttttacaagcaacttgaaataaattataattcagttaaataaacatatgttacagctcgattttaaaacagagctatatagagtatacagagtatgctagattgttgaaaagtatgtaacacgtagaaggaagcgtttccgtccatatatattcttgatcagtaagtctgaccgtccgtccgtatgaacgtcgagaactatataagctagatggcgaacgcccacaaaccgcccaaaactgcaacgcacattctattgcaaaatattttgacttttttttatattatatgaaattttgttttgatgtaaaattctatcaatctgtaaaaaaactttttgccgcgcccactcttacgcccatagacagcaaaaaaatgacacgcccaaatgacacgaacaatttgaaatgttgtctcatttcatgcgattatgaaatttcgtgatcgcattcccagtagctgagtaacggttatctgatagtcgggaaagtcgactatagcatctctcttattttttagttcgtttttagacatcatatacgaaacaagttactacgatatacgcgtacttgcaccatcaatacagtcgaataaaagattatgtatgtaaacccatgatattactcactaacattgccaagagctgtcatatttgtatattcagactatagctggttgcaaatccactttccgtgactattggatagcactgcataggcgcataacagcatgcaagaccccaatgaaagcgctcattatgaaccccacagtggatgggtgtggttgctcgaagggggtgctttgtgcagcagccaggatacacatgacaccagtactttacgtgccacaaaaacgcaatttaatttctacatcactgctttattcgtctcacacccctctgtctatcactccatgtttttcagacgacaattggggcctgggactggccattgccgccaacttgcatgtgccgtatcgcatcgaaattggcaggacaatacgtgacctgcattcgcaggataagccgggcaaaggtgagtatcgcatgtgctggtcactgggcctgctgcactgagccacaagcaactcttaaaattggagcttaagagtgttgccatctgagagcagaaatctattattgaaaattatatccatatttaatgttcttgataaagtttgcaatataaaagatagtatggcattttagaagtcctagttttaaattcctagatgaattaattgacttgaaaagatgccaagtcacaaatgatgataatgataatgataacacgagttatatttctttgaaagagcaatctttgatcctaattgtattaggatctgcgtagcagttacaatatttatacttgtgttgttcccgtgctgaaaactcattgcattcggtttcgattttcagcaattattatcacagccccgctgaacgatgcgagcaccatcctcctgttgtccaccatcgagttggactggacggagcaggcgaggaaagacggtcagggttcaaggcccgggaggcagcacaccaaaatcctgctcatcgacatggcggccagctcattggacactcagcatgggttctacaaatatttgtctcggatgggcggatcacagagtgacgccttcgcacgcaacacgggttctccagccgaagtggtcagcagcaatcttttggtgctgactctgctaaacgacagacatcgactatttctgaatgcggccggactgatggcaacaatgcagaattttcgcgcgcccctcaacggcaactacaaggatccaccaccctccgggcatcgcaatgccagcctgcacaagctgtacccgtaccgcaatctcctcccgctctacgatacgattgtgaccaccactacccaatcggacacttcagaaaccagtccccaatttgattttgtggtgctggacatcgttagggacgccccggtcgccacttacaagtggagaccactgcttattctggagagcgacccaggaagtcgaggaggtgggtcggtggtggaagggggtggctcctacatctcccactccatacaccctggatacgacgagtggttgctggtcagcagtgtcctcctgtggcaatgtggtgccatctgctggaccatcgcggcgatctgtgtttgcctgttggtcatcatgatagcgggcatagtagccgggggaatcgccatgaggtaagtttcctgccagttaataatgtcattatagggaaatttgacttaacgtagcacccagagttaccgttaagttataatttataataagcaatcgaaattaattcaaaaggatcttaagcttaaataaatttattcaaccgtatttacatagattgagggaccgaattggtattaagtgcaataacattttcttcatttcatattcttttatttaagaaactttatactttaacactctacaattcaataaaaaatgtgtgtatatttctaaaactttattaattgatatgggagctttaagaaataaattgatttaaaatgtgcaaaattttagcaaaattgtacacaaattcaaaataacactgaaagcaactactgaatgcgatttttcaggcatatgtgggtataccattctgacaaatggtacaccgtacacggtcaaataataaagcctccttatttgctatacatcagatttcagaaaagagtaaacccgattccaagaaaagtatctaacaggtaaaacgatggacatgatgtatatatatattcttgatcagcaccattagcagagttgaactggccatatccgtttgtctgtaaaaaaaaactgtgctgtcgtgaactgtacaagctagaaacttaaaatttagattctaatattctctaccccgtttgattttattaaatttaatgtcgtgctaatttctatttatatttgattaagcattttaattataaatattattatatttggttaattttctgcccatttctatcattgtgccaaaaatagttaaattctaaataaagtgtatctaactaggctactgttttcatacccgttactcgtgaatggctctatcgaccatacagactagatcgatacatacaaataaagcgaaaactaagcccacaaaattattcaatgggtaataaatcaaaaataaattgtgacataagaagacagaaaactaacatgcccaacaattataaccgat

SEQ ID NO: 35726 - DNA, 2493 bp, DROSOPHILA
atgcagaactccggacgtggtgcagaccactttaacttcatcacgcggacggaccgcaaaagtctgcatacccaaatcggtttgctggtgaacaaggcgaaggaagtgaccgcagcggagctgcacgaacggagcaaaaggctgaagaacatgctggatgaggaggacaagcggtacgaggaggaattttcaaacacggtgaagaaccggatcgaccaggacatcaaggaacgaaaggagcacctccacgccatcaaggagcaggttgccaagcagcagaagaagttcctcgaggaaaagcacattcagcaggtcatgctcgactgttatgagatccgcgaggctcttcggcatcaggaccttgtggagacaaagatagtccaagaggagcaaattctggagaaccaacggaagaagcggcgcgagtgccagcaggataactattggctggagctgaatcgccgtcggtgggcccagttcgactgcaaccaagctgaggaaaatcagaggcgccaccagatgcaacagcaagtgaatcatgtcctggccgtccaagtagctgagcacgaggagaagcgcaaggcggcactagcagaaagaatggaggacgagcggttaattaattctcttctggaggagattcgcttggaggagtttgagaaagagcaccaagctgcgccagtggaccaactagcctaccaggacgagctactgaaggagattgagcgaaagagatgcgcccgcctggcggagtgggaggcggagaaggcgaaccacgtggccttctgcagggaaacgcaacggttagaagccgaagctctggccaatatcgcccagtctaagaaggacctcaacagagctactctcgaatacctggcctaccttcgccgtatgcaatctcttgaattgggaatcgaaaagatgatggacgagcgcatcgccgatctctaccagctggacatgtgcacaaaggtcaacattacagaaagggtacgggtgaagcgggaggctgcagagaagtgccacgagatcctccggaagcagatctgcgaggactacgaacgcaaaatccggtctgatgctgaacttcgggagaacaaaatgatggagaatcgctttgttcatccggaggtcacccatgaaatgattgcgtgccgccagatccagcacaaagcagacctggatgcacaaataaaggagatgaagcgtatccaggaagaggaagagaaacgatttgatagtcgccttatggccgctgtcgatgatcccgtcctatgcaaaagattagctaaggagatcttggacaatggtgttgattacctcgctccgcatccaaactggcgggttatggcctgtaatcccaacaagtacatccccagacctccggccaccgagcaagatttcaatgccagagttgcctgtgccagtgtggacaaatgcccttgccccagagaagccagaaagcattgcggcttcatggctatactgggtaagcaggatgtacctcccgagggagccaagaaccgtgtggaagccgcctcgatcgacccggcccaaaagaaatccgcctttcgaaattgccgctacgacaattggggcctgggactggccattgccgccaacttgcatgtgccgtatcgcatcgaaattggcaggacaatacgtgacctgcattcgcaggataagccgggcaaagcaattattatcacagccccgctgaacgatgcgagcaccatcctcctgttgtccaccatcgagttggactggacggagcaggcgaggaaagacggtcagggttcaaggcccgggaggcagcacaccaaaatcctgctcatcgacatggcggccagctcattggacactcagcatgggttctacaaatatttgtctcggatgggcggatcacagagtgacgccttcgcacgcaacacgggttctccagccgaagtggtcagcagcaatcttttggtgctgactctgctaaacgacagacatcgactatttctgaatgcggccggactgatggcaacaatgcagaattttcgcgcgcccctcaacggcaactacaaggatccaccaccctccgggcatcgcaatgccagcctgcacaagctgtacccgtaccgcaatctcctcccgctctacgatacgattgtgaccaccactacccaatcggacacttcagaaaccagtccccaatttgattttgtggtgctggacatcgttagggacgccccggtcgccacttacaagtggagaccactgcttattctggagagcgacccaggaagtcgaggaggtgggtcggtggtggaagggggtggctcctacatctcccactccatacaccctggatacgacgagtggttgctggtcagcagtgtcctcctgtggcaatgtggtgccatctgctggaccatcgcggcgatctgtgtttgcctgttggtcatcatgatagcgggcatagtagccgggggaatcgccatgaggtaa

SEQ ID NO: 35727 - protein, 830 aa, DROSOPHILA
MQNSGRGADHFNFITRTDRKSLHTQIGLLVNKAKEVTAAELHERSKRLKNMLDEEDKRYEEEFSNTVKNRIDQDIKERKEHLHAIKEQVAKQQKKFLEEKHIQQVMLDCYEIREALRHQDLVETKIVQEEQILENQRKKRRECQQDNYWLELNRRRWAQFDCNQAEENQRRHQMQQQVNHVLAVQVAEHEEKRKAALAERMEDERLINSLLEEIRLEEFEKEHQAAPVDQLAYQDELLKEIERKRCARLAEWEAEKANHVAFCRETQRLEAEALANIAQSKKDLNRATLEYLAYLRRMQSLELGIEKMMDERIADLYQLDMCTKVNITERVRVKREAAEKCHEILRKQICEDYERKIRSDAELRENKMMENRFVHPEVTHEMIACRQIQHKADLDAQIKEMKRIQEEEEKRFDSRLMAAVDDPVLCKRLAKEILDNGVDYLAPHPNWRVMACNPNKYIPRPPATEQDFNARVACASVDKCPCPREARKHCGFMAILGKQDVPPEGAKNRVEAASIDPAQKKSAFRNCRYDNWGLGLAIAANLHVPYRIEIGRTIRDLHSQDKPGKAIIITAPLNDASTILLLSTIELDWTEQARKDGQGSRPGRQHTKILLIDMAASSLDTQHGFYKYLSRMGGSQSDAFARNTGSPAEVVSSNLLVLTLLNDRHRLFLNAAGLMATMQNFRAPLNGNYKDPPPSGHRNASLHKLYPYRNLLPLYDTIVTTTTQSDTSETSPQFDFVVLDIVRDAPVATYKWRPLLILESDPGSRGGGSVVEGGGSYISHSIHPGYDEWLLVSSVLLWQCGAICWTIAAICVCLLVIMIAGIVAGGIAMR

SEQ ID NO: 35728 - DNA, 2324 bp, DROSOPHILA
tatggagtatatcccaagaaaatatctcaattcacaatagccattactctccaaaaaagtagcaaggctcggtaagaaaaactctgcttatgaacaggaagccccacgcatttttagttgctactcaatgcgttagtaaaaactcccgaaatgttgttcccagtgcagaatctcaggttcaaaggcatgtaaatcactggcgttcataaccctgtccactttctgaatacttggcaagcggaccatgaagaatccacagaagaccacttgaagacctcggcacacagcaaaaaagcgatgtcgacttagctattttgtagacctttttttttaacaagaaagcaaaacagcttcggcgacttgaaacttatatagcctcgcattaattatatacatatttaaaaggaaccgcggtataccgatttataatactcatgaaatacaacgatccgatttcgatcaaattaaaaccaacattttattgccgaactagaacacttgatgagcaaaaacagcaattgtactttctcttttcaacatttttcatggaatctgcatgtctgtctcaccacaaagccaataacatgtcggtatggatactttaaggcttaaataaaattatttgtttaaaatactccagttcttatttatttattcactcgttttattttaaaaggctctgatactggcatcactggctagctgcaagaagttataactgctgccgttgcaaacagattttgcttggatgccagcatcagcagtgacagtaactacactgcttaagcacatactcatatacactggcagaaaagcgtactgcaagaagcttaataatgcacaacctttttatacgccacataaaatgtttctctttctttttcctgtccgatgatgaaaacaacgatgtcgacgtctgcgcccagacttaagcggcttcattaaattactcgagctgcccaagtacacgagcgttataaagactttaaatgcgggcattatggtagccagccacgtggacgtggaccaaaattccactatctacattggcacgcccagccagccacgtcagcaacatcggctgcattcaaagcaggagcaggagccccatcgtcatcatcatgaggactccaaagcaaaacagtttccagcgggcgaggaggaatcccattcatcgggcgagaccgaggaaaatcattggaacgacgcccgcatcttctcgggtcactgtcatcagctggcggagcaactggccctcgatttcaataagaccgtcgtcctgtggccctgtccgcgaatgaaagtgagtacgtccttagtttaagattgctgactcacaaaggaatatctttgatgggatcatgaaacgggagctatgtacggcgaaagctgcaattgacgcactttaagtgggagaaataatcgaacatggataacttaggctcaatctttggctttgctttaaagggtcactagggtatgggtatgcgttcttactacaacggaattttaatttttaataagctttcttattttgaaaaataaatactaaagtacattattacagaacctaagaattaaaatctaaaaggttaatcgtttattgtgcggctcgttatttaattcagcacatacccactgcgcctttcgtcgtgaatggagagctgccagccaaatttggagtgttaattaaggagaagtttaggcaaaataactacgatcgtggcccgaaagagccacaggcattttgcattagcaatttgcaatttgcaaaacaatttccaaacagaaaaaggagacagctcctcctcgcaccacaaacgtgcaccgtactgtgtgcacggggatgcagcaaacaggaaatggaataccgtgccaaaggctaagggaagatgcatttcggaggtggttaggtgaggcggtgtggcgggaactatccaaaatatgctgcgaaattgcctgatgaaagtcgacgctggcatgaaattacttttagtggcaagtgttgcccttggcttaccctgccggcttagatgcacaacaagtgccctgaagaatatctggcctaattggctaggaacgcctcattcttctacttggccaactgtcacacaaatcgtgtaacgtaaagttctgttcgttacttttgcatatttttataagcccgccagcgtgccggacgattttttgttgacaattgattgacaagtttcgagcgaagtgcttccgaaagtgttataacttgttgagattgtcagcaaactttttaatgaaaatctgtgtgccccaaatgcgctgatgaactgaggcaaaatgattggcaa

SEQ ID NO: 35729 - DNA, 324 bp, DROSOPHILA
atggtagccagccacgtggacgtggaccaaaattccactatctacattggcacgcccagccagccacgtcagcaacatcggctgcattcaaagcaggagcaggagccccatcgtcatcatcatgaggactccaaagcaaaacagtttccagcgggcgaggaggaatcccattcatcgggcgagaccgaggaaaatcattggaacgacgcccgcatcttctcgggtcactgtcatcagctggcggagcaactggccctcgatttcaataagaccgtcgtcctgtggccctgtccgcgaatgaaagtgagtacgtccttagtttaa

SEQ ID NO: 35730 - protein, 107 aa, DROSOPHILA
MVASHVDVDQNSTIYIGTPSQPRQQHRLHSKQEQEPHRHHHEDSKAKQFPAGEEESHSSGETEENHWNDARIFSGHCHQLAEQLALDFNKTVVLWPCPRMKVSTSLV

SEQ ID NO: 35731 - DNA, 2696 bp, DROSOPHILA
gtaacattaacattaaaagtgtttcaaaaaaattatttcgcttttaaaaaattgtcagatgagagacaaattagaattaaacataaatataaatgtgtaaccggtagataattcgagcggcgattttaacaaacaaatttaaccagctttaaaattataataagacagggcgcgaatttttaaaaattattttatttcatcatattgctacgaaattggcaaaaaactaccctaatatgtacaatgtaaattcatttctttgataagaattgatttcggcccgaaaatcgtcttctagcacaacacggcacacatatacgcgttctcgtctcttgtttttaactcacacaagcaagcaaattctatttttagatttcttatgttctcagcgtgagcgagcggaaagagagcaattctggccgtcaccaaaaaagtggctgcatagtgccaaaccaatgtatggccgttacgcatccttgttattctagtgtctttgctataatcgtctcggctgtttaaactcattagaaatatatatatatatattctaaaatagatagtaaatttctattttactgcgtttcatataaataaactctttgaagcagtgccaaaaatgaagaccccaaagtgttgggtagttttccaaaattgataaatatctcgaaccaattgcaaacttttctcaacaaattttaaatgataaattacattcttttgtctctctcttttttttgcaggaaggcactgtaaatggcaagcaatagaaacacaattatgtcaaattcgaaagttcgttaacatcaacaatcaatgcaataacaacaaatgctgctgcgacaacggcatccgcaggcccctcaaaatgtaattgggccagggcgtggcagcttggcagtgggcaacggtcaacggcaacggcagcagcaatagcaacaccactgaaccgcaaaaatcgacagcagcagcatcaggacaccaaacaaaatacgcaacataaatgaagttaacaacctgtcaaattgctaaagtatttccgctgttgacagccttcttcttcctcaattctcccagcgcagcctcattatccttcggtttgagtcccaccttcgcctccgcctccgcctccagctccttgtcctcgtcatcgtcctcgtcctcccactttcactcagaaaaacccctccactcggatgtactcgtcctgcgagcggccaagccatccagggccattgcaacaagcgcagatgcggctacgcggtctgtgccagcgtcagcggcagaaacaacacttggcagcaagtcaatttggccgacagctatacaaacaaaaagtccacgtaatgcgcgtgaagctggacgtcacaaacgtcaaatgcaaaagcccgcaatccagcagcaaccactgcagcagcagcaacagcgcattaatcccccgcagcaaaagcgacagcagcagcagcagcagcagcagcaagtgcaacatcaggctcaacgagtgggcgttttaatacctccttcgctgcacgttgatttgacgcatgtgcaacagggctttcagaatttcctcgactttttccaactgcatttatttaatgtcaccgtcgattttctacgtgatgtgggtgagtacacacaagccgaaaaacaaacccatcaggaacaggccaagcatcctcgttccatccagccctgaaaatccttgccgacgtgcatcgcgtgtgttttattgataatttttttgcgcccgatgctcaagtttccactcctgctcgaagatttccacacgagtcataggctgaaggtggcactttatgaagatgaattggccgtctgtttgctgcgcctaaatgtttgctggcaggcaacatagtgcacgttatgggaaaccttgccaacggatggggcggttcaaatcaagcgcattaattggagttaaagttatctgactctccagtctagtcttcagattgaagtctctgaaggtgggataccttagcattagcagtcttttttagaagacgagggctccgacctctgagaactcaatttgcatgcattacgccttgatttcttttcgctcttactctgcctttttcgcccacgtaaataaccctcatttcgcaagcgaatttaaactaatttaagcacgtcctgcctttgactttcttttagtttgaacgaaggtccacatccagcttcccggcatttttcagcagaagttatactttaattatgcgtcatttttctggtcggtcactcgcatcagaaggatgttttccctgctggtgacagcttacaatttccggtccagagctattcattttttaagaccatgccaagacttgtgttagtttcgaaaccataataaagcagctaggattagcagctgtctctgcagggatataaattgtagaataagtggacaacctggcgaacggcaaatgcagcaggatgtctgtccattcgtttgcgttgcacaacagcaacatgtgaagtaatcaatccacaccttttgtgagctctttatataatatacatatatgtggtgggttgcgcaactattttcctggataacttcccttttcatttcgtacggaggttaagagcagtatatggatcgctgcagccgcttttgtgccgttgccaacgatggtcagaaaataaactcgcagacatttcttcggacataaatt

SEQ ID NO: 35732 - DNA, 696 bp, DROSOPHILA
atgaagttaacaacctgtcaaattgctaaagtatttccgctgttgacagccttcttcttcctcaattctcccagcgcagcctcattatccttcggtttgagtcccaccttcgcctccgcctccgcctccagctccttgtcctcgtcatcgtcctcgtcctcccactttcactcagaaaaacccctccactcggatgtactcgtcctgcgagcggccaagccatccagggccattgcaacaagcgcagatgcggctacgcggtctgtgccagcgtcagcggcagaaacaacacttggcagcaagtcaatttggccgacagctatacaaacaaaaagtccacgtaatgcgcgtgaagctggacgtcacaaacgtcaaatgcaaaagcccgcaatccagcagcaaccactgcagcagcagcaacagcgcattaatcccccgcagcaaaagcgacagcagcagcagcagcagcagcagcaagtgcaacatcaggctcaacgagtgggcgttttaatacctccttcgctgcacgttgatttgacgcatgtgcaacagggctttcagaatttcctcgactttttccaactgcatttatttaatgtcaccgtcgattttctacgtgatgtgggtgagtacacacaagccgaaaaacaaacccatcaggaacaggccaagcatcctcgttccatccagccctga

SEQ ID NO: 35733 - protein, 231 aa, DROSOPHILA
MKLTTCQIAKVFPLLTAFFFLNSPSAASLSFGLSPTFASASASSSLSSSSSSSSHFHSEKPLHSDVLVLRAAKPSRAIATSADAATRSVPASAAETTLGSKSIWPTAIQTKSPRNAREAGRHKRQMQKPAIQQQPLQQQQQRINPPQQKRQQQQQQQQQVQHQAQRVGVLIPPSLHVDLTHVQQGFQNFLDFFQLHLFNVTVDFLRDVGEYTQAEKQTHQEQAKHPRSIQP

SEQ ID NO: 35734 - DNA, 2336 bp, DROSOPHILA
aacgcagaaccacccttgtatcataaatgttgtttattactgctgctgttgttgtttattatttacgctttttcctcccattcttgtccctcaaagcttttcgacccacactcagtacgggttttcctatacaagcttgcagctttattacttatagaatctttaaaattaaaagcaatttttttaattttcgtccggcgctcgtttggttaaaagggtttcactacagttgaaattcactgaagtttcatttaaaaaacgttgaaaggtcaaaaaatcaatttacctgtaagcgcctgtgataaatgtatattttaatgctttatgtaagtataaagacatactttatggaagtttttatgtatatatatgtatatatgcactaaaggggatgtcaagcaaaagcttagttaagcaagccaggccttgaataaaatcaattttaaaagatttataagatcggcttaataacttaggtttaacaagaaaggcacccctaggcgtatatacccttgcagtaattatacttcgttctatacatttaattatgtatgtacaccgaattagaacattttgtgttcaaaagcaatgaggaaacgtttttattaaattttcctttggcaactatatgatatagtggtgcacaccattcagttccgttcttatatactacctgaaagagaaggagtctttgggagaagtatcagatagaagcacgcatcattttaaaacttggttggtcaaaattgggatttgcgaccaaagaataatcagcttaccgctgatgcaatcaatctaactataatagtcttttacgaatgctattcattctttttattttcttcatcattgaaagagttaagaatatgtgcaacaatgcaattttttttggattgacttctgaatattgggagattacttcttgggcttataatcgatatttttaattgatcacgtagcttgaatgtatccgcctctattggccgcattctaaactgttttatttcaggtggaccaattggtaaggtgatggggtctccatggggatgatgtgtatgttttggggcccaatgcttagcttttgagcaacattttcgcttccgagatgtccttctcgccttttcacatcccgggccgcaaggtcctcctggaccaccaggacctccaggtcctccgggaccaccagggcctccaggtccatttggaccaccgggtcctccaggtcctccgggaccccaaggcatgccaggtccgcccggtccgccaggtccccccggacctccaggtccacctggaccaccagggccacccggacccatgggacctcctggaccatttggtccacctggagcccctggccttccgcatattccaagcccagaagaagttgatgaacttgtatgaattggcgaagaaaaatgtgaactcagagttgacattgatgtgcttggtatatcttttttcatggaagatgtcgtgattgaagaagttagaattgttgaagatgttgtaaaagtttttgctgattgtaaagttgtacttgggcttatcgaagtcggaattgttgatgttctagaatacgttgttattttataagttgtgcttcgaattcttgacgttgaagtggttgttgtagttgttgttgttgtagttggtgttgtagttgttggtgttgttatagttggagttgttgtagttggtgttgttgtagttggagttgttgtagtagatgttcctgtagtttgtgttgttgttgttgtagttgttgtagttggtgttgaagttggagttgtagttggagttgttgtagtttttgttgttgttgtcgttggtgttgtagttgctgttgttgtagttggagttgttgtagttgatgttcttgtagtttgtgttgttgtagttggtgttgttgtagttggtgttgttttagttgtagttggtgttgttgtagttgaagatgttgttattctgggagacgttgttatcggataagtcgtttttagactgtctgctaatagatctgaatttccatccgtttgtgttgactctggtttttcctctggtaatgggtcaccggggcacttgctgcctggcttacaccaaccacctccatggcaataagctcctaaagggtgcggacaaggctgtcctggcttgaaccagcacatttttggcgggatgggaacattgcatccaggtttccaagggggacaatgtgacgtcggacggttgtaacaccctggcctccaagagggacaggtctcggctctcctgagatcgcatgggtcttctttgatcaagtcacagatatccaagaggttcttttgaatgtgttc

SEQ ID NO: 35735 - DNA, 336 bp, DROSOPHILA
atggtccaggaggtcccatgggtccgggtggccctggtggtccaggtggacctggaggtccggggggacctggcggaccgggcggacctggcatgccttggggtcccggaggacctggaggacccggtggtccaaatggacctggaggccctggtggtcccggaggacctggaggtcctggtggtccaggaggaccttgcggcccgggatgtgaaaaggcgagaaggacatctcggaagcgaaaatgttgctcaaaagctaagcattgggccccaaaacatacacatcatccccatggagaccccatcaccttaccaattggtccacctgaaataa

SEQ ID NO: 35736 - protein, 111 aa, DROSOPHILA
MVQEVPWVRVALVVQVDLEVRGDLADRADLACLGVPEDLEDPVVQMDLEALVVPEDLEVLVVQEDLAARDVKRREGHLGSENVAQKLSIGPQNIHIIPMETPSPYQLVHLK

SEQ ID NO: 35737 - DNA, 2210 bp, DROSOPHILA
tgagatataattatttttcagaagcgtttttatgggagacatataacagaagtctccggagaaaatgaatactttaaaaaaaatacacaactagctcttacttggaaaagaaaatgaaaatgattaaagatttagatgcaaaattacccattgttttgggtattcttttctacaccaaatatcactatatgccaagattggcaaacagacgagaatactagcggtccagtcggtgcttaaattatcgaaaaatgttgccaatatggataccagaaaactgtagtcatcaagaaaaacttcgatgttttaacgggttttcctaatatatttacaacacccgttcatcaataaaacatctaacttatttcatcaattatttattacgaaagatttattatacctgctactagtagagtaaaagcgtataaatattcgctgcagtctatggttttcattgttttctgttaatataatatcaatttcgggccaattatcaaaaatagatttacacattgtataatttgagttccacctcgtttgtcaaagattttttaatgaagtgcgtggtccgacattctgctacatccgcaacgactaaagcctttcgagtaatgaacccaaatttaaccaaaaaccaccattccccattccatagggaatcccgtggtattctcaatttaaagcggcaaggaattttaataaaacagcgctttccctcgggaaaatgacaccttttaaaatgcatagaaacctccctgaaatgaatttaaggactttttcccggtacggctgtctatgttgtaggcgcaaatgagcggttccgtcaaaacgcacttgatcgccttgggccagtcgttgcgttttaaaggtcaaatatcatatattgcatcaatctgaaagaaacaacaaaagcacaaaatcagttttacgatcacttagactataaatattttagttccgtggcgttctctaggctctaagcttattttgagctgtaaagctagaaggcccttaccgatgcgaagactttctcatccacatccttcgccttcccctctaacaaggccgtcatctgtgcaacctggctcttcatctccgccagctgcttcgtgtacgcctccactgcgctttcaatagcctgaacccgttggcttaactcggccaattggtcgttcagtggaatcgctttttcatccacacttttttccatagcaaattcttcttccattaaatagaagtggtattgatttaaaaatgaaaacaatttaaattcatttaccctcaaggtataaaaccacttggctgagctttgtgctggttgtaggctctgcagacgttttcaaaaacaacttaaaataactatattatatattatctgttttttttttaattcaataaaatactctatttttcggtcacgaaaccgatccaggtgaatcttttaaagatacctaaaacgccgttgtttaaggtatgcccgattcatattgagaaatacgcctacgggctaaacacctccacaatgtggatgttgttgcttaatttgtgagtataaaacttaagaatttgtgattaagcaatgtcctcgtccatctttcaaaacaatatttcaatattcaaataatttcaaaaaatagttggaatttttttagtttttttttaattccctatttagaacaaattgggtttatttgcgacttttcgcgaaaattaaatttttagttagcaacctctcaatcagcaatgcggtcctgctaaaagtgtggcgcacgcaattcctaattcgtgaaaaactgaatgcaatattaaaatttattagtgggcatatcgacgacagcatttttgaggacatttttagtatgcatgtcatgtcaattacctggattagtatgaacaactgtgccataagaccggggaacttatttttgaccagcttccctggcttccgatgacagggaccgttcacaagattttggttcactcgaaacagatttttgaaaacacagttcttccagtcggttattttggcgaagaggctgcagaatccagaaatataatttacaaatccgacagacttcatcatgccagaaagcacagtcgagtttcaaactttacgagtttcacgagtattggaaacttcggaccccataagataatttataaatttaagcaggcgcactaaaaaaacataggcgactccctcttccgcg

SEQ ID NO: 35738 - DNA, 210 bp, DROSOPHILA
atggaaaaaagtgtggatgaaaaagcgattccactgaacgaccaattggccgagttaagccaacgggttcaggctattgaaagcgcagtggaggcgtacacgaagcagctggcggagatgaagagccaggttgcacagatgacggccttgttagaggggaaggcgaaggatgtggatgagaaagtcttcgcatcggtaagggccttctag

SEQ ID NO: 35739 - protein, 69 aa, DROSOPHILA
MEKSVDEKAIPLNDQLAELSQRVQAIESAVEAYTKQLAEMKSQVAQMTALLEGKAKDVDEKVFASVRAF

SEQ ID NO: 35740 - DNA, 3278 bp, DROSOPHILA
accaaccagccgctgattatgatgtgttaatggcctcgctggtcttttcttctcgagtattctgtgcggagaattcttgtagtcgtgtcttacgaggagtcttctgagttgagtgctctatctttgtctgtctgcaagactggggtgctgaagaagtcgtcatattgtacgcgctgaacaatttagagatgcaagtgtgcaaatgatagttcgcgacataaagaaaattagtaatccaccagataattccagataattgaaaaatatttttaacacatttgacaaatgggacatgcagtttttatatgtttgatcttcacgaaacgcgaatacccctggcttacaagtaagacaaatactgacccagtaactgttcttcccgatggcaaaagtccgctcttttcgcaaccttttgaaccatctttctaagaaaaactcaaggaatgctgggcttcattcataaacaaggtcgtttacacgacgggaaaagtagaagacctaatagttattaattagtaggagggaatgaaaatcgtagcaaaatgattttcaaataccgggtcacatggaggtaatggtgggtagaactatgcggatgactacgtggtgggctagtgtatgtaagatgttagctgcggcacgatgattgctgtggcagaagtttttaagattgacccgcataccagcgtgttggtcccaggccagagcggcatccactcagagagacgggtggggaatcaattgctctttgatgactcttaattaaacttcgcaatgcactttttgagtattgttaagctatcgtcgtccgtcgattgaggaaatgctttcaagtttttgtgcagatccatcacggatgccgtgccaggaattagctctgctcatgatgacacctgcccacttgaacagctcctaccaggggttaatggttcatagatgaggccatcaatttccgacaccagattatcatgcttttatactcaatatggttttatttgtctttcagctaatgaaattggacacatccgaagacctcgcccgatgtgcgtgggtgctggcgcatcgcctttgaatcgaattcagagacatggtgagtcactgaccagaggccaagaaacccgcgtaggagttcggtgtcatgtgagcagagatcagtcaacaaacacaacattcaacggaaggcgaaattacagcatagagcagacgacacatatccacagacaggttgcaccatcgaggagctccatatggaggccactgatcaggaggtcatgctggagggcagggaagacctcatgtccacatcggcgacatcgtccacaaatggcggggacactaatggttgcggcaaaaaattggtgagttttccattgcgcttaaagctgctcactatatcggtagttttggatccatcccttttcccttttaagtatttttactatcttataactgaatattcagacgtacataatttgaaaatatttcaatttcaatacttcatgcgttcgttcaagcagaactaaatgtatgaaaaagggactcgagtattacccagtattacataagctgctgaatgctttttgcaactaaatactaaaatgctcaaaatggtcaaggacggcagcttggcagcttaataagcaattcaatggaatttaagatcagaaaatgcagccatataggctactgcccacacgtttatatggaagcagtatcaataactccacaccctggacatctgtccgctgacatatgcatttaactctcccttttgatttcccgccccacactactccgctcaattgaagcaattcatgctaattagaaattttattgcatttactgcacttattgttaattgtagtccgtaacctctccggatcccacaccgtacgtgaccaagcagcgagtgacgcgtccaacgcctcccgctccttcaaagaatccgatgcaattcgtccagatcaagccctgcaacctctaccagaccgcgcaggagcagctgaagaaggccgaggaggtcaagaagctgaaggaggtgaagaaggaggagccagaggagtggcagaacgtaagtccatatcacatatgtatacaaattagcggtatacagccgctcgataaatgggctgtgaatcgtagcactgatgattttttaggcctttaaaaagggctagactaaagctaaactgtttagacctcttacaatcatgcgatagtctgaatattgtgaaaacagtttattcatgcgttagtgtttaaggaagtgcctcattaagctcgtcaggtctactagaattatttatctaacctaatctacaaatttacccgggctctcttagtaaaaacgaattcaagaatcggcttccgaaactggtctttctctttttttattgttggttttcgttggctagccgttggaaacctatcgccccggataaactaaagcgaaatcacttgggcatggtacatagcacatggctcgttatggtcgctccagtttccaatgcacgtcgcccgttagcggacaaaaagatattgcattgcataatcactattacattttgttgatagttttttcctcgtcgcctgctttttgcccacttctattttccttgcacaatattgtgtgttacatgcaaatttgctgctgccataaccctggaaaagagttgcctttgacgtgactgtacctaactaattaccgaatcaaccattttgatgcaggcgctgcatttaaagtgccttttggcgtttaatcaatgttccatgggcatacggtttttcgaaatttcagaggttcccagacgaaactttgagttacggatgtgcgccaaaagaaaaagggaagaaatccattaaaatgcgcatggcgttttgaaactgggcaaccaactttgttcggaaaggaagatcaaatgccgcttagtctcattcgtgtataaattgctctcttttcgcttaatcgtctagtgcaaaaaccttttaaatttaaatttagcaatccgagttgcagatctattgaaaccatcgcggtcgaccgaaagctttttacctgtaagtcaaaccaggaaacaagagagagattaaaaacctttaatatagtatcaaaaatattttttgccagataaattaaacaaaaacatctggttttttagacgtagagtaagatctctctgtgtaatctaaacagttgcacatcactccgattcattaaaaaatggatcttaaattctttactgcggtaatgactgccatgaaactgagcgaagtttacg

SEQ ID NO: 35741 - DNA, 580 bp, DROSOPHILA
tttcagctaatgaaattggacacatccgaagacctcgcccgatgtgcgtgggtgctggcgcatcgcctttgaatcgaattcagagacatggtgagtcactgaccagaggccaagaaacccgcgtaggagttcggtgtcatgtgagcagagatcagtcaacaaacacaacattcaacggaaggcgaaattacagcatagagcagacgacacatatccacagacaggttgcaccatcgaggagctccatatggaggccactgatcaggaggtcatgctggagggcagggaagacctcatgtccacatcggcgacatcgtccacaaatggcggggacactaatggttgcggcaaaaaattgtccgtaacctctccggatcccacaccgtacgtgaccaagcagcgagtgacgcgtccaacgcctcccgctccttcaaagaatccgatgcaattcgtccagatcaagccctgcaacctctaccagaccgcgcaggagcagctgaagaaggccgaggaggtcaagaagctgaaggaggtgaagaaggaggagccagaggagtggcagaacgaagtgcctcattaa

SEQ ID NO: 35742 - protein, 110 aa, DROSOPHILA
MEATDQEVMLEGREDLMSTSATSSTNGGDTNGCGKKLSVTSPDPTPYVTKQRVTRPTPPAPSKNPMQFVQIKPCNLYQTAQEQLKKAEEVKKLKEVKKEEPEEWQNEVPH

SEQ ID NO: 35743 - DNA, 2310 bp, DROSOPHILA
aacggattgttggcaattgttcaggaagaacatctgaataacatgtccagatgggtggtttgggttgtttagctgggattcgtgggcgccattttttggtctgggggacatttgtcatcctaaaaagtcaacgaaaaatgggaagtagtaaatggttaccgagcatttactttggtgtgctttattttttcttttctggtaaaatacgatacattcagacttttaattagagataagactaatttaaaagaataatgcttttaaataaatttgcactaaaacatgttgttggataatttgaaggctcagttcacgttccattaaaaaacgtttggttgtttcttaggcattttaaaggagtgaagatgctagttacgtgattaaggacacttactttaagcagtcttttgtggattgatttgtaaactctttaactgaaaatgaaaaagagaaaaagcgtttgcatcgctgagatatcaatgcctgacagctgagaccaaataaatataaataaaaagcatgaaattgaattagaatcattaatggaaaaggaggagtactcctatatatgtacatatatacatatattccaacaagaggccacagtgctttccttggcatataaaattactgtgtagagaatatccacttggcgctgcatttatgttcattatattcccaactgcagtcgagtgaggaagtgggtgttggaattctgtgggacccagaattgctgcactccagttccccaaggatactctctgaattatccgggatgccgctgtattgacttattagccacggataccaccgctctcgatatcattggtctggatttcaatggatgagggtccaagctgtgtcagggccattaaaggcatttcgaagcaaatgtaaatgctagttttttattgagctcaataattgtataaagtgccttattttcgaaaaataaatcttgaactgatagcaactgcggcacaaatagatacaatttaaaatgaacttaaccaacatatactttgaaaccatggtaatttgtaaagctttctacctaatggcgaaatcaatcaagatgttacaaaacaatgaaaaactgtttcaacgcaacttagtcagagttaacagaccttaagccaaaaagctaacaacagctaccgcctatacgcgcctaacttactaattcatatttaaacttcttaaattctaattgatatttattttcccctctttctcacgcaggcggagtcccctttgctgcccctgaaggaagacgagccatcgccccctcaagtccacagttcctcgcacatatcagccagtaggtcaccccacttcggcacctcagctggtgacctcgagccaaagcacctcccattagcaccgaactccccgtccaacgagcaggccaagtgcgagggtccggaaggagaggccaacaacaacaacagcaccagcagcaaccacaatcacaatcccaaccacattcgcacccataggcgccagcacgagtatcagctctatcccaacgacaccttcgctcaactggagggaaaggcccccaagccgaacaccaagatgcagaccaaagtggatgcggtgggccagatcacgggtccgtggggaaagtggcagctgcgaacggtgctactgatcttcctgtgcaagattccatcgtcctggtttatggcctgcatcattttcacggccccagcacccaggcacggcgagttcttctgcaagcccccccacacaatcggagcccagaaccaaacgcaatggatcaaggtctcgcatccgcagaaggaggagagcgacgatcaggagtttagcattgacttctgcaatgtctaccaggatgcacaggagcacgcccatcactattacaactacgagaacagtgaccaggagccgcgcgtgtgggagaaacctctgcaccgcaactccaacgtaattccttgcaccgagttccagcacgagtccgactaccactcggtggtcacgcagtacgacttggtctgctcccgggacattctcgtatccgtcactcagttcttccacctctttggcgtgctcaccggaggcatattggctaatcagctgctgaaatagtaagtttttttttttttttttttttttttactttgcttttatttattgaatctttttgtataagaactaacaataagtttaaaaatcttaactataacaagtattttttgaacaggttgtattatttttccaactgttctatgtttaaacggccctaataatttattcgctgggttggtaggtcctttcgccggagac

SEQ ID NO: 35744 - DNA, 903 bp, DROSOPHILA
atgaacttaaccaacatatactttgaaaccatggcggagtcccctttgctgcccctgaaggaagacgagccatcgccccctcaagtccacagttcctcgcacatatcagccagtaggtcaccccacttcggcacctcagctggtgacctcgagccaaagcacctcccattagcaccgaactccccgtccaacgagcaggccaagtgcgagggtccggaaggagaggccaacaacaacaacagcaccagcagcaaccacaatcacaatcccaaccacattcgcacccataggcgccagcacgagtatcagctctatcccaacgacaccttcgctcaactggagggaaaggcccccaagccgaacaccaagatgcagaccaaagtggatgcggtgggccagatcacgggtccgtggggaaagtggcagctgcgaacggtgctactgatcttcctgtgcaagattccatcgtcctggtttatggcctgcatcattttcacggccccagcacccaggcacggcgagttcttctgcaagcccccccacacaatcggagcccagaaccaaacgcaatggatcaaggtctcgcatccgcagaaggaggagagcgacgatcaggagtttagcattgacttctgcaatgtctaccaggatgcacaggagcacgcccatcactattacaactacgagaacagtgaccaggagccgcgcgtgtgggagaaacctctgcaccgcaactccaacgtaattccttgcaccgagttccagcacgagtccgactaccactcggtggtcacgcagtacgacttggtctgctcccgggacattctcgtatccgtcactcagttcttccacctctttggcgtgctcaccggaggcatattggctaatcagctgctgaaatag

SEQ ID NO: 35745 - protein, 300 aa, DROSOPHILA
MNLTNIYFETMAESPLLPLKEDEPSPPQVHSSSHISASRSPHFGTSAGDLEPKHLPLAPNSPSNEQAKCEGPEGEANNNNSTSSNHNHNPNHIRTHRRQHEYQLYPNDTFAQLEGKAPKPNTKMQTKVDAVGQITGPWGKWQLRTVLLIFLCKIPSSWFMACIIFTAPAPRHGEFFCKPPHTIGAQNQTQWIKVSHPQKEESDDQEFSIDFCNVYQDAQEHAHHYYNYENSDQEPRVWEKPLHRNSNVIPCTEFQHESDYHSVVTQYDLVCSRDILVSVTQFFHLFGVLTGGILANQLLK

SEQ ID NO: 35746 - DNA, 2336 bp, DROSOPHILA
taattgcctccctattgcgctaactgaaattaaactgtatgtgcatatatagtataataggcgcattaggctttgccttgagaagggtcctgtccacgagtccttccgcggcagctttcagcctggatatgggattaatccgccaggggagtggagcaacagctgctcggctaaattggcctgtggcaccctgtagccaaagctctagcttcagtttcgcccggattcattgggcccgtggcctgtggccaaaggacaatgaaagtgaaaatgccccacacgtgaccgactccactagagtcctgctcgcgaacgagcttcgcttgaagttcggagcgccgacatcggagaaagcttccgctttcgttttcactttcacttcgtggctcgcaaaaaccaactccagcccgatgagctttccaccgcttttcaccgctttccaccgcttttcagcaaatcagttgcgcgttgggcgaacgccagcaccaatcgactccgtttgtgtcgcggacgcagtttttagtattcgataaaaaaattattcgcctattttcatttctcgagcgggccgagatttgcatctattttctttaaatttatgtattttctgatcatattggagttttacttttaattttattaattatttaataattatttaaaattgatactaaaccgattgttattttttcttaattttgacgaaagtaaatccgatttaaacaattttgctcatcctgacaatattgtgtatatactcttgcttacaattcaatcttaaccaacttgtaattacttgcttgttctataagctgattgtcactgaaagcggagcttattcgaaatcgaagtgaaataacaaaataatacaaacttaataaaaatgtaatgtaaatgttaataaatgtgtaaagaagtgaacaaatcggctggaatgatctaagactggccaaaactcagcgagcaactcctcgcacatttcaccggtttcggacccattatgctcacagacattggaggcagtgcaatcggtaacggaaatggccccagtggccacaacagtggcaatggtcatgtcctagtcagcggacttcactcgagcgactcctccagcggaattggcagtgcgagcagtgagaagttggcaacgcgcagcgacgagacccatgcccaaaggcggagcagtggcgaaggggatgctgacgaggatgcggatgatgacgatgacgatgaggatgaagatgaggatgatggggatgaaactacggtagatatagatacccccaagcagtcgagtgggcttcgctgggcgttttggcagcatatgcatgcgtaattttatgcttataattaaccctctgccgcaatcagaaatccaagagcaaattatgcgtgtggcagcgataagctgggcgcaatttgcaggggctttagttggggtaggttactttgaagggactgaaaacaaaagtggtttagacccgtaaaaaattgtcggtcacgatttgctcaaagcatgcaaatgacacatcccagtctgcgtattaaataattaaacatactatgtatgactgtagacttgagcttttttcgaaagttggagaaacgacatcctctctcattcttctgtctcgattcaaaaaattgccgaaatccattcaaatagccatacagggtatacagcgtatcagggatgcgaaaccaccaaccaagtggggcaaatggccatttcggctgaccttgctttggttaataaatttcctttgtttttgctaaataagatatctttgggccgccatcagcagatatttcacatttatgggagtcgctcccctggcgatttcgttggcaggaatttaattaaaatcagccaccggtgacataagacagtctgtctggtggaattctagttttcagtcctagcacctaattctactccgttgccaccaggttcatcatgggactgccggtggctttcgcccgggtgctccactcattagtgactctgccacacgtgcgtattgagttcgggaaacaagtgtgataagctggaaacggcgctgtttagcatgcgaatgcgataaacgtggaagtcagagccgtgtattccacattctgccagattatgcaaatttgctctgccttattttatttcccacagccgtatgcaaattagtccttacaggacaggcgactcgtgtgagatgacgttactaaatttatttatttcgccctagcaggcttcattttgtctgatcaaagacatgaaatcaaattgattttttctttagagaaagagatctatatcctatgtcagaaagggtagggatcatctg

SEQ ID NO: 35747 - DNA, 336 bp, DROSOPHILA
atgctcacagacattggaggcagtgcaatcggtaacggaaatggccccagtggccacaacagtggcaatggtcatgtcctagtcagcggacttcactcgagcgactcctccagcggaattggcagtgcgagcagtgagaagttggcaacgcgcagcgacgagacccatgcccaaaggcggagcagtggcgaaggggatgctgacgaggatgcggatgatgacgatgacgatgaggatgaagatgaggatgatggggatgaaactacggtagatatagatacccccaagcagtcgagtgggcttcgctgggcgttttggcagcatatgcatgcgtaa

SEQ ID NO: 35748 - protein, 111 aa, DROSOPHILA
MLTDIGGSAIGNGNGPSGHNSGNGHVLVSGLHSSDSSSGIGSASSEKLATRSDETHAQRRSSGEGDADEDADDDDDDEDEDEDDGDETTVDIDTPKQSSGLRWAFWQHMHA

SEQ ID NO: 35749 - DNA, 4504 bp, DROSOPHILA
aacctcccactccggactgagcatcatatcgcttgagttgcccttgccgaagaaaaaataatagtctaaaatatatttatttattattccgttcgatatccgatgatctcaacccgtatgctcgtatcttcacgtgttggcatcgcagtgtttacaaattgaccatctaaacgaaacagcgaataaaatgcgttgcccaagcgggtcaaaacaagagagcatcgcggccataaaaatagcacacagcgattcagtgggggtatagctcggtgcacatacacataggcggacaaatgtgtgtgtctaggcgattgcttgtttaaatcgctgaatagtaaatactctacaaaagtattacacaaaatatgtatattagctaccacctttggtgtgggttttgtattggttttgatcagatctcaagtaagctcattacagcattaagatttagacggatatgctaattcaatctgaaatactcaatcttcgtattttcctaataaagaaatatatataataataatattttctcagttcttatttacgaaaatgaaacgaatgattttcactggtccgaaactaaaatcgaaagaagaaatctccaataagagtacatattaatgtgtttactttttatggagtgcttaaaaaatggagcgacaattgcagtaaccaaccatattccaattggatattggcggaaaagccaattattaaaccaatctggcgataatgatagatctctagataagtcccgcaaatcgcatgtggtcatctcagcgaattgctcctgcgcatcgtgcgttacaaagactagaacgaaggctatatggccgccagtgcaacatatatcggccagaaataattctacatacatatagtatatagccgtgctcagagctatatttcgaaatgagctacccagagacacggagaaaagagactgccttgttcgagagatgggatttcggtgctgcgagtgtttccgaaagtcttcttgacgattcgacgatccgcgccgggcatttcattatttttcattatttcgttagctggcatcggtgccgagaagtcagattgctgggcccaaagttttcaaaaatcttcacttgctgatatttttagaaaattttgaaagcagaaagactaggcagtctgggaatggactcctgaatagatgatcacagaccgaacaggaggataatcccaataggaggtgaagcatttgcataagattcgattgagtgcactggcgaaatgtgttccacctcggtgctgtgtccgctctgcgcggtgcccagtttcggcagtattgacgcactgcagcagaggctgatcaaggcggccaacggcccactggcctgtccctttgccaactgcaaggagctcttcctggggctggacaagctcaccatccacctgttctcgcacacaagtctgatggctcaggagggaaacgagagtccagcgaatggccaacccgcctcgtcccggggcttccttgccgcagctcctcccaaacggagggccaagcgaaccaggtccaagcccgtcgtcccaaccccaccgcctgtgcggaccaccccgcccgcccactgcgacatttgcgagttcagtttccggaataccgagctgagggacatgcacgtccgcttagtccacgaaaatgcggagggagaacccaagcaaaaggaaccccaacagaaggaaccggtaactattggctatgtacatatattaagtgctattatctaaagagtttcgtaatgcactttcgcatattcttatatcgattttgattttttttttctatgctcactggcagcaaaaaaaaatcatacttaaaaagctagaccatttacattgaatctgaaacaaaagtttgacgtaattaaaatcaacaacaacaagaaagaaatctatatacccttatattttaaaaacaactgatgtatgtacgtatatcgttcccattattttcaattaatttttcaactgttcatatgactatgtatatatatgatagatattaatttgtttttgatcaatttaaaaccatggcaactttgtgatatagtgaatgaaagtgaatgatttttgtgcataaatttgaaactgagagacagacggtaatgtaatggaatatttggccatgagggcatattgatgaattgataaatataagtgaaattccgattattgctttatacaggaccaggagccctacaagtgccatctctgctccaagacgttccgaatgaagggctcccttcgaatccacctgaaagtagtgcacatgatgggcgtgccctgctccaatcccaatccaaatcctaatcccagtcctacacccgcttctaccaccagtgcagttactgccacgcccaagctgagcatttgcgatcgcattcgacacacagagcctggagcccttggcaacggaaataactccacgtgcaccgcatcccagccatacgcgctgagtggggcgctgagcatgctccagcagtcccccagttcgccggagtcgggcacggccaccccgaagctgtgggagtgcgatgtgtgcagcaagtccttcaccaccaagtactttctgaagaagcacaagcggctccacaccggcgagatgccgtacacatgcgagatctgcgccaggaccttcaccttccagcagtcgtaccacaagcatttgctctaccacagcgaggtaaagccccatgtctgcggggtttgtggacgcgccttcaaggaactgtctacgctgcataaccaccagaggattcacagcggcgaaaagcccttcaagtgcgaagtctgcggtgagtatcgatcaaaccccttaattagccgccccttattttgttagccagcttataaatgagcatactccattgcgatttgccctatttactttaaatgaaggagaggtataccttcttttccgggtcactccatgtctaaccttttcgtatttcggactcgtccacaggcaagtgtttccggcagcgagtctctttccttgtccacacgcgcatccacacgggagtgatgccctacaagtgcgagctctgccaaaagacgttcaggtacaaggtcagtcaaaggacccatcgatgtcccaccgaggaggcccagacaccggagcagctgataaaggcgttcctggagggcaacgactcgcatactcagccttcaccagcgagcgccgaaatagctgccatcaacagcagctccattgtggatcctgagcaggaggcactgctttcgcagtcaatcgacgacattgtcgttgagcagtgccaaaagctgggcatctgtggtgtggagccgcgggaggagggacagctcatatccctacagccggttgcggtggtacacttcagcgggaatggctctccgctgcagcaactccagaacttgagaatctactcaccgcaacaaacagagctacctagttccgatggcgaagtcttccagcgctttttgatggacgccacgtagttggaacgaagatgcatatatccacttaatttatacccttttatatcattttacattgtttgcacttccccaaaggcgatctaatcaattcctaagcaccccctaagaaaaacgtcttaattacatcttcttatgaggatattatttgaatcttagttgttttatctcagccaagtgtaaatcgactaggacccgacttgtttgcaatacaacaacaacatctaatataaattatgttaaactgccgattttatttaaaactattctgggcaacgaacccgagcgctgagttgaggcgaaaatgatattaaatcgagttagttcagttttcaaatgtacttggttgattataaacttatttattatgaacgccgttttttgtaattaatcattcatctgaggcgcttccagagctggatcctgaaccagaaggcgagccactgcgagaccggctgggcgatcgcgacccagagccagatctggagcccgaacgtgatcgggaaccggacttggatctcgacctagaacgcgaccgagagccggacttggaacgggatcgggaacgtgataccgatctcgatctggatccggatttctgggatcctgccggcgaatttgtgcgtgatctggagccgctaccagaccgagaaccagactttgagcggctgctggcccgagagccggagccagatccagatcctgaactggacccgctgcgagttcgactccgagaacgagactgtcgatcgcgggctacctgggcgggtgagtccgctccagatgctgcctgtgcgccaacagctgcgtcctcgctcgtcttctccgtctcgccaatgatttgcatttgctcctcttccctcacttcttccacgatctcctcctcctcgccaggaacttctagctggcgctcgcgatagcgctgcatacgatgctccatgctgtccaatggacgatgcttgacaacctggtagaaataatacaaagtaaagctcgctataga

SEQ ID NO: 35750 - DNA, 1835 bp, DROSOPHILA
acgattcgacgatccgcgccgggcatttcattatttttcattatttcgttagctggcatcggtgccgagaagtcagattgctgggcccaaagttttcaaaaatcttcacttgctgatatttttagaaaattttgaaagcagaaagactaggcagtctgggaatggactcctgaatagatgatcacagaccgaacaggaggataatcccaataggaggtgaagcatttgcataagattcgattgagtgcactggcgaaatgtgttccacctcggtgctgtgtccgctctgcgcggtgcccagtttcggcagtattgacgcactgcagcagaggctgatcaaggcggccaacggcccactggcctgtccctttgccaactgcaaggagctcttcctggggctggacaagctcaccatccacctgttctcgcacacaagtctgatggctcaggagggaaacgagagtccagcgaatggccaacccgcctcgtcccggggcttccttgccgcagctcctcccaaacggagggccaagcgaaccaggtccaagcccgtcgtcccaaccccaccgcctgtgcggaccaccccgcccgcccactgcgacatttgcgagttcagtttccggaataccgagctgagggacatgcacgtccgcttagtccacgaaaatgcggagggagaacccaagcaaaaggaaccccaacagaaggaaccggaccaggagccctacaagtgccatctctgctccaagacgttccgaatgaagggctcccttcgaatccacctgaaagtagtgcacatgatgggcgtgccctgctccaatcccaatccaaatcctaatcccagtcctacacccgcttctaccaccagtgcagttactgccacgcccaagctgagcatttgcgatcgcattcgacacacagagcctggagcccttggcaacggaaataactccacgtgcaccgcatcccagccatacgcgctgagtggggcgctgagcatgctccagcagtcccccagttcgccggagtcgggcacggccaccccgaagctgtgggagtgcgatgtgtgcagcaagtccttcaccaccaagtactttctgaagaagcacaagcggctccacaccggcgagatgccgtacacatgcgagatctgcgccaggaccttcaccttccagcagtcgtaccacaagcatttgctctaccacagcgaggtaaagccccatgtctgcggggtttgtggacgcgccttcaaggaactgtctacgctgcataaccaccagaggattcacagcggcgaaaagcccttcaagtgcgaagtctgcggcaagtgtttccggcagcgagtctctttccttgtccacacgcgcatccacacgggagtgatgccctacaagtgcgagctctgccaaaagacgttcaggtacaaggtcagtcaaaggacccatcgatgtcccaccgaggaggcccagacaccggagcagctgataaaggcgttcctggagggcaacgactcgcatactcagccttcaccagcgagcgccgaaatagctgccatcaacagcagctccattgtggatcctgagcaggaggcactgctttcgcagtcaatcgacgacattgtcgttgagcagtgccaaaagctgggcatctgtggtgtggagccgcgggaggagggacagctcatatccctacagccggttgcggtggtacacttcagcgggaatggctctccgctgcagcaactccagaacttgagaatctactcaccgcaacaaacagagctacctagttccgatggcgaagtcttccagcgctttttgatggacgccacgtag

SEQ ID NO: 35751 - protein, 525 aa, DROSOPHILA
MCSTSVLCPLCAVPSFGSIDALQQRLIKAANGPLACPFANCKELFLGLDKLTIHLFSHTSLMAQEGNESPANGQPASSRGFLAAAPPKRRAKRTRSKPVVPTPPPVRTTPPAHCDICEFSFRNTELRDMHVRLVHENAEGEPKQKEPQQKEPDQEPYKCHLCSKTFRMKGSLRIHLKVVHMMGVPCSNPNPNPNPSPTPASTTSAVTATPKLSICDRIRHTEPGALGNGNNSTCTASQPYALSGALSMLQQSPSSPESGTATPKLWECDVCSKSFTTKYFLKKHKRLHTGEMPYTCEICARTFTFQQSYHKHLLYHSEVKPHVCGVCGRAFKELSTLHNHQRIHSGEKPFKCEVCGKCFRQRVSFLVHTRIHTGVMPYKCELCQKTFRYKVSQRTHRCPTEEAQTPEQLIKAFLEGNDSHTQPSPASAEIAAINSSSIVDPEQEALLSQSIDDIVVEQCQKLGICGVEPREEGQLISLQPVAVVHFSGNGSPLQQLQNLRIYSPQQTELPSSDGEVFQRFLMDAT

SEQ ID NO: 35752 - DNA, 5414 bp, DROSOPHILA
gttttaaataagggaatatgaatttatgagctttatttagaagtaaacttcatctgcttggatgtagtataaaatattaataactagaaaaaaatgtttttttttctttttctacttaataattaagaaaccacttggtctcatatacatttatacagacaatgggttaagttcagatgatttataaaaagatataatgtaaaatgtcagattttgtaaattttttgaacagcacagtataggggaaagttattgagagattgttaccatgattcaaaattaatataaataaaattgattatgatcccattaagatttttaaagtggacaagaattggtgggcaaatttttcaagtctttggaaagtcaagaaaaattaatgacagatgcttcttgtggcaaattgatctgaaggctaaagtggaaattgtatatagcttctttcgaagtgatatttgctcttgcatcgttgtttaattaattcaattgttcaatttaataaattaaacttttgttagtgcgcaatctcagaaggagtctcctttatacttgcatatctgtatctccctcgcaatactagatactagatcttagtaatctaaaagtcgaggagctctattacacgtatggcatcacaacttgtgaattctgaagaaagttcttttctcaagtttcaacgggtttcccatgtagctgcatatgtttcgtattgcattaaaatccagcttgttgaattttattttgcaaagcaaagcaatattttcataaacaagcgtatttatttagttaccatgactttcgttctatagcagcattcagatattgatatttttagaatggttactccgttcaaacgacgttgtcatgggtagctcgttcttttttgtgacggaaagggagacttagggtgccctgaattgtttttacactttaacattagtggcaagtgtgaagttttcctatttagttcggcctagctgagaggctaatctctaacacgatgaatcgcaccgacgacatgaagaatgcctcgctgaacgactacaagctggaagcgatggcctccgtcggctgggcggtggactcggacattccaatggcgagtgccgagaacttggccatcctaaaggaactgactgctctgcgggcgttgaagctggagctgcagcagcacatgaactcgctggatgagcgcgagatggcggtggaacgacatacccgcaacattgagggcactattcagcagaacctggtatgctatatatatggctatatgctcgatctgttggtcatttcttagtaccacctagacactgtacagctccctgaaggatgatgttatcaaggaggcgcacaacgtccagcttgtgatcttggagcgcaacaagatcaaggaggatctgcggaagaataacaaggagctggaggagtacactgaatatgtcaaagtcactgagcgtaagtcaaatgtaccccaagaaccaaaatgtgcaactaaccaatttgctggttattaagcacactaaccatctattatatatcatttgatgatacatgtgcaatttcccttttgtttgtcctatgaccaggaaagatttgccagagcaagcgcgagatagatgagctgacttcccgcatcaagtcggctaagactaccttggtggagtggacagaggccatggaagacggaaacaagggctaccagctaatcgaaaagtactacctcgatgaccagcaaaaggcacgggagctgaacattaagcgtcagctcttgcaggcggacatcgacaagcggcgcaagcaggtggtgctcctctatgacgagcaaatgacgctggagaagaatctggagcgaaccgcttgtctgtacaggtctgcccacgcggaacgccgccagatggtggagacgtggaagagcgccgtgaaccagatgacccagcgagagcacgacattcagcgcagcgagatagagtgtgcggagctggcccagaaagcccagcagacggctcagacctacaaggagtacgacaaccagctaaccgaggtcatcgagaacaaccgccaggtggagctcgcgatcgagtccctcaacgaggaaagctccgacatgaaaaaccaaatccagatcctgattgatgccacattactgaaggagcgcgagatcgacggactgcgtcgggaactggagaacctttcgaaccgggttcacctgcagcgcatggataaccgtagtcagatgaaaaagcgcgatgagaaggccaaggagctggagaacttcgcttcggtgatggagaaggttaacgctcggctgaagtctgtacagaacaaggccctcaatgcggagcagcggctgcaaattctggaggagatgatgcaggcggaggagacggctctgcgaaacctggacaaggagcaggagaaggtcaacgagatgttgtaccgcacccagaggcaggtcatcgagctgcaggacgaggagaaggtcttgaaggtgcagaacgactcgctcaactccaacctggcagcgatcaatcgcaatcagcagcaggtcaataacgaactcaagcggcagacggagatccattacagcctgtcctttaagtgcttggaggcggagcggcgtctcgccgagatcaagggtctggcagatgaccccgaggtagaggccacaaacatggcccggcttaacactctggagcaggagtatgaaaagttgcaacgcctcatcgccaccacggaggcgcagaataagaagctaaactataacatgaacaacctggtcgtccagtacaacgccgacgagaaggagctcgaaatggtcaggttcaagattaaagaggcccaggtgtactgcgagggcaccgtcaagagactgcgccagattcgatacgagaattccgagctcatagtcgacctcaacatggtcaagatgcgctgcagcgacctagaggttggcatcggaggctgcgagcagggcacctacgacctagagcagcaccgccttgccttccggcgcgccatcaaagatcgcaccgttgagcttcgcagccaagaggatgtgctcctcctcaagaagaagcatcttaacgaggaactaagcaccctgcgagccgacctcggggagcggaagaagcagattgaggcgatgaaggcgcgctttgaacttaccgcccaattgctaggcaaaaacgaggacggctccatcatgaccagcacacagctgaaggtggtgagcgcccaggaacggcagatgctggccgacgagggcgatgccctcaacaaaaaggttctcaaggctgagaaggaagtggtcgccctggaaaacacactgcgccagttcgacaaatcgaacgataactaccgaaaaacattccgatctgtggacgaaaactcaaagggtgagttataaatgaccattcagagtggaaagggttactagtattagcaacattgctctaattttgaattttaataacactcacagatacagatattgaataggaacaaattaggttttctggctctataaagaatagatattcttgatcaagatccatacctgagtcgatctggccatttccgtccgtccgttccgactttcagtaactataatagcacattaagcggtcatattctagccatgtctacaagccgggtggcttagaattgtgtaattcaatgttaaattggtagattttttccatacttctaatttctagatcgcgagcgggccgaactggagctgaaggaacttgaggcggcctactgccgcgagctggaaaaactgaaggttctcaggtgcaaggcacagcactaccagcagaagcacgcagcccagcgagctgaggaggaagacctgatttccaaaatagagaaggcgaaggctagtcgggcggagcactctgcagttctggagaagatcgagcgcgaactagatgaccagcgaatgaagctggacagggccaatcgagagatccggacacagttgcgggagatcaaggcgcggccctttagcgaggagtacctggcgcagttcgagcgggatctgtctctacaggagctggaggcgcgtaacaccaaggcgctgaacatgatcaccgatctggcgaacagcgacgagagcggcacggatataattggaatcctcttgcgaaaaggaatcaagttgccgatgcacctgaagcgcacgtgcagccgcgtgtcctggaacagcagctcctcgggcaagtcctcgcagggtcaggacaccgcctcctacctcaatgttaagggcaagaagttctcctgcgacggggctagtgcccggtcctccgtctccgacatgagctcccttaaggatgacacatcctccacaacctcccactccggactgagcatcatatcgcttgagttgcccttgccgaagaaaaaataatagtctaaaatatatttatttattattccgttcgatatccgatgatctcaacccgtatgctcgtatcttcacgtgttggcatcgcagtgtttacaaattgaccatctaaacgaaacagcgaataaaatgcgttgcccaagcgggtcaaaacaagagagcatcgcggccataaaaatagcacacagcgattcagtgggggtatagctcggtgcacatacacataggcggacaaatgtgtgtgtctaggcgattgcttgtttaaatcgctgaatagtaaatactctacaaaagtattacacaaaatatgtatattagctaccacctttggtgtgggttttgtattggttttgatcagatctcaagtaagctcattacagcattaagatttagacggatatgctaattcaatctgaaatactcaatcttcgtattttcctaataaagaaatatatataataataatattttctcagttcttatttacgaaaatgaaacgaatgattttcactggtccgaaactaaaatcgaaagaagaaatctccaataagagtacatattaatgtgtttactttttatggagtgcttaaaaaatggagcgacaattgcagtaaccaaccatattccaattggatattggcggaaaagccaattattaaaccaatctggcgataatgatagatctctagataagtcccgcaaatcgcatgtggtcatctcagcgaattgctcctgcgcatcgtgcgttacaaagactagaacgaaggctatatggccgccagtgcaacatatatcggccagaaataattctacatacatatagtatatagccgtgctcagagctatatttcgaaatgagctacccagagacacggagaaaagagactgccttgttcgagagatgggatttcggtgctgcgagtgtttccgaaagtcttcttgacgattcgacgatccgcgccgggcatttcattatttttcattatttcgttagctggcatcg

SEQ ID NO: 35753 - DNA, 2904 bp, DROSOPHILA
atgaatcgcaccgacgacatgaagaatgcctcgctgaacgactacaagctggaagcgatggcctccgtcggctgggcggtggactcggacattccaatggcgagtgccgagaacttggccatcctaaaggaactgactgctctgcgggcgttgaagctggagctgcagcagcacatgaactcgctggatgagcgcgagatggcggtggaacgacatacccgcaacattgagggcactattcagcagaacctgacactgtacagctccctgaaggatgatgttatcaaggaggcgcacaacgtccagcttgtgatcttggagcgcaacaagatcaaggaggatctgcggaagaataacaaggagctggaggagtacactgaatatgtcaaagtcactgagcgaaagatttgccagagcaagcgcgagatagatgagctgacttcccgcatcaagtcggctaagactaccttggtggagtggacagaggccatggaagacggaaacaagggctaccagctaatcgaaaagtactacctcgatgaccagcaaaaggcacgggagctgaacattaagcgtcagctcttgcaggcggacatcgacaagcggcgcaagcaggtggtgctcctctatgacgagcaaatgacgctggagaagaatctggagcgaaccgcttgtctgtacaggtctgcccacgcggaacgccgccagatggtggagacgtggaagagcgccgtgaaccagatgacccagcgagagcacgacattcagcgcagcgagatagagtgtgcggagctggcccagaaagcccagcagacggctcagacctacaaggagtacgacaaccagctaaccgaggtcatcgagaacaaccgccaggtggagctcgcgatcgagtccctcaacgaggaaagctccgacatgaaaaaccaaatccagatcctgattgatgccacattactgaaggagcgcgagatcgacggactgcgtcgggaactggagaacctttcgaaccgggttcacctgcagcgcatggataaccgtagtcagatgaaaaagcgcgatgagaaggccaaggagctggagaacttcgcttcggtgatggagaaggttaacgctcggctgaagtctgtacagaacaaggccctcaatgcggagcagcggctgcaaattctggaggagatgatgcaggcggaggagacggctctgcgaaacctggacaaggagcaggagaaggtcaacgagatgttgtaccgcacccagaggcaggtcatcgagctgcaggacgaggagaaggtcttgaaggtgcagaacgactcgctcaactccaacctggcagcgatcaatcgcaatcagcagcaggtcaataacgaactcaagcggcagacggagatccattacagcctgtcctttaagtgcttggaggcggagcggcgtctcgccgagatcaagggtctggcagatgaccccgaggtagaggccacaaacatggcccggcttaacactctggagcaggagtatgaaaagttgcaacgcctcatcgccaccacggaggcgcagaataagaagctaaactataacatgaacaacctggtcgtccagtacaacgccgacgagaaggagctcgaaatggtcaggttcaagattaaagaggcccaggtgtactgcgagggcaccgtcaagagactgcgccagattcgatacgagaattccgagctcatagtcgacctcaacatggtcaagatgcgctgcagcgacctagaggttggcatcggaggctgcgagcagggcacctacgacctagagcagcaccgccttgccttccggcgcgccatcaaagatcgcaccgttgagcttcgcagccaagaggatgtgctcctcctcaagaagaagcatcttaacgaggaactaagcaccctgcgagccgacctcggggagcggaagaagcagattgaggcgatgaaggcgcgctttgaacttaccgcccaattgctaggcaaaaacgaggacggctccatcatgaccagcacacagctgaaggtggtgagcgcccaggaacggcagatgctggccgacgagggcgatgccctcaacaaaaaggttctcaaggctgagaaggaagtggtcgccctggaaaacacactgcgccagttcgacaaatcgaacgataactaccgaaaaacattccgatctgtggacgaaaactcaaaggatcgcgagcgggccgaactggagctgaaggaacttgaggcggcctactgccgcgagctggaaaaactgaaggttctcaggtgcaaggcacagcactaccagcagaagcacgcagcccagcgagctgaggaggaagacctgatttccaaaatagagaaggcgaaggctagtcgggcggagcactctgcagttctggagaagatcgagcgcgaactagatgaccagcgaatgaagctggacagggccaatcgagagatccggacacagttgcgggagatcaaggcgcggccctttagcgaggagtacctggcgcagttcgagcgggatctgtctctacaggagctggaggcgcgtaacaccaaggcgctgaacatgatcaccgatctggcgaacagcgacgagagcggcacggatataattggaatcctcttgcgaaaaggaatcaagttgccgatgcacctgaagcgcacgtgcagccgcgtgtcctggaacagcagctcctcgggcaagtcctcgcagggtcaggacaccgcctcctacctcaatgttaagggcaagaagttctcctgcgacggggctagtgcccggtcctccgtctccgacatgagctcccttaaggatgacacatcctccacaacctcccactccggactgagcatcatatcgcttgagttgcccttgccgaagaaaaaataa

SEQ ID NO: 35754 - protein, 967 aa, DROSOPHILA
MNRTDDMKNASLNDYKLEAMASVGWAVDSDIPMASAENLAILKELTALRALKLELQQHMNSLDEREMAVERHTRNIEGTIQQNLTLYSSLKDDVIKEAHNVQLVILERNKIKEDLRKNNKELEEYTEYVKVTERKICQSKREIDELTSRIKSAKTTLVEWTEAMEDGNKGYQLIEKYYLDDQQKARELNIKRQLLQADIDKRRKQVVLLYDEQMTLEKNLERTACLYRSAHAERRQMVETWKSAVNQMTQREHDIQRSEIECAELAQKAQQTAQTYKEYDNQLTEVIENNRQVELAIESLNEESSDMKNQIQILIDATLLKEREIDGLRRELENLSNRVHLQRMDNRSQMKKRDEKAKELENFASVMEKVNARLKSVQNKALNAEQRLQILEEMMQAEETALRNLDKEQEKVNEMLYRTQRQVIELQDEEKVLKVQNDSLNSNLAAINRNQQQVNNELKRQTEIHYSLSFKCLEAERRLAEIKGLADDPEVEATNMARLNTLEQEYEKLQRLIATTEAQNKKLNYNMNNLVVQYNADEKELEMVRFKIKEAQVYCEGTVKRLRQIRYENSELIVDLNMVKMRCSDLEVGIGGCEQGTYDLEQHRLAFRRAIKDRTVELRSQEDVLLLKKKHLNEELSTLRADLGERKKQIEAMKARFELTAQLLGKNEDGSIMTSTQLKVVSAQERQMLADEGDALNKKVLKAEKEVVALENTLRQFDKSNDNYRKTFRSVDENSKDRERAELELKELEAAYCRELEKLKVLRCKAQHYQQKHAAQRAEEEDLISKIEKAKASRAEHSAVLEKIERELDDQRMKLDRANREIRTQLREIKARPFSEEYLAQFERDLSLQELEARNTKALNMITDLANSDESGTDIIGILLRKGIKLPMHLKRTCSRVSWNSSSSGKSSQGQDTASYLNVKGKKFSCDGASARSSVSDMSSLKDDTSSTTSHSGLSIISLELPLPKKK

SEQ ID NO: 35755 - DNA, 7333 bp, DROSOPHILA
tgtataagctgtagttaaattggtatttaatttgctaaatcaatagttggcaccactcaaactgaggcattttttaatgtctgcctgcgagtacctgtcctgaaacgcagggcctttgttcatttgacttcaagcaatgtccgtgctctctcctgcctctctatctctacccctgattttagtcgagccgggttttcacattcacttgattaccccgagtgccatgtttcgaattccccttatctcatgtgtgtttttggtactactagttctcgattccagaccctccactctcccctattcggtcatttcctgcatatctctcgaattgtcagaagttagcgtttcagcattacctgtctatggcccgatcaatccgcatggcggccggctctacacctctgagctcctggggtgaggcactatctggttccgtctcctttgtggctatttttaaagccttctttagggcagggtgtgtgtgttcgtgtgcgtgtgtgtgtgcgtgtgtgtgtgtgtgtgtgtgtgcgtgtgcgtgtgtgtgtgtgtgtgtgtgtgtgtgtgtgtgtgtgtgtgtgtgtgtgtgtgtttgtggtctattgctaatataacaatagctctcacatttctgtcaccgttttctttgcactgtggccataaaatgccttcaatttttcaactttgattcacattgtcttattatctatttgcatcttgtctcctttcttgcagcactaccaatctgtccaacgaagcacgcgaatgggaaatcagaacggaaaactgttaaaaattgaagtgaaagagtcaaaatcacagcttatgaaatagtgttgttaataagaaagcgacagcaaattgaatccacagctgcttagagactattaccatcctttaggcaacggaccgattacgagcaaacatttcgagatcaatattccattattggttgtgttggcatgttaagtgtgttcgatgccggtgcggttaagtgtcgtctatggccgaatccgttaaaagtcaatcgctctctgcattgacggaggggcagcacgacgacggtggttcaacagcaacatcagcgacattggctaataaaaccagtgggaccaacacgacaagtgcatccaatcactcgtcccagaggcgacgcaacaacaacacaaacagcaacagaaacaagagtcaccacaaaaacgagaaacgcaacgcaccggctacatcaggccccgctgtaagctcctccgtcgacgttgtacccgccacctcgactgcatctgcaacctctacccgtcggtctcgcagtcaaggtcgccactcctccgccgcagccctcagcagcaaggagtcacaaatccccaagcgctccgtgggagccatccgctccccatcttcaccagcattcaactccataccggtcgtcagtgatcaatcgctatcgcccggcagtcgtaagcgccagcttaaccagcacaacaacagtaacaacaaagccagcagtagccaccaatgtgagttgtattatctatgttttcttatcagccaaaatcattagttgcaaatcctttctcttactttgttgtggaagtactatttttaaagttggctttcacaaagtcgtacaagtttgacaacatacggtttcagattagcaaaggcacagcacacatgtatgtaataaccgtcttccgaattgtctgttattaaaaatacacagatttagaaatatagtgttaaaaaatctgtttgctacgtgcgctagttttgtttcggtagcgatgaaatctgtattttgtataacaaatttaaataatttatgtttatacaaattaatgaattagatatcatttacacaagataacaaagtattgaaaaacactatttttgtataaactttttaacttttcgaaattagtcaaagtgcgtttggttatttgtcaaaattttaaaaccattcaatcgttcaattggcttcaaaacaaaacaaatatttacaaaccgaattgaagagctaatccgaactttatttccaatgcctttttcagcggcgcccgggggagatcagctggtttgcgcgccccttaaaaaacgccgcttgcagcagtctttgggatccggtatctgcgagggagcggtagaaatcaacttaggtgcagcaagctttgaccacactcctcgtcaggcatccggagactgtgttgcacagcgcactcgatctaagaccatttcgccggaggagttgccaagcacaagcagcgctgcggcagcacgccatcaccagattcgccccagtgccagctctaccagcttctcgagcagccatcgaaacaaacgaaaggccagtattggaggatcaatagctgcggtcgagaccactccgcatagaggaacagcagctgctcgcgccggacgcagcggtaacctgctaaactattacagaaaaacgcgtaaggttagccacacacgctcctcccaaaagtcggaaaagcagtctataccagcggaggacactacggccaaccgaaacggatcagccggatccggatccagtagcaagtctggtgtgatacccaagaacaggaagagcctgcgtcattcgcagcagaacctgctggacacagaggcggcagaagtagagagtgctgctgctgaaactggaggtgaacagcagtcggagcacggaaatctggacgtgatcgaccaactgccgacccctgaagctggtcctaatcaatcagaggcatcaggaatccacaaccagagtcaattggaggcggatcgccagcccgtggtgcaggacgaagacgacgaggaggacgacgaggaagaggaagaagaggaggaagaggaggtgggcttctacgggattgtaaactctgctggctcgtcatacgaggaagacacacaaatagttgccgaggaggacgagatcacaacggaggaggaagttgacgacgaggacgacgacgaaatcgaggaagaagacctctcggagagcgaattcgcgcagcaactgattggtgaacttggtggtgagtttccttggattatttattcagcggattaacatccatcttccatttatccgtattgtatgtaaagtcctttgtaatattcacgttaaatttagtgtagtccttttctttttaaccacttgtaaaatatcacatttagaagaatacgttttctatattaacatttattgttcctgaatattgagtatgctttccactaacatttaatgaacccgaaaggttataaaagctattggatctagttaaacttaatattcacttggcttaaagtcctgatttagagcgtttgtaggcttcatttcaataaatagttggcgagagcgcgtttggtgatttcggtttggttagacaaaatgaattgcactttctcataaagtaaaatcggtaaaatgtgattttcattgtcttgcgtattcttgctttatcagtggcgaatacgcgcatacttacatatgtacattgacgaagcattcattttgcgaagtgccatcgccttgtcgctatttcccaatgcccactgtagtgtttttgtgattttgataaaaggcgagctgttcggaatgccaacgcactcaaatatgccagcggcaaacgatcgactcgcagtcaaaaatcgtgtattgcgccgtctggaacaggaataaattcgtatataccgtatatactgtatgtgcgtgtagggaaatgcgctgattaaaagttgaatgtagttaagtaccctactacttgcttctttcactgcattgcatgtctgtaacttacaactataacttaaggtccaaagaagctttgatttagggaaagtgttcagaacttcggctgtgctgtcgcctgtggccaccttgccgccaacaccattaccattgccattcccatttagccctgccttttacccatccaagagtgtcattcatttaaagtgcttcatttgatttacgtttatacatatagatatataaacgcaaagaaacgcccacattattattttaacgcatatgtgaatcattttgtatttgtgctacgaaagacccgatttattattatctaggaacaaacggtgttttctttctactccctattatttaacgtgggccagagacagtactgctatcgaacttttttttcggaattgaataatcccttttacatgcccaaaaacataaatatttattttgcacgttgttgttgttgcaattgtattttccattaatttaattaagcctaaaattgatcgctttaatccaaagcaaagtgattaaataaaaaacttcttatcatatgatttttgagtaaaagcatacctatgtaaatttctgatgcttatgttgttgatgatgatgatgatgttgttgtttttgtgctaaaacaataaaccgacgtatgaaggtgcaaaaggattgtggtgtcagcaaaggcgcagaaaagagagacagagagatgagagagtaagacatcggcagcaaaagaggcggcaacagcaacaacaaaaacaaagtgcagcataaacattaatcaaaggggagatccaacagaacacgagaaatcaagaattcggagaacacggacggacgggtgcgtgtgtgtgcgtgtgcttagattagtgtgagggatctgcagcaagtgcatcatcagaagcgacagcagcaacatcatcattgtcagcgacagaaggtcgttcagtctcctctcctgatttccccttgccattaccctttgaaagccaaaaacacacactgcgctccaaataatatattttgcattacattaaacaatgaaaaagaaccagttaactaactcaagtagtgtagctgcaagaaaataacaagttcccccaaaaaagattgcaaaattttcaaaaaataaagctgttaactgttgtctcccaatactctctctctctctctctctctctctctctctcttcccctccctctactcccgtaaacccattctctctacacacacatcccactcacacttgactcctgaaggagaacgacaacaacctcaacgtgccaccaacaacgcaaaaaaaaccaagaacaacacaccggcggtagcagcagccagcactatcaaggcgacaacaacagcaacaacgtcgtccggttatcaacaacgtgccgccccccatggacagggggcggcgccaggcgctggaggcggcggtccgcgtgccacgcgcagcagcaacagcaactccagcaacaacgttgttgactacagcattatgccgcacctcacaacggtcgcaacaaccacaccacatgccttgacaccgcaacagcaccaacaacaacgacaaccgccacaacctccgtcgcatcagcaacaacaagtacaccaacaacagcagccacctcaattgttgcccacacatcagtttgcacacttgtcgtcctttgtgacaccgacagcagcggcagcagcagcagcagcggcggcccactatcccccagcttctgctgctgccgcttactttgcacagcagcaacaccatcagcatcaacatcagcatcagcaacaacacgtgcagcaggcacaggcaccgcagccgcactattaccatagttcagtggctgtgttgcatcaacctccaccgcaccattttacctccacaggagcaggaccaccgccagcactctttcagcagcaggcaccgccgcagctaacccgctacacgccagcaacagctacaacagcggctacgtttgtgcctccgcagcagcaacaggttgtctacaacccacaacagcagcagcactcatcactgcgacgcagttcacgtggcaagacgggttcttgtgtgagttcggcagcggcagcacagcagcagcagcaccatcagcagcagcaacatagctccgctgctgctgctgtacagcagcaattgctgccaccgcctggtacctatcaataccaacaggtgggcggcaataccgttgtagttgccgtgcgtcatcagcaacagttgcaacagcagcagcagcaacagcagcaactggctttacatcatcagcatcagcagcagcagcatcagcaacagcagcagcagcatcagcagcagcagcatcagcaacagcagcgtgccactctcgtgcagccaggattcttgttcagctatcgcagcaatcaaccccagcagcaacagcaaccagcgcagcaaatacatcagggccccaaagtgacgcatagcagtggtaagaagatgaaggaagaggaagagcaaaataaggatgaaaggacaagagaccgcaagcaaatcaaaatccagggtctcctcaatcattttccataataaggctaaaatcagaggagaacttgtagattttcgcgaggttcttgtttaaataggagatagtttggcgcttctggccttaaaggaattgacagcacacacacgctctataggaatagggttaattgtggtccgcttaagacgttggtcttttgtgattgtccccgtctagggcaggaacaaattctaatgtgatttgcaaaacagtaacccgaaatctttttatgtggaactcaaaacgaccctgatcgtgagttcactgtacaaattcttggcaattggatccactctttattattggtgctggccgtagtctaggtgataatataacccatactgcactgaaaaaaaaaccacactgtccaaaatactccaacctcccttacatctttcttcgtccctcgctcgctcattcctgcgttgctttgctcgcggtgtctgccgaataatttccataactgaaccgaactgaaacaaaataatagtaaacttaacattgttttgctctgttttctctacctcccgatctctgccttcgtcttcgtctccgtctctttgtctgattagcagcttcggatgctttaacatatagtttgatggcacaacaaccgccaagtggaccgccgcatgcaggtggacagcaaataacgccaggtaaacgtaaaacccaatcgatcagtatatgtacatactcgcaccaattccagcctgtccacatacatattacgcttttgatttgcattgattttatttcaccccgcgccaaacactcctgcgttcaccatccaaaggcatctcaggtggcagcactcaatttttgatcttttgcccaaaacttgtccttattcaaacctagaccttttattttacttcttagatttgctgttttagttttgatttatttctttattacatgtgtactttaaaattatttattatttatttttagttttgactttaacatttaaaaatttatcgtcaataacccttaacaatagta

SEQ ID NO: 35756 - DNA, 2805 bp, DROSOPHILA
atggccgaatccgttaaaagtcaatcgctctctgcattgacggaggggcagcacgacgacggtggttcaacagcaacatcagcgacattggctaataaaaccagtgggaccaacacgacaagtgcatccaatcactcgtcccagaggcgacgcaacaacaacacaaacagcaacagaaacaagagtcaccacaaaaacgagaaacgcaacgcaccggctacatcaggccccgctgtaagctcctccgtcgacgttgtacccgccacctcgactgcatctgcaacctctacccgtcggtctcgcagtcaaggtcgccactcctccgccgcagccctcagcagcaaggagtcacaaatccccaagcgctccgtgggagccatccgctccccatcttcaccagcattcaactccataccggtcgtcagtgatcaatcgctatcgcccggcagtcgtaagcgccagcttaaccagcacaacaacagtaacaacaaagccagcagtagccaccaatcggcgcccgggggagatcagctggtttgcgcgccccttaaaaaacgccgcttgcagcagtctttgggatccggtatctgcgagggagcggtagaaatcaacttaggtgcagcaagctttgaccacactcctcgtcaggcatccggagactgtgttgcacagcgcactcgatctaagaccatttcgccggaggagttgccaagcacaagcagcgctgcggcagcacgccatcaccagattcgccccagtgccagctctaccagcttctcgagcagccatcgaaacaaacgaaaggccagtattggaggatcaatagctgcggtcgagaccactccgcatagaggaacagcagctgctcgcgccggacgcagcggtaacctgctaaactattacagaaaaacgcgtaaggttagccacacacgctcctcccaaaagtcggaaaagcagtctataccagcggaggacactacggccaaccgaaacggatcagccggatccggatccagtagcaagtctggtgtgatacccaagaacaggaagagcctgcgtcattcgcagcagaacctgctggacacagaggcggcagaagtagagagtgctgctgctgaaactggaggtgaacagcagtcggagcacggaaatctggacgtgatcgaccaactgccgacccctgaagctggtcctaatcaatcagaggcatcaggaatccacaaccagagtcaattggaggcggatcgccagcccgtggtgcaggacgaagacgacgaggaggacgacgaggaagaggaagaagaggaggaagaggaggtgggcttctacgggattgtaaactctgctggctcgtcatacgaggaagacacacaaatagttgccgaggaggacgagatcacaacggaggaggaagttgacgacgaggacgacgacgaaatcgaggaagaagacctctcggagagcgaattcgcgcagcaactgattggtgaacttggtggagaacgacaacaacctcaacgtgccaccaacaacgcaaaaaaaaccaagaacaacacaccggcggtagcagcagccagcactatcaaggcgacaacaacagcaacaacgtcgtccggttatcaacaacgtgccgccccccatggacagggggcggcgccaggcgctggaggcggcggtccgcgtgccacgcgcagcagcaacagcaactccagcaacaacgttgttgactacagcattatgccgcacctcacaacggtcgcaacaaccacaccacatgccttgacaccgcaacagcaccaacaacaacgacaaccgccacaacctccgtcgcatcagcaacaacaagtacaccaacaacagcagccacctcaattgttgcccacacatcagtttgcacacttgtcgtcctttgtgacaccgacagcagcggcagcagcagcagcagcggcggcccactatcccccagcttctgctgctgccgcttactttgcacagcagcaacaccatcagcatcaacatcagcatcagcaacaacacgtgcagcaggcacaggcaccgcagccgcactattaccatagttcagtggctgtgttgcatcaacctccaccgcaccattttacctccacaggagcaggaccaccgccagcactctttcagcagcaggcaccgccgcagctaacccgctacacgccagcaacagctacaacagcggctacgtttgtgcctccgcagcagcaacaggttgtctacaacccacaacagcagcagcactcatcactgcgacgcagttcacgtggcaagacgggttcttgtgtgagttcggcagcggcagcacagcagcagcagcaccatcagcagcagcaacatagctccgctgctgctgctgtacagcagcaattgctgccaccgcctggtacctatcaataccaacaggtgggcggcaataccgttgtagttgccgtgcgtcatcagcaacagttgcaacagcagcagcagcaacagcagcaactggctttacatcatcagcatcagcagcagcagcatcagcaacagcagcagcagcatcagcagcagcagcatcagcaacagcagcgtgccactctcgtgcagccaggattcttgttcagctatcgcagcaatcaaccccagcagcaacagcaaccagcgcagcaaatacatcagggccccaaagtgacgcatagcagtggtaagaagatgaaggaagaggaagagcaaaataaggatgaaaggacaagagaccgcaagcaaatcaaaatccagggtctcctcaatcattttccataa

SEQ ID NO: 35757 - protein, 934 aa, DROSOPHILA
MAESVKSQSLSALTEGQHDDGGSTATSATLANKTSGTNTTSASNHSSQRRRNNNTNSNRNKSHHKNEKRNAPATSGPAVSSSVDVVPATSTASATSTRRSRSQGRHSSAAALSSKESQIPKRSVGAIRSPSSPAFNSIPVVSDQSLSPGSRKRQLNQHNNSNNKASSSHQSAPGGDQLVCAPLKKRRLQQSLGSGICEGAVEINLGAASFDHTPRQASGDCVAQRTRSKTISPEELPSTSSAAAARHHQIRPSASSTSFSSSHRNKRKASIGGSIAAVETTPHRGTAAARAGRSGNLLNYYRKTRKVSHTRSSQKSEKQSIPAEDTTANRNGSAGSGSSSKSGVIPKNRKSLRHSQQNLLDTEAAEVESAAAETGGEQQSEHGNLDVIDQLPTPEAGPNQSEASGIHNQSQLEADRQPVVQDEDDEEDDEEEEEEEEEEVGFYGIVNSAGSSYEEDTQIVAEEDEITTEEEVDDEDDDEIEEEDLSESEFAQQLIGELGGERQQPQRATNNAKKTKNNTPAVAAASTIKATTTATTSSGYQQRAAPHGQGAAPGAGGGGPRATRSSNSNSSNNVVDYSIMPHLTTVATTTPHALTPQQHQQQRQPPQPPSHQQQQVHQQQQPPQLLPTHQFAHLSSFVTPTAAAAAAAAAAHYPPASAAAAYFAQQQHHQHQHQHQQQHVQQAQAPQPHYYHSSVAVLHQPPPHHFTSTGAGPPPALFQQQAPPQLTRYTPATATTAATFVPPQQQQVVYNPQQQQHSSLRRSSRGKTGSCVSSAAAAQQQQHHQQQQHSSAAAAVQQQLLPPPGTYQYQQVGGNTVVVAVRHQQQLQQQQQQQQQLALHHQHQQQQHQQQQQQHQQQQHQQQQRATLVQPGFLFSYRSNQPQQQQQPAQQIHQGPKVTHSSGKKMKEEEEQNKDERTRDRKQIKIQGLLNHFP

SEQ ID NO: 35758 - DNA, 4555 bp, DROSOPHILA
atttaactacaggatttaactgccgcagcgattaaagcggctttacttctcataagttgtgctaatcaagttagttcgatgtttcctttctctgagcttcagctataatatttaatgattttgttttccgcaatattattatttacttaggtttacgcttatcttgacatatgtatgcctttctccgagcggtagctttgatatttgatattgttctggtttattacaaaaacaataaaatcattttaacggatattatttatggttttattatttagtggttttcagatataaccaaaacatatgaaatatgaatttctaagtcaacctgtttcatgttatcctggagagcgcttcaacccaaccggaaacattcctggagtacgcttactgatgcgttttggtaaacgtcgtgttccggaatacttctattggaacactttcagaggcatttcaagaagcaattacacactctgataactacctttttacactattaccaaaaacaatagaaaagaatcaattgggcttaccaattatgttatgccgaataactttcttagaaaacatttatttttattccggaaaaacgatgcttgcaggatttaaattctagtaactccgctcataaaaagttcgctctgttgtaatcttgtttaaaataccaaaatgcaaaactgtccgatatctttcaagtgtattggaaaaaaaacgtcgaataaataaggcattattgaaaaatggaacagactgcttcagtcaaacattttaattgcaagctttccctctattttttaaattcaaatatggcggacaaaagctttaataaaaataatcgaaagcacacatcagtcgcataagatatcggtagtcgttaatttcgttattttcctaacatactctggtaactctaaaaatacaggcccgcttatcgatacccgactggcaccacgtatcgaaacatcgattggccacagctgcttgtgaatgaaaaaagcgtaatatcgaatcgtacaacaaattcgcgataatccactgccgcccgtcctgcaaaatcacagatccgcgaactgatacacaagcggataagagaagaggccagtaggccaaagctaaccctgccaggacaaaatcgagtcgttcgttccaccggcacacaatggagctactatagtgtgtgtgtgtgtgtgcgagagtgcgggcgcttgtgagcgtggttgtagtagtgggcgagtgcgtgtagtagtagtacgacgagtgttgtggcgacggggaaaacaaaaagaaatctagtttgtgctcaagacttcggctggaaacccggccgcgaagagtgcgtagatgtgaggtgcgatcgctgatgagccatcacctcttcccggtgctggaggcagtgcatccgaccggagaagttgagggactctaggctagcggggcagtaatacggccacatcccgtttccgattccgtaatgctgctggccgcagccggtccaccggcttacgacgccggaaaactgtccaacaatgccggatccggatccagcaacgtgggctccggcggagtgggtacgcccacggcgtcctcgtcgcgtcctagtgccgctagtgccctgatgaagaccctgtctgtgcgcctgcatcgaggcaccgagttcattaaggacaccgttcataaggccctggtcatgtccgctccaacgcctgtggccccagctacagctcctgcgcccaagatcgtggaccacagcctaaagcgaaaactaagcggcgctggcgggctgatgggctgcagcagcattggcagcatgacctcatctatcgccggcagctcgagaagtcaccactatgcactgactagccaggtggcctcgtcacaggtgattcctttgcccagtcaagtgccaacagccgcctttctgcgcacctacactgtggctcccacggcactccatcgatctgccgccgctcgcaaacggaatcccagcaccgacagcctgcttatggacctgtgcctctttaagcccattcggcccatgcccataacgccaataaaaatgtgagtactctccggtattcaaaaccgattccatttgagaaactcatactttgctttttctaacagctaagaagatttctagtagaaaacttgataacagtaatccaatttcgctacatgatatgatgtttataaaatacatgggttcttggagaactttggattgtcttagttgccatttgcatgtttatcctcttgatttatttggcttatccaactggtgtaagattccagccataaaagatggcactattaccgcgtgtgatcctaatacgttcgtatttttaaaattactttttgagatttaaacttattttgccataccgagatcgagccgaatcttataaaagagcggatcaaaaatgaccgaaaacaaagcattaatcaaaacaatttacttatatttgttctatcgttgatagccacaagttccgcggatttgaagtgaagaaaccaaaatttgtccccgctggaaatccagacagcgaagatgatgaggacaacgacgaagatgggacggtccgcaagccaaagcccaggtaagtgtccagtttaacattcaaatttatgtctaatgactgctttcttcgcttagcaacttgacattgccaacaatttcggactcggccttcgttccgatgccctatatagaaaccaccaacaccgccattaacgcaaccaccaccactaacagcgggagcagatcccgctctctcaacacacacacctcaggctctgcccaggccataaccaagccaaagcgtcgtcgtcgcgctcccatgctcacggccaaaagacgacgcaaggccctggatacggaattaacaacttcagcagatgctggaactgaagacaaagctcctgccgtgcgcaaagcgacggcagcacgcggaggatccaagcgcagtcgaggagaatcgattacggctcctacgccagcggaaccaatcaaatctccagtagcaataaaagctccgaccaagcgcaaatcaacctctagaagtgaagctgcaaaacgtagtcgtgtagcctctgtgcagaatgacactgttctcacagcgacatccaccacttcagcagattcaattagaaaagccgcaaccaagcgcattgctgctaatgaaaaagtcgccaagcgcagtcgtggttccgcagccttgtctgcgcgtccttccccgccaatgacacgtcagcgggctcgtcagcagatctccgcaagcacctaaggtctaaaaaacttcaatactcgctcattggaacgtaagcccatatggcaaaagctagaaaagctagaacaaaacaacactaggaaagagtcgcgtaagagattcgctaagttctgagtctttgggttctagttactgtttttgtgtacgtaatacatatttccgttgaagtaggtggaaatgtaagataagccagtaatcatgtaaagtacacgtagtgttcaactcgtttcgtattattcgggacataatatgactacttaagtttaaaaaagcaaccataatttttttgggtacacatattacagaattctggcttggtcttcaagactgatataacaaaaagcatccgctacgaataaaatatgatacaaaatgatatatgcaaaagaaatttaaccctcattgagcaaaaagtattaaatgtataaagaaactagttcatttaagtcattcctgatgtcactgtttgtaaacgtattgatatgctagttttgatcctattctttcaatgaatgtacaaagttcaacgttttcggttcgtttagtttatgtgcttgcctttgaggcaggttagtaaggatgtatggatagaacagtggacaggatgaaaaaacgccacaactacatttatttttcctactttaattaagtttgttacattatatgtatggcgcagatacaacgtaatcaattcacacatacaagtataaatacatacatgtaattctaactttatctaagcatacaacttatctttaagaacagcaatgaacagcaacataaaaatatagaaaactttatatataaaacatgccggtcaaatcaactgtgtgttgtgatatgaacttatttataaatccaaccaaaagacgagcagaagccctttaaatttatctgcttgactcagacaacaccgaaaaactctacccaattaagccccttatatcatcataggaagtagaagttggaaaatctaaatttgcggaactccaaaatgtttaaaaatgcgccctaagctaaggacaatttcatgcgattccaaacgaaaccaaaattacttaaacacacagcgagttgtatgcgtcaataaaaattacgagtaactacaaattacttaaattggtaatttattgttataacgattttatggaactgagccatccgcgctatcatatgtacatatatgtaaatccgtaaatttccacgctataaatcctttagtccatctaaaaatttatatgcttactttgactgtaaaataatttaat

SEQ ID NO: 35759 - DNA, 2077 bp, DROSOPHILA
aatatcgaatcgtacaacaaattcgcgataatccactgccgcccgtcctgcaaaatcacagatccgcgaactgatacacaagcggataagagaagaggccagtaggccaaagctaaccctgccaggacaaaatcgagtcgttcgttccaccggcacacaatggagctactatagtgtgtgtgtgtgtgtgcgagagtgcgggcgcttgtgagcgtggttgtagtagtgggcgagtgcgtgtagtagtagtacgacgagtgttgtggcgacggggaaaacaaaaagaaatctagtttgtgctcaagacttcggctggaaacccggccgcgaagagtgcgtagatgtgaggtgcgatcgctgatgagccatcacctcttcccggtgctggaggcagtgcatccgaccggagaagttgagggactctaggctagcggggcagtaatacggccacatcccgtttccgattccgtaatgctgctggccgcagccggtccaccggcttacgacgccggaaaactgtccaacaatgccggatccggatccagcaacgtgggctccggcggagtgggtacgcccacggcgtcctcgtcgcgtcctagtgccgctagtgccctgatgaagaccctgtctgtgcgcctgcatcgaggcaccgagttcattaaggacaccgttcataaggccctggtcatgtccgctccaacgcctgtggccccagctacagctcctgcgcccaagatcgtggaccacagcctaaagcgaaaactaagcggcgctggcgggctgatgggctgcagcagcattggcagcatgacctcatctatcgccggcagctcgagaagtcaccactatgcactgactagccaggtggcctcgtcacaggtgattcctttgcccagtcaagtgccaacagccgcctttctgcgcacctacactgtggctcccacggcactccatcgatctgccgccgctcgcaaacggaatcccagcaccgacagcctgcttatggacctgtgcctctttaagcccattcggcccatgcccataacgccaataaaaatccacaagttccgcggatttgaagtgaagaaaccaaaatttgtccccgctggaaatccagacagcgaagatgatgaggacaacgacgaagatgggacggtccgcaagccaaagcccagcaacttgacattgccaacaatttcggactcggccttcgttccgatgccctatatagaaaccaccaacaccgccattaacgcaaccaccaccactaacagcgggagcagatcccgctctctcaacacacacacctcaggctctgcccaggccataaccaagccaaagcgtcgtcgtcgcgctcccatgctcacggccaaaagacgacgcaaggccctggatacggaattaacaacttcagcagatgctggaactgaagacaaagctcctgccgtgcgcaaagcgacggcagcacgcggaggatccaagcgcagtcgaggagaatcgattacggctcctacgccagcggaaccaatcaaatctccagtagcaataaaagctccgaccaagcgcaaatcaacctctagaagtgaagctgcaaaacgtagtcgtgtagcctctgtgcagaatgacactgttctcacagcgacatccaccacttcagcagattcaattagaaaagccgcaaccaagcgcattgctgctaatgaaaaagtcgccaagcgcagtcgtggttccgcagccttgtctgcgcgtccttccccgccaatgacacgtcagcgggctcgtcagcagatctccgcaagcacctaaggtctaaaaaacttcaatactcgctcattggaacgtaagcccatatggcaaaagctagaaaagctagaacaaaacaacactaggaaagagtcgcgtaagagattcgctaagttctgagtctttgggttctagttactgtttttgtgtacgtaatacatatttccgttgaagtaggtggaaatgtaagataagccagtaatcatgtaaagtacacgtagtgttcaactcgtttcgtattattcgggacataatatgactacttaagtttaaa

SEQ ID NO: 35760 - protein, 444 aa, DROSOPHILA
MLLAAAGPPAYDAGKLSNNAGSGSSNVGSGGVGTPTASSSRPSAASALMKTLSVRLHRGTEFIKDTVHKALVMSAPTPVAPATAPAPKIVDHSLKRKLSGAGGLMGCSSIGSMTSSIAGSSRSHHYALTSQVASSQVIPLPSQVPTAAFLRTYTVAPTALHRSAAARKRNPSTDSLLMDLCLFKPIRPMPITPIKIHKFRGFEVKKPKFVPAGNPDSEDDEDNDEDGTVRKPKPSNLTLPTISDSAFVPMPYIETTNTAINATTTTNSGSRSRSLNTHTSGSAQAITKPKRRRRAPMLTAKRRRKALDTELTTSADAGTEDKAPAVRKATAARGGSKRSRGESITAPTPAEPIKSPVAIKAPTKRKSTSRSEAAKRSRVASVQNDTVLTATSTTSADSIRKAATKRIAANEKVAKRSRGSAALSARPSPPMTRQRARQQISAST

SEQ ID NO: 35761 - DNA, 2402 bp, DROSOPHILA
ttttcgatcgatagaaattttcaaagaaagatttccaaaagagtcaaaacgcgctgaaattgagctttttggtaatgtaaatcattccatacttgatatttccttcacctttaatcggtttcttcgaaatctgattgatgttattatgtagaaatgctatattttctaagcaagacagacagcaacaaaaaaaatcaagaaaatgtcggaaaagaaatattgggagccggcaaaggctttccgcccaaaaaacgagagggcgaaagtaagtatctggcaccagtcattcacaccgacgtacgagcaggaggagccccaaatggcactgcttctatcctggcactacggtcgccagtggatggaggagcgtgatatacacaggatggagaccaagttgaagataaagaaggaggccaacttcattccacccaactataccagttggcttgagaagcggagggccataaagactaagcaacagctgatcagatcttgacgttttatttgtgttcattaagttgtccagtttttgaatatgaaattttgtaaaaattgttaattgtcttcacgttctggcttttttataaaatgtgtatctaaatgaataaagataatacaaaaatagtatgtaatgtatagattttaaacgtaataataataataggtaatcaattaatttaatgctatatctgcatggtgcgacatctgttggagtaaagcgaaagctgctgatgggttttgttgtgctaatgataaatctaatctaaatcggaaaattccatagaaagcggtgaagtcctttaattacctttcattaaagtaactaattgactaagttaaaatttgaatgtacaattgtttgtacaaccgtattggaacattggaaaatttttcataatcaagtagctcttgacccagcagacacaaagcctcagtcccagacagactccgtatcaaatcacacagcaccgacacgacaagcatataattccactcaataatgatttcaaagatcaagatctggagccgctcgccactgattccggctagggatcacggttcagcgatccttccgccggcagatcggccagatcccattccggagctgtgcgaggaaaggccggtgatgggttggctgctcggctgggagtacgggaggaagtggctggagaggcgtgaggagatccagaggcaccgcaacatggtcagcaagttcggcaggatcccggcggacttcagctggtggctcaaccagcgcaggcccctctatgtgcgccaacagcgattccggagcaaggccggacctcgtgcccggaaacagataacggccttcgagatggccaagcggaggcgtgaggagcagaaccgcaagctattggagagccagcccaaaaaccagtaaaacacacactcaaaatgtccaacatgccaatcgaagggtaaactctgtcaaaattgctaagccaaacaactgtatatgtacgagtacaacattgcaatcgttgtacaaagaactccctatgatgatgcgccaataaacacggttagaatgcttaattctttttggtttgatgtggggtgatttgccattaccaatattgccattatatgctgaataggttttggtacatctcaagttgatctgaaagtacatatgatcaagtatgggtaaggaaatacattacatccttatatacaatatacaatacaagttcgtatcgttcttcggttcaattacaggcaaaaagtgattttgacccctataaaagtacaaagctgttaaaaataaaaaacaacatttgattccattggtgcgcaatcaactgcgataccaaaccgcattcgttcttagaatcgattttcggctatgtcagtaggcctttattgtatagtgttttttgttatcctgttgtccttgcgcttgcaggacgaagtcgcgacgtaggctccgaaaaaacaaaagcgcagcatcccagaaaccttcgcctcagccatttcagcttttgattggacttcccccggggaaatgtcagccccgtagaacaatggatcatacatactatatgagagccgtcatcatcgtcattatcgtcatcatctccgtcgctaaagttttccgtaatcgtcatcaggggatggataagtgaacaattggccttgcccgacccaaggcccgtggatatatttgtgtgcagttgtacatactctttatttgcatttccggctcattgcgcctaattgcgcgaaaatctggctttggagatcaaccttattgtgtgttcttggtcgctttttagtcaaatcctttgtgtttcccttttggcgcgaaaaacgcgaaataatgcgaaaataaacgaatttttaaggggtgtttcctttgcccacagtgaattgcgcattta

SEQ ID NO: 35762 - DNA, 402 bp, DROSOPHILA
atgatttcaaagatcaagatctggagccgctcgccactgattccggctagggatcacggttcagcgatccttccgccggcagatcggccagatcccattccggagctgtgcgaggaaaggccggtgatgggttggctgctcggctgggagtacgggaggaagtggctggagaggcgtgaggagatccagaggcaccgcaacatggtcagcaagttcggcaggatcccggcggacttcagctggtggctcaaccagcgcaggcccctctatgtgcgccaacagcgattccggagcaaggccggacctcgtgcccggaaacagataacggccttcgagatggccaagcggaggcgtgaggagcagaaccgcaagctattggagagccagcccaaaaaccagtaa

SEQ ID NO: 35763 - protein, 133 aa, DROSOPHILA
MISKIKIWSRSPLIPARDHGSAILPPADRPDPIPELCEERPVMGWLLGWEYGRKWLERREEIQRHRNMVSKFGRIPADFSWWLNQRRPLYVRQQRFRSKAGPRARKQITAFEMAKRRREEQNRKLLESQPKNQ

SEQ ID NO: 35764 - DNA, 2294 bp, DROSOPHILA
caggacttggtggactccatgccaggacgatgcgcggctgtcattgccaacaaaggtcacgcaaccaaatattaagattctttaaacatagttcttaagatataattcatttgttgaattatttttttatttttttttggttagttttagcaaactacgagaaacagtgctatttttgttaccgcctaaatttgaactttttttttgttttaccaattatttttaaaatatccattacatctgttattaatttttttatttcgattgaaaatcattgtagtatttaagtttagtgagtaaaagtatgaaaaaatgtcagaaaatagagaaacgttgagacaaacacgaaatgtgcttatggtgccattattgttaccgcaactgtatgtacaccaggggtacgaaaattaagaaaaaaatatatatctaatttcatgtttttataatcttgcaaatacatatatttaatgagtattaatagattctttgatataacaatgcccgtatgtctgtccgttctattctacgcaaactagcctatcaattttaaagctatccgcaaaaatatatattccatagtacatatatatatagtataccacaaaaagagagaatgctatagtcgacttgcccgattatcatatacccgttactcagctagtgaaaatgcgatcgcgaaatttcatactttttctaggatatcaatagattttggtgaataaaatgagaaatagaattgttcaaattgttgtatttgagggcgttagagtgggctggcaacaagttttttcgatagaattttcgatcgatagaaattttcaaagaaagatttccaaaagagtcaaaacgcgctgaaattgagctttttggtaatgtaaatcattccatacttgatatttccttcacctttaatcggtttcttcgaaatctgattgatgttattatgtagaaatgctatattttctaagcaagacagacagcaacaaaaaaaatcaagaaaatgtcggaaaagaaatattgggagccggcaaaggctttccgcccaaaaaacgagagggcgaaagtaagtatctggcaccagtcattcacaccgacgtacgagcaggaggagccccaaatggcactgcttctatcctggcactacggtcgccagtggatggaggagcgtgatatacacaggatggagaccaagttgaagataaagaaggaggccaacttcattccacccaactataccagttggcttgagaagcggagggccataaagactaagcaacagctgatcagatcttgacgttttatttgtgttcattaagttgtccagtttttgaatatgaaattttgtaaaaattgttaattgtcttcacgttctggcttttttataaaatgtgtatctaaatgaataaagataatacaaaaatagtatgtaatgtatagattttaaacgtaataataataataggtaatcaattaatttaatgctatatctgcatggtgcgacatctgttggagtaaagcgaaagctgctgatgggttttgttgtgctaatgataaatctaatctaaatcggaaaattccatagaaagcggtgaagtcctttaattacctttcattaaagtaactaattgactaagttaaaatttgaatgtacaattgtttgtacaaccgtattggaacattggaaaatttttcataatcaagtagctcttgacccagcagacacaaagcctcagtcccagacagactccgtatcaaatcacacagcaccgacacgacaagcatataattccactcaataatgatttcaaagatcaagatctggagccgctcgccactgattccggctagggatcacggttcagcgatccttccgccggcagatcggccagatcccattccggagctgtgcgaggaaaggccggtgatgggttggctgctcggctgggagtacgggaggaagtggctggagaggcgtgaggagatccagaggcaccgcaacatggtcagcaagttcggcaggatcccggcggacttcagctggtggctcaaccagcgcaggcccctctatgtgcgccaacagcgattccggagcaaggccggacctcgtgcccggaaacagataacggccttcgagatggccaagcggaggcgtgaggagcagaaccgcaagctattggagagccagcccaaaaaccagtaaaacacacactcaaaatgtccaacatgccaatcgaagggtaaactctgtcaaaattgctaagccaaacaactgtatatgtacgagtacaacattg

SEQ ID NO: 35765 - DNA, 294 bp, DROSOPHILA
atgtcggaaaagaaatattgggagccggcaaaggctttccgcccaaaaaacgagagggcgaaagtaagtatctggcaccagtcattcacaccgacgtacgagcaggaggagccccaaatggcactgcttctatcctggcactacggtcgccagtggatggaggagcgtgatatacacaggatggagaccaagttgaagataaagaaggaggccaacttcattccacccaactataccagttggcttgagaagcggagggccataaagactaagcaacagctgatcagatcttga

SEQ ID NO: 35766 - protein, 97 aa, DROSOPHILA
MSEKKYWEPAKAFRPKNERAKVSIWHQSFTPTYEQEEPQMALLLSWHYGRQWMEERDIHRMETKLKIKKEANFIPPNYTSWLEKRRAIKTKQQLIRS

SEQ ID NO: 35767 - DNA, 4531 bp, DROSOPHILA
ttgtctaattaacacttggaacacggcgaaagcgactggcgtcgtgtgccactgaaggcgtgaagatcaaaaggtaaacaagcctcatggatcgtagggctttttggaggatattaagtataccgaataaactcccttaggatgttagcgaggctacagcttttgtccaatactcagtcatgccatgattttctccattaaactagcttcgcttatgattcttttggagaagtatttgcaggaaatggatattggttaaagttggcaaaaagttgcgccttgggcaaagcctcttccatggcccttggtggagcaacataatttctgtttcggcacacgcccattttgccaccagaattccactgcgtccacgtttcgagggatccgaggatgcaagcccttaggctgcgagcaaattaaggtaaacgcccacagcacgtgccggcagaaaaagtagggataggaattgggatacggatagggatagggaacgggaacgggagcgggatcgggagccaaaagaccaggtcggcgagtagagaaccgaggacaggaaccaaggcagccaagctggctgccaaaactgttgtggaaaaattagccacttgagtttcggcggctgtcctcgtctcctcctgcccgataaccacttgaagttcttggcgcgcgcgtttatttattttggtacggggcacagagcaacaaattaaaaagtaattctcgggcgcagcataattagctgctaagtgacactaatgggccgcagttgcatgcccctcaaatccgcctctttcccgcccattttcgtgtgcctctctagaacttgatgcacttccatttgtcggcggctcgttgtgtgtgggcaatgtgaagttctcgatgttgagatggtgagtgagttttcgttggtttagctaattgagttctgtttttcgggccaacggtccatatggccacttggctcccttgtggctgccaagttgagttggcccggtaattaatgggcctgctgaaagcaagaccctttcagtggggaaacctgcaagctctatagatcggggttgcccggcaatagatgccaggtattcagttccgtcccccattcccctgcagctacacccaagaagatctctgattagaaatggtaagtagactctccaatttgctttagtcgcaattgtaaagccctcccaagtcccgtcatggtcagcactacataagcgccagaagtgtgtcggcaaaggacctggacgattctgaatcgggaggagataagagtaagagtaaggaacgagtaaggaacttagttctcaagaaggtgtgccgcggacggaacgtccaggactctccaggatacaggggaaaggcaatgttgaactgctctaataggacaagaaaatacagcaagcattcaaaagacaatctccattcgggaaatgaggacggaggtatgcccaaggacacagagtacatttcaagtgatcacgatgactcgccgtcctggtctcagcagagcctgctatccagtgatcgttccaaaagctatagtcagatatgtagcgaaatcttggaagagtctaaggaacgacaagagaaggcagagtgcgcttttcgcgtctacaatataaacagatccaagctgcgtaggtcccatcaacaatccttgtccaggggtccgggaagtgggagttatgggagcagcatggcctcagagtattcaagtaaatcggaagcaggctaccaggactatgacagtccatcgacagatccttcacgagaacacgttcaaatggcaaatgtggcaaatatagataagtggactagaccaaaacagttcaaggtagagtcatataaaatggaaataaaagaaaggcccaattaccgcaaaactcaagaagtaagccactcgtattcatgtccattggaaagtaggatttcaaaaggttctttagttaccaggcacagagcaagatcatgcgtctgcgcacaagagtcctcggcttgtagcctttgcactgcccactccagatcaggaaagcaccattccgagggctgcgacgcagaggtgattgatggacccgattatcctgtagactgcagaagtgacattcctacaactgcgacatcgcaatcgcgctcacaaagagattatctttcgagctgctgcacacgccatcgtcatcatcctcattatcatcgccagaggagtgtgccaaagacatatcaagatcgtggaaatagtcccattaacatcaagacgaggcgcaagacgcgcgactaccaggaacctcacttcgcatttcgcaccgagaaagtggaggcggcggttcagctcagcagatcaagtgcctccattggggtgcaatatcccagtcaagacgagaacgcggattggactgattggactccagatacaacacagggtgaccgacagttcaaaggtcatgatggcgattgcttgagatcaacagaaaaaaaacggtctatatctaatgagcaaagtccaattacgctaaggaatacaaatgctaaggatgtcgacatacctgattgttttggatcatttgccatgaataagcatcttagtgtcattaccgaggatgcatctcaacaccacaaagatccagatgaagatatgatcgatagtcagctaagtaattccgttcttctcgagacctacgacgaaggtgagaaatatgcttatagttatcagtacagctacaaacccgagatatgcaataataaccagttcgtttccgatgaatctgatcttaaggtctccagtaaggaaggctatcaaatggatcaagaagtaagagtaagagtatataagcttcggcttgccgaagattgcttccattcttgtttgtttttaactatggtcctcaggactatgtaatggataagcaagagcttgtccatgaaggtggatcagatgcatctttgagtgaagtagccaagtcgaaaagctttctaagccttaagatatacgacgctgacgaagccctgatggaaattccagaggacttcgagggccctgcaatagttctggatgatgatgccgactttttggacatcacactgaccgacgacgaggagaagattcgggccaagttgatggcagcggcactcactaccagaaagactacctcctccatcagccccaatattagtttaagaacccgttcgcccatagagccgagtagtctgagctataagcccaatgttatctttactcgtcgctcggaggtgatcaaagataactatactccccgtccggacgatcgcgttgccctgcttgcagagaaattcctccaaagctttagcgaatctgcccctaatgattatggatggaagccctctaaacaggaggtgacctctgcagtctctatttcacatttgttcaacgagaatggggtcaccagaaggggaggcgatactccactttgcggggaccgtcagctgctgtccgtggaattcaacagaaagctgcaacgtcagctcaaagtgattgtagagagtttccaatgaaattccttggatcttatattttctatttgcaattgcgtgtcagaaaatacatagcggaattcgttgaccgcctatggaagttctgaatataatttactttcttttttacaggtaatgaaacacaatcagagaccgtatctttccaatttacagggtgtgcgattttagcaaattatatttttcaacaagcatagttcataactcttcctcctggcaaccattttccctgtttcgaatagctctgaatcgagtctgagtctgggtcggttgtggaaactacttgaaactttcagcgggatggcgaggccgcctggcagtctgctggttcggtgtgttcttcggatggctctggtcctatgccgaggtgcataaatcaagttcagtgctggccaagtgccttgctgaagggcgcagccatcgagtggtgcttgcagttgcaggattgggggtggaggagctgcataattagcccgtggctactgttagtctagtcgcgcacttgccacaacctccttgcctcctcgccaccttgcccctcgggctggccattaattttcctgacacatactaaatatgctggagttgtttacatgatcgatcagggctcggatctccatccctggcttatgctcgcctgtatgctcgggatgcacctaattgctaaccaaacacacaactgcaggcgcgcaaatattgttttaaggcacatcaacgtatttcacctgctaatgcctgatccacaaactgctggatggattgggccgaatcgggtgggtgtattttgggaaaccgcttctgtgttcattccctacttttccttataacgaggtgcgctggatatgtttataatttacgattctgtgcacagcttgtttgtggttgtgggatggttgtggaatggaaggcacggctggccgcgtgacgaaactcctgcaaccattttacaccttttcaaacgcgcttgcgttgcgattctaaaaatattaataatatctacaga

SEQ ID NO: 35768 - DNA, 2091 bp, DROSOPHILA
atgggcctgctgaaagcaagaccctttcaccctcccaagtcccgtcatggtcagcactacataagcgccagaagtgtgtcggcaaaggacctggacgattctgaatcgggaggagataagagtaagagtaaggaacgagtaaggaacttagttctcaagaaggtgtgccgcggacggaacgtccaggactctccaggatacaggggaaaggcaatgttgaactgctctaataggacaagaaaatacagcaagcattcaaaagacaatctccattcgggaaatgaggacggaggtatgcccaaggacacagagtacatttcaagtgatcacgatgactcgccgtcctggtctcagcagagcctgctatccagtgatcgttccaaaagctatagtcagatatgtagcgaaatcttggaagagtctaaggaacgacaagagaaggcagagtgcgcttttcgcgtctacaatataaacagatccaagctgcgtaggtcccatcaacaatccttgtccaggggtccgggaagtgggagttatgggagcagcatggcctcagagtattcaagtaaatcggaagcaggctaccaggactatgacagtccatcgacagatccttcacgagaacacgttcaaatggcaaatgtggcaaatatagataaatcaggaaagcaccattccgagggctgcgacgcagaggtgattgatggacccgattatcctgtagactgcagaagtgacattcctacaactgcgacatcgcaatcgcgctcacaaagagattatctttcgagctgctgcacacgccatcgtcatcatcctcattatcatcgccagaggagtgtgccaaagacatatcaagatcgtggaaatagtcccattaacatcaagacgaggcgcaagacgcgcgactaccaggaacctcacttcgcatttcgcaccgagaaagtggaggcggcggttcagctcagcagatcaagtgcctccattggggtgcaatatcccagtcaagacgagaacgcggattggactgattggactccagatacaacacagggtgaccgacagttcaaaggtcatgatggcgattgcttgagatcaacagaaaaaaaacggtctatatctaatgagcaaagtccaattacgctaaggaatacaaatgctaaggatgtcgacatacctgattgttttggatcatttgccatgaataagcatcttagtgtcattaccgaggatgcatctcaacaccacaaagatccagatgaagatatgatcgatagtcagctaagtaattccgttcttctcgagacctacgacgaaggtgagaaatatgcttatagttatcagtacagctacaaacccgagatatgcaataataaccagttcgtttccgatgaatctgatcttaaggtctccagtaaggaaggctatcaaatggatcaagaagtaagagactatgtaatggataagcaagagcttgtccatgaaggtggatcagatgcatctttgagtgaagtagccaagtcgaaaagctttctaagccttaagatatacgacgctgacgaagccctgatggaaattccagaggacttcgagggccctgcaatagttctggatgatgatgccgactttttggacatcacactgaccgacgacgaggagaagattcgggccaagttgatggcagcggcactcactaccagaaagactacctcctccatcagccccaatattagtttaagaacccgttcgcccatagagccgagtagtctgagctataagcccaatgttatctttactcgtcgctcggaggtgatcaaagataactatactccccgtccggacgatcgcgttgccctgcttgcagagaaattcctccaaagctttagcgaatctgcccctaatgattatggatggaagccctctaaacaggaggtgacctctgcagtctctatttcacatttgttcaacgagaatggggtcaccagaaggggaggcgatactccactttgcggggaccgtcagctgctgtccgtggaattcaacagaaagctgcaacgtcagctcaaagtgattgtagagagtttccaatga

SEQ ID NO: 35769 - protein, 696 aa, DROSOPHILA
MGLLKARPFHPPKSRHGQHYISARSVSAKDLDDSESGGDKSKSKERVRNLVLKKVCRGRNVQDSPGYRGKAMLNCSNRTRKYSKHSKDNLHSGNEDGGMPKDTEYISSDHDDSPSWSQQSLLSSDRSKSYSQICSEILEESKERQEKAECAFRVYNINRSKLRRSHQQSLSRGPGSGSYGSSMASEYSSKSEAGYQDYDSPSTDPSREHVQMANVANIDKSGKHHSEGCDAEVIDGPDYPVDCRSDIPTTATSQSRSQRDYLSSCCTRHRHHPHYHRQRSVPKTYQDRGNSPINIKTRRKTRDYQEPHFAFRTEKVEAAVQLSRSSASIGVQYPSQDENADWTDWTPDTTQGDRQFKGHDGDCLRSTEKKRSISNEQSPITLRNTNAKDVDIPDCFGSFAMNKHLSVITEDASQHHKDPDEDMIDSQLSNSVLLETYDEGEKYAYSYQYSYKPEICNNNQFVSDESDLKVSSKEGYQMDQEVRDYVMDKQELVHEGGSDASLSEVAKSKSFLSLKIYDADEALMEIPEDFEGPAIVLDDDADFLDITLTDDEEKIRAKLMAAALTTRKTTSSISPNISLRTRSPIEPSSLSYKPNVIFTRRSEVIKDNYTPRPDDRVALLAEKFLQSFSESAPNDYGWKPSKQEVTSAVSISHLFNENGVTRRGGDTPLCGDRQLLSVEFNRKLQRQLKVIVESFQ

SEQ ID NO: 35770 - DNA, 2798 bp, DROSOPHILA
gcgatttctgggggagggggcgtggcaggggcgtgcgagttctacgtcgtgtgttttggagtccacagcttgcccaagctctcatgtaaatcgtagcgtcagttttgctataaaacacgccggtcttaacaatttagcattcagtacgatccgttggcggttactaaaacaacacctgacttcgacagctcgagaacgttgagaagccttcgactatttggaaaaagataacaaatcggtgccaaaacaaataattgcgaatacaattgaaaactcttctaaattgtgtaattttaagtttttgtgtaagtcggctggcgaatcctctagatctcgggaacgcgaaatcatcccttgtccctaattgggtaaaccatttagcaaatcctttaaggattgagtctaaaccgaatttaatttgaatacattttttttacatgttttttatttacgacaaaaattgttttcctttagttatcaactcgttgttccgttcttaatttacaataattccttacacataggtgtctattttagttttaatttattcaaggaacccagatcgagcaattaaaaatgttttcattagagcaaattgacccagtttattgtattattgtgctttaccaaatgcattccagttcaatacctaaagtactcctttgcattatttataaccagccctacgctcgatcgcaaagactattaagccgcaatcaaaatcaattacagtcttgacaacaaaacaggtagcaaatgacagtaattgagcagtctagagatcctcccatttattagactgagtcgcagctgcgtaatgcctacaatcaaccacttcggatgataatagatactcgtatgggtggtggatcattttaggggtgggcctggtggttaatgctgcccctgctgacgaactttgacgtcaataaaatgtatatttctgcctaatagtaaataaactgttttttacagaaaccaattgaaacttacacgcaaaatgcagttccaactcatcgtagcctccctgttgatctgttttgtagcatgcatctcagctggcaatatgcgtaagtaacgaagacagttcactatagtccagtatacttatcaagcttgttcttcagctgactatatccaggtgtgccatcgcaacgatcccgaactgtcgaagtgcctgaagagcagtgttcacaacttgcgaccctatctggccaagggcattaaggaactgaacgtaccgccgctagagcccctctacattggagatctgagcattctggatggatccgccgggctcacggtaaaagccaagaagctgaacatcctgggcgcctccaactttgagatcaccaagctgcgggcttccacccaaaaccgacgctttgacttcgagttgattctgccccatctccatggcgatgggctctacgagatcaacggcaatattttggcactgccgatcaagggcaatgggccgttcactggaaacttcaccaactttgtggcttatgtgcgcgtccagtacgacattaagagtgttaatgatctggaatacctgcatgtcaaggagttcgtcctgaagatccgcactggcaagggaaacctgaagctggagaacctcttcaacggagacaaggttctgggcgatgtcatcaatgatacgatcaaccaaaacttcgaggtcttcaccaacgacttgatcgcaccgattgcccgcgccctggaggccaagtttctggtcatcacgaccaaaatccttgagaacttcacctacagcgagcttttccccgtctaataatcttgctaactgtagttaggctaaatctaagcttgtgatacactcgatttgttataattagtccctaaatattcaataataaattttagaaatttacgcaaatagatttgaaattgaatgcgtcaaaggaaattatgtcttgattatcgttgttgggagagtttcccgactaccagatacccgtttcttagtatcaacgggagcagctaagctgcttggccacaagccgcccataactattacgattttgaaaaacgtttggattatttctttattatatgtatgtatgtaagtcttgcagatttgtatcggtatgccgcgcccacaataaaatttttggccgatttggtcaagagtcgctttccggcttctaaatcttcatctcctcgcaatccaagttggattaacgggtatctgatagtcaagctttatcttgcttttcttagatatcataactttggtacaaaactggtgttttgattttcatttcatttttagtagtttcagtttataaatattattggaactaccataaaattatgtttgcttatactaatatttaatatgataaaacgtaactagcttttttagcaaggacgaaagaaagggagacattcaatagaattcttatttttcttgagtcacctgttttagaggaatacctcttgtttttgccatgtcgctcaattgtaaaatttttctgcaatcggacccaggttgtctaaagttcaaattaattttggtttacaaatacttcgatcagttttctgcagtgttaaacttacacttcgaaaactcctattcgtaaaaaacatcaataggaaacgtattttgaatggtctggcaacctctggcaactcatatttacgctcaatgctggctgggtggcagctctgtgcaacgaaattgatttgagctccagctctacgtgatagtatcggggaaacatcggttttcgttccagctctataccactgctgcccgagtttgccctcaa

SEQ ID NO: 35771 - DNA, 618 bp, DROSOPHILA
atgcagttccaactcatcgtagcctccctgttgatctgttttgtagcatgcatctcagctggcaatatgcagcccctctacattggagatctgagcattctggatggatccgccgggctcacggtaaaagccaagaagctgaacatcctgggcgcctccaactttgagatcaccaagctgcgggcttccacccaaaaccgacgctttgacttcgagttgattctgccccatctccatggcgatgggctctacgagatcaacggcaatattttggcactgccgatcaagggcaatgggccgttcactggaaacttcaccaactttgtggcttatgtgcgcgtccagtacgacattaagagtgttaatgatctggaatacctgcatgtcaaggagttcgtcctgaagatccgcactggcaagggaaacctgaagctggagaacctcttcaacggagacaaggttctgggcgatgtcatcaatgatacgatcaaccaaaacttcgaggtcttcaccaacgacttgatcgcaccgattgcccgcgccctggaggccaagtttctggtcatcacgaccaaaatccttgagaacttcacctacagcgagcttttccccgtctaa

SEQ ID NO: 35772 - protein, 205 aa, DROSOPHILA
MQFQLIVASLLICFVACISAGNMQPLYIGDLSILDGSAGLTVKAKKLNILGASNFEITKLRASTQNRRFDFELILPHLHGDGLYEINGNILALPIKGNGPFTGNFTNFVAYVRVQYDIKSVNDLEYLHVKEFVLKIRTGKGNLKLENLFNGDKVLGDVINDTINQNFEVFTNDLIAPIARALEAKFLVITTKILENFTYSELFPV

SEQ ID NO: 35773 - DNA, 3887 bp, DROSOPHILA
atttctcagtgtcttggcgggtcttacgttgatgttttatagcgcattaatttcgaaagtagcgctacgtgtgccaaaaatcattagcaacggaattacgctcaatgaaatgcagtcggcgtcgccggcaaacaaaagccctccgagggagataatacagcgcggccaggccaggccagaccagagcagaccatgccgtcctccgtcgattacgatggcgatatcgttgccggaacagggaacccagaacggtctgggggtgggttatggaatggtagctgccggggaaaacggcagtggaagtcgcttataaatttaccctaacgacaagttaaatgctaaacacgaaatgcttcaagccgaagggttctcattccaaaaacctcggatacatttgaatacaagtcgctgattctgctgtcaagatgaaggcttcatacgtgaatttgaaagtatatgtgaactgattaaatccgtaaatccataggcacagtaaaatctttaacggaatatatatctttttcaaccaatcctttttatactggcaataagcagtccttcattaatttaatatatttattgacatagatatggaaagtataatctatatatacaattgaattactggaacttaaccacccagaattacattatcaaacaagttctttaccatttgttatgccgtcaatattgtgatatttcttaatttaattcgtttatgggcacttgaatgtataattattcgatttaattagtaaaacttgagcaactagaattttgaaaacagcccatttcaatgactctgcgttcggaaaatagagcacatcgcgcttatccaattttattccgtatcgatggcaatcttatcacttgggaataaaccattatcagataataggcggaactaattcgcctaatgaaattatgcaaatggcagtcagtttgattttggcacagcaggtgcgagcactccacaccactggaaacatagacccatactatgttcaagtccaagtccttcgatttggtcattgaggaaaagacaaagaaaccggaacggctctaccaacctcgtcggatgcgatggcttaaatatatcatcctgccggcagtcttctcctttgcgcttctgctgatcctggtcaatgtggacttctccgataatagtgaggattccacgcatctgggcaatgacacatcgctcattatatctggctatggatttgaaaataacacactgcgccggggatttttctccggaggaattgcattgcatagccttgtcatcgagaactgcaccatagttcatatcaacgacgcagcttttaatcaggaaagcactgtgaacataacaagcctgcagctcattaatgtgcaattggaaaacttgactgaatctgccctggaaggtcttcaaaagcttcagaactttactctagtcaatgaaaataatcacttcaggccatttggattcctctcagctgtggctgaatcgttagtcagtgcggaaatccaccagtcactagccgcggcaatatcgtattcagtgtgtgattttttgggatcccggaatttcccacagttgaaatatttagatctgagtggcacacacttggacaaaagccttattaaagagtcctttgacaatctgcccgcgttggaacaactacttctaaggaactgtgggttgggcaacatcgagtgggaaatcgtgaggccaagactcaaattgttgcactatttggacttgggtggagctcaaaagacgggcaactatgaacatcagttggacgtatccgcgttctctcctgagacaactactaacgctgaagagatatctactatcctagcgaagagagcgatggctccagaagtagtgggcaccactacactaggacctactacttccatagaaatttcaccaccatcaacacaaagtacaacaacacccaaagaagaaagtacatctatgacagaaacaacgatattaacaacaccatcgccaaaatgcgaagaggaactttgccaggatctagagtgctccagaattaccaccgatacggttgcatctgcagatctgggaaaatcgtcgtgccaggatggtttactggtggagatctgcgaatcgacttgcaccactcccacattcttctgtgtgatattaggcgagaactttacctccgcatccaactgttgttcccaccataccatgcgatgtgtggtctctgcacaggtctcctggttcgaggaccacagcggactggtcattggcttgggagtgggtctcctcttcatcggcagcttcctcggcatgctcatcgtcttcggaaccctgcgcctgaatccatcctggttgcgaggcaataagcggcgggagtcgaatacgataggactgattcagggaagatttgagaaggacccgtatgagcaagtggggtaggtcttttaaagagcacataagtggcagcacttttttatgatacgttatctaattcattgtttcgccaaatactacgtttcctccaatgtcggaatgattataatcatttaaattaggtttacgatgtgagatctttttaaaatatccctttaaatagttcctttcttaaaatcaatatatttaatattttgaaaattgacacatacccactcacctttccgtcttcgcagaggtccgattgctactattgacaacaacgagtacgtcaccgcctatcaccgttacctggagcaagcaaatcaccgccccacggagtcgaacaagtatatccgcccgcccagggacagggctccttctgttccgccctccagcgattatccattaccacttccggcaaggaattgcaacgtatacgagagctgtgaactgtacgaggaacttccgtagacatatttcgcccaacgacgtgtacaataaagatataaatgtacgtacgagttcgaaaacaatattcagacacgatgtattcaacacattccttttgcgagaaattgtgggggattaatccaccaaatgaatgtttaagattgatgttaaaatgaaatacaattaaaatcactgctagatgtgtaacgaattaagttccaataaaagcgaaaagtaaaccgagtttgaacggcaggagatatgagtaagtctaagtctctaagtgcggcatgatgacatacccaattatactcgcttgttctgctttgcatcttgttatagaactgggccccatgtctggattctgtggaagtttgcacagttcaatgcttttatttagctttaatgagccccagttggcgcaaaaactccatctgaatgcgccccattgtggaaacagctttcatcccggcacttgcccttccacggacccggagatacactcgtagtgcacagtttgttgacttgccacatgcacaataaaatatttttgcaagcgctttttatggctgacatgtcatttaatacacacacaagcgctaagatcttttttgcgagcgctttgccaatttatttgtgcccctcgttccagtttggatatttgttttttggtgccctgcaggctgtcgctgccacaatttcccaggcacatcccatccccagaaccaaaggggaggggagtcgggggccctgtcaaagtccggccaagtctctcggccatatgttgcacacattatgcttacttaacaattagagacgctcttgtaattccacaaaattgctttgttcgccagtattttttcgctccggggagggcgggcggctttggggaggtctgtacgatatactgtactatgagcggtacacaatggtgaggggaagcaggcggaggggaagggtaaggggaaggaagtgccgcagagtggctttgtgctcctgcttttcagagctccttggtcac

SEQ ID NO: 35774 - DNA, 1653 bp, DROSOPHILA
atgttcaagtccaagtccttcgatttggtcattgaggaaaagacaaagaaaccggaacggctctaccaacctcgtcggatgcgatggcttaaatatatcatcctgccggcagtcttctcctttgcgcttctgctgatcctggtcaatgtggacttctccgataatagtgaggattccacgcatctgggcaatgacacatcgctcattatatctggctatggatttgaaaataacacactgcgccggggatttttctccggaggaattgcattgcatagccttgtcatcgagaactgcaccatagttcatatcaacgacgcagcttttaatcaggaaagcactgtgaacataacaagcctgcagctcattaatgtgcaattggaaaacttgactgaatctgccctggaaggtcttcaaaagcttcagaactttactctagtcaatgaaaataatcacttcaggccatttggattcctctcagctgtggctgaatcgttagtcagtgcggaaatccaccagtcactagccgcggcaatatcgtattcagtgtgtgattttttgggatcccggaatttcccacagttgaaatatttagatctgagtggcacacacttggacaaaagccttattaaagagtcctttgacaatctgcccgcgttggaacaactacttctaaggaactgtgggttgggcaacatcgagtgggaaatcgtgaggccaagactcaaattgttgcactatttggacttgggtggagctcaaaagacgggcaactatgaacatcagttggacgtatccgcgttctctcctgagacaactactaacgctgaagagatatctactatcctagcgaagagagcgatggctccagaagtagtgggcaccactacactaggacctactacttccatagaaatttcaccaccatcaacacaaagtacaacaacacccaaagaagaaagtacatctatgacagaaacaacgatattaacaacaccatcgccaaaatgcgaagaggaactttgccaggatctagagtgctccagaattaccaccgatacggttgcatctgcagatctgggaaaatcgtcgtgccaggatggtttactggtggagatctgcgaatcgacttgcaccactcccacattcttctgtgtgatattaggcgagaactttacctccgcatccaactgttgttcccaccataccatgcgatgtgtggtctctgcacaggtctcctggttcgaggaccacagcggactggtcattggcttgggagtgggtctcctcttcatcggcagcttcctcggcatgctcatcgtcttcggaaccctgcgcctgaatccatcctggttgcgaggcaataagcggcgggagtcgaatacgataggactgattcagggaagatttgagaaggacccgtatgagcaagtgggaggtccgattgctactattgacaacaacgagtacgtcaccgcctatcaccgttacctggagcaagcaaatcaccgccccacggagtcgaacaagtatatccgcccgcccagggacagggctccttctgttccgccctccagcgattatccattaccacttccggcaaggaattgcaacgtatacgagagctgtgaactgtacgaggaacttccgtag

SEQ ID NO: 35775 - protein, 550 aa, DROSOPHILA
MFKSKSFDLVIEEKTKKPERLYQPRRMRWLKYIILPAVFSFALLLILVNVDFSDNSEDSTHLGNDTSLIISGYGFENNTLRRGFFSGGIALHSLVIENCTIVHINDAAFNQESTVNITSLQLINVQLENLTESALEGLQKLQNFTLVNENNHFRPFGFLSAVAESLVSAEIHQSLAAAISYSVCDFLGSRNFPQLKYLDLSGTHLDKSLIKESFDNLPALEQLLLRNCGLGNIEWEIVRPRLKLLHYLDLGGAQKTGNYEHQLDVSAFSPETTTNAEEISTILAKRAMAPEVVGTTTLGPTTSIEISPPSTQSTTTPKEESTSMTETTILTTPSPKCEEELCQDLECSRITTDTVASADLGKSSCQDGLLVEICESTCTTPTFFCVILGENFTSASNCCSHHTMRCVVSAQVSWFEDHSGLVIGLGVGLLFIGSFLGMLIVFGTLRLNPSWLRGNKRRESNTIGLIQGRFEKDPYEQVGGPIATIDNNEYVTAYHRYLEQANHRPTESNKYIRPPRDRAPSVPPSSDYPLPLPARNCNVYESCELYEELP

SEQ ID NO: 35776 - DNA, 2291 bp, DROSOPHILA
ttcatgattttagaccatttttccaaagtgctcaaataccgtcaaatatcttaggatatcatttagatttctttcgaactttactttaatttccggtcatccgccaaattttcggtcatccgtaaagtgaatgcctgacatccgaatatttttttccgtgtggaacgtgctgccaatttacgattcagacggcgctgcgccgcccgaaaaggaaccccaaacgatgcaactgggtcggccgggtgcaatgcaactcgtactcgcacaaaggaaacaaaggcactaagttgcggcgacatgtagcgctttaagctgtggagagcgagcgaggccaatgaataccaaatgaatcgatagtgcgaaatcgaactccgggggcagcgtcagcagggctggcatttttctgctcggtcgagccagggtgcggaaaagcaatttcggtctgagccacctcaagtagctgccgctttcccgcctttccagcctttcgtgctttccactaggccaaacgatttgaaaattttacgaacgcaccactgcgcattgctcacaaccaatcgagggcattagctgggcaaaaaatacaagacatcttaaccaaacacggagcaaatgttcaatttccaagtcaatcaactagaaaaagttgcactcactcgctgcggaaatcttttgcgtataggtttccggcatggaatgctggattctgggcccaaagttcttgcaactcggaattaagcgattagatggaagtttgccacccagttggcacgcttaaattattccaagtttccgcttctgtcgccagcagatacgcacactgaaaaaaactgggactcccacaactatatagaataggacatagtatgtatttgcttggctctacttccaacatgtgtttaaaatttttcaaaaatattttgttcaattgacatatgtatgtatattcattaccaatataacaatttaccattgctgtgtagcacacatcagttgcacaatggacgcgcattccacagccgtcgcaggcatagatatggaactggacttcggcgaggacatggatgagcacggagaattggagaaagtgggtcagcctgagaatttggtagcgatggtgctgcgcctgcaggcgaaccacgtgtggatccgggagcagctgactcacctacagcgccgcctggtgacccttcggctggacaagcaaagaagcttatacgagggaaaggagcggttacagcgactcctgctgagcttgcaggtgaaacacggacgccactgggcactgtaggggaatcgatggacgatggagctcggaattcaggtgacgaaagtgtaaaagtacaagcgaactatcttggtgaaagatgatgtaatgatgttctcaacttcgtattaaatatagtggttttagaaagcttaatcataaaagcctcattaatgttaaattaagaacgaaaattactgagaaatagtttcataaagtttgcaaagtaaacgatggttatgtccagtctttcttttgtataaatattataccgtatatattatattgatttcagacataagtttaatacgcagtgaaaaagactttgccgaccatatatattttactataaagtacatattcttgatcagtaataatatcctagtcgatagagtcatgttcatatggcatgaatctttcccacaacttctatttttgctgctggtggtaaataaggctaagttggaccataatatcacaagcagccacaggaataatcgaaaagtgaaatcatatagttttgattcgttacacactagtattttaacaaatatttaattactgcaaaggcttggcttattaagagtattaagaagttttacacggcacttccacgagtcctttcaattatccaacctgatgacagcctgatgacagtcccagccgaacaggaaggccagatttgtggcccacacaatcataattgttgaacagacttgtgcgttcggatgtaaaccaagtgccgtacttaggcacttaattcatgcgactaacacacgccacacaatgcacattgcccgacaacaaatagcccaaaaccctggtgacatggcaatcaaagttcgccttgcagtgcgccgctctgcgtaactcaattaaccagacaccaagcagcggaggtcgagtgcatcacttaactcgagattaacccttgactgccgctgtccgcgtcctgtcccctccaatgacgtgcggcgcctgggatggaacctactcgctcctcgtcgcatcagccacttacacg

SEQ ID NO: 35777 - DNA, 291 bp, DROSOPHILA
atggacgcgcattccacagccgtcgcaggcatagatatggaactggacttcggcgaggacatggatgagcacggagaattggagaaagtgggtcagcctgagaatttggtagcgatggtgctgcgcctgcaggcgaaccacgtgtggatccgggagcagctgactcacctacagcgccgcctggtgacccttcggctggacaagcaaagaagcttatacgagggaaaggagcggttacagcgactcctgctgagcttgcaggtgaaacacggacgccactgggcactgtag

SEQ ID NO: 35778 - protein, 96 aa, DROSOPHILA
MDAHSTAVAGIDMELDFGEDMDEHGELEKVGQPENLVAMVLRLQANHVWIREQLTHLQRRLVTLRLDKQRSLYEGKERLQRLLLSLQVKHGRHWAL

SEQ ID NO: 35779 - DNA, 3002 bp, DROSOPHILA
ttttttttttcacaattaattttatgaaggaaaccgtgacattttatctttaacggacactagctccgagcttcgaaaagtacagatcccttacagtttataacaataaatcaaatgcgattaaaatctgtgtcaaatctgtgaagtctaacaagcaacttacatacatacataagttagccaatcaaagtataaatatggcatcggcattgcactcgatttattatatatatggagagtttcagctttgtttcaaaatcttccaaaatgcttgttcaaacttttaaataatttctgtacctaacgccacctctgggcaaaaacaaaagttaccatatttttaaatattgaatatatacacaatttcattatcattctattgaataaaattatattatattattattaaaatctattgatttctattaaacgattaaaaggtcatagtcttaaaaaaaaagattatttgttgttcctaatactaaaatactttaaatcagatactactagtgctgcaaacagtgtttaacccacaagacacagccatgtgtttcgataaaagatatcgccaattaattggtaccgaatctgatctagctcgttaaacttgtcggccatttagcttaaaaaatctcgactaaagtgaaggtggacaataataaaagaccttattaatataactaattgtaatatagtgattattcggtactaagaaccaacataaagcgggttcacacatttcagcttgacaaacctaaaccctaaagaactggataattaccaggagctaaccacgtggcattgcaagcgtcttttttttttttttgtttgaggttattgcgtttaaaccaaaagcaagttattaactcctatcctaggtactactggttttaaattaagcagtctaatctttgcttttaatacaagtgtagctaactttttcgacactgcttcctgtacaattctgatctgataaagttcgagaacggaaccactcagaatggccgatatacctaatgcggtgggaattggccagcaaaatgattgcgggttgatacggacgtgccgcatgctccatttaaagccaacggagcttatcagtcagctgctgccaaacacccaagttttgcaaaaactacgctatctctccgtggggagcatgtcgcaagcggctctggaggaggtctttacaaactgcaggcagcttgagagcctacttctgtgcgacacgatgggtaccggcaccacttacgacattcggagcattaggctctgccagatgttgaaggtgctgctgatgcccctgaatgtgggaacgccactggccgtctgctccctggtgaacctcacccatctcacgcttcagcgccacaaactcagtcaaggaatggagtggatgcccaccgttctggccatcatccataccaagcggttcgatctccaaggactcacctttgatggttccgggctggccgctcccatgaatctttcccaccttcagctggctcaatgcacagccctcaccgacctgagattgagcaactgctatctggctgaaacggacagcccgccagtgcccttctcctgccaacggctcagcttccggcgatgcataataggcaaatcgtttggttacatgcatccgcttctgaggaaactggatctgtttaactgtcagatattgtttgaaactcccatgctacgccgcctcctgaacttaagaaggcatcagcccatcgaaggaccactcctgctcacctttagccagtccctcagactgcgatctgagctgacgaagtggtcccaggaggacgtgagtgcaagcagccggtggctgcaagtcaaggaagtggatcctcaccaggcgactacatggcaccagccatgtcgcacgctttccatgaagtttggccgcgccgtaagttatatacccgatctcaatctcccagaggagagtatcccgagtgccgctgatgtactcagttctctggattctttataaagagttagattcgcctagtaaaggaacaagccttagctatttggccatcacttgatgtacaatatacggtgttccttagtcaacttttgacaaatcaccacctaaagtgggtctatgtggtctttctctaataaaatccgaatatcaataaaatgtgggactgtttgtcattgtatttcaaccaatatgtatattcaaaagggattctgaattgcaactttcaaaaggaatttcgcaatttaattgtgaattcctgaggaaagcacttaaaacgcccctcctcccttcagataacgcatttctttactcccacaatttaatgaatacaaatcccacgtaaaatacctccagccgacagatgcccccattcacttcgagtggcacacaacatataaaacatatcagatctaagctcgaaaggctttgccctgtttgctttaggatcgccatttttccaggcggatgagtttttttatcagcgagcacataaattacgaaaaatgtgcttgccaaaaacaagaggtgaagtgaaatttatgtgtaccgcatgtaattaataataaaagaaatcgcgcaaacgaattaaatggttctgtgtgtgtttaacttgcttgttagcccgtccagaacggcgcttaattagaccaattccccgccccccgtcaacccagtgagtgggtttgtatgtttgggctaacttaattgggtccgagcagcagtgcagcggctaataaggttaaccaatcccagcagcaatcttaaccagcaggcttgggtgttacccgggtgggggatgtccaatcggacaggtggtgtggacaggtggacaggtgatggcacaaagcaaagatcgtaaatggtattgatgggctgcggagtttggttcgagattgcttcgctatctttgctttccatttaaaagtagcaatcagtcatttcttaaattgaatgtcgccgaacggtaggaaaaatcaaactttttgaaataaatggaaataga

SEQ ID NO: 35780 - DNA, 1002 bp, DROSOPHILA
atggccgatatacctaatgcggtgggaattggccagcaaaatgattgcgggttgatacggacgtgccgcatgctccatttaaagccaacggagcttatcagtcagctgctgccaaacacccaagttttgcaaaaactacgctatctctccgtggggagcatgtcgcaagcggctctggaggaggtctttacaaactgcaggcagcttgagagcctacttctgtgcgacacgatgggtaccggcaccacttacgacattcggagcattaggctctgccagatgttgaaggtgctgctgatgcccctgaatgtgggaacgccactggccgtctgctccctggtgaacctcacccatctcacgcttcagcgccacaaactcagtcaaggaatggagtggatgcccaccgttctggccatcatccataccaagcggttcgatctccaaggactcacctttgatggttccgggctggccgctcccatgaatctttcccaccttcagctggctcaatgcacagccctcaccgacctgagattgagcaactgctatctggctgaaacggacagcccgccagtgcccttctcctgccaacggctcagcttccggcgatgcataataggcaaatcgtttggttacatgcatccgcttctgaggaaactggatctgtttaactgtcagatattgtttgaaactcccatgctacgccgcctcctgaacttaagaaggcatcagcccatcgaaggaccactcctgctcacctttagccagtccctcagactgcgatctgagctgacgaagtggtcccaggaggacgtgagtgcaagcagccggtggctgcaagtcaaggaagtggatcctcaccaggcgactacatggcaccagccatgtcgcacgctttccatgaagtttggccgcgccgtaagttatatacccgatctcaatctcccagaggagagtatcccgagtgccgctgatgtactcagttctctggattctttataa

SEQ ID NO: 35781 - protein, 333 aa, DROSOPHILA
MADIPNAVGIGQQNDCGLIRTCRMLHLKPTELISQLLPNTQVLQKLRYLSVGSMSQAALEEVFTNCRQLESLLLCDTMGTGTTYDIRSIRLCQMLKVLLMPLNVGTPLAVCSLVNLTHLTLQRHKLSQGMEWMPTVLAIIHTKRFDLQGLTFDGSGLAAPMNLSHLQLAQCTALTDLRLSNCYLAETDSPPVPFSCQRLSFRRCIIGKSFGYMHPLLRKLDLFNCQILFETPMLRRLLNLRRHQPIEGPLLLTFSQSLRLRSELTKWSQEDVSASSRWLQVKEVDPHQATTWHQPCRTLSMKFGRAVSYIPDLNLPEESIPSAADVLSSLDSL

SEQ ID NO: 35782 - DNA, 2216 bp, DROSOPHILA
ttcagtagaaaagtattgctgttcgccaacatgattacttgcatttgcccctaatctccgtctgtccgttggtgaattagggaaatctcgcaagttaatgggacttggtagaaaaataaatatcaatttgttgcttagctaccctaattacacgatggcaagcatcgcaggacatccttctaatctggccgtgttatggagtgcaataatgcattaggagttcccattttttgcaatttggggacttcgattcggcagctcgggaaactctgagccggataaatggggctctggcattcatttagaggagtcgacacagttttgtgggccaaacgactatttggccaacaaaaaataacgagcaagccattaaaaatttgccaaactcagcagaagtggaggaactagaactaatggagggcgcaaagggaagagcactgggctggggtcatgcaattcattaatttattgacttataatcaagccaggccgaaacttacgcccagagccagagccggataaatatccatttatcacataaatagaatgctaacagcagtgaatcctgctggttttctccttgctgctctccacgctcctcggaccagacttatattttgttttttttttttcctttttgccgttctagcctggctgctgcggttggcctgccaaataaagcaagaaataagttaaaacatacgttctgtgcggtctgactcggtggaatagaagaaatcctggccaactggcggagcagcccagtcacgtccgcaccaccacaactactgctcctccggcacagtgcggtatgcaaattcaaccgagaagacttcataaaagcaatgcaaataattaaataacaacgcggagcaaacagcacgcagcagcatgacatgctacttgagtcggcgaaacttggattaactagctgtgcgaaataaatacgaaatacgaaatacgaaataccaagcaccaaaccaaatacgaaatctgaacgttaatcccaaaccaatcccagctccgttccgcccaggtgcgacatccgacagttgccgatgccctcgcccagcggaatgtcctggcggcagagggagcgcggcgcaggaggaactccaggtggacgaggggcaggcatcctggccgggagcgggaggagtccgggaactgccagcatactgctggcgtttctggcagctgtcagctttcgtggcatgcgagcgcgtaagtgtaaacttcttttacttggggtgatgccgacacgacattccgggctacacttctacgcacggattttgtggaaagttttgggtgaattttgttctaggatgaaacatctattaagtacttagaaataaataagtaaaaacattgtataagttttataatataataataataagagcatttaatagatagctatctgatcatgcgtttttgacttatgcttttcatgcttccaaataaatttgttttgttttcaaggaagtaattgtagtcagattccaacttcgaggccaatcatagggccgttagcactttaacaccccaaatcgatgttatgaaacatctgaatacccgccgttaggcaaccaattgtgcaactagcaactagtccgaatcgcttgatcccgttggctttcgcgtccgcgggaaaatcgcttacaggaacgccctggagaacttttgtttaccatgggagtccgttccaaatcccagatactgagcactgagcaccgaacaccgaatccctgcacccctgtccaacttttggctacgtgctcagctccattccgaactgctaagttgggttgggatgggtcgagttgagttccaagtttcatggctctgctgctccgtgtggcgctaagcttttgtttttgcatgcatagttaattcaatttcgcacatttttgcgcaagtgtcgagtgaagcgtttgccaaatttaatttacatgatgagatttgcttggctgcattgtcgttggcaactcgttggcacgatttttataagcttgtcgagttaatttaatcgtgcagtgcaaattttcatttagtcgagctcacacacgcgctcccatgattgtcagacacctgtcacgcgaaaggaaatctcgcattcgtattcgctttcggtgccagcaactcattacgcatacgcagcgtgtgaagattttgactccgctctgctcgctcttgatgtttgcctcgctttt

SEQ ID NO: 35783 - DNA, 216 bp, DROSOPHILA
atgccacgaaagctgacagctgccagaaacgccagcagtatgctggcagttcccggactcctcccgctcccggccaggatgcctgcccctcgtccacctggagttcctcctgcgccgcgctccctctgccgccaggacattccgctgggcgagggcatcggcaactgtcggatgtcgcacctgggcggaacggagctgggattggtttgggattaa

SEQ ID NO: 35784 - protein, 71 aa, DROSOPHILA
MPRKLTAARNASSMLAVPGLLPLPARMPAPRPPGVPPAPRSLCRQDIPLGEGIGNCRMSHLGGTELGLVWD

SEQ ID NO: 35785 - DNA, 3967 bp, DROSOPHILA
aaagcgggacttttctgggactgcacgcaataaggtggttttgtcttaagcgtttgcgaactgtttccacgcttgcagctatctgaagctccttcttcagttccgtcgccggcttaaaaggctccttcttgctttgccgaaccaagcgcttgatctccacgttggacattgagggctttctttcacgtgtttcgtccttttcgacaaacagcagtgcattgtggatcattttgtttgaacaaccgacaattcgaccactttcagcgtaggttttaccttcagagatcatgtttttaatcaaatttcttttttagacggtacaatgctttccgcgacccataactacagaatttttggtcttcgtttggaaaaaattcaattaaaacctttaatacaactccttttttcaaaattagtcgaaaaaaatcccaaagcaatcactcctattcattttattcaacaaatacgtggtcagtgctatttttgttaccacctcatttcgcgcgcttttgcagcaagtgcccaaaaacaaaaagaaccgttacattgagagagtaaaaatttcttgctcagagagccaacatatggtacttaatattcatgcaatctgacttaaaaaaaataaacatttaataattttttttagcaaatcaactttccacctgcagtagtgctattattttaaccgcagctgtatgtctacctgcggctagctgagtaacagcctgttactaacaggtatcacgaatcagcgttctctcttgtattagacacttggacatataggccgacggatagaccagatccactgacctagttatccgattgggaatgtatatgatcggttacccaacaaggtgtaactggtatggaaataaattgtatgtcctgtttaattttagctgaacttcatatgttttcagttataataactcttcccaaaaccatttccagatccagaccggtccaaaacctagaccggttggagtaataattagtgtcacctaccgctcaggacgtgcaactgcatagaagctgccgcactgttttccggctcacacgtgtagttgccggagtgaatcttgcgcaccagaggaatgaccagggaaccaatctgtaaaatcgatattgtgagatatccgcttgagaactccggctctgcccaatctgctcaattcgcttaccgtgttccgattgtgctcggtgctgccgaagatattccggtcgatttgcgtgtaccatccgctctgggcgccgctggcctcgttttcggcagtcacttgttggtcgccacggtaccagaagatatacttgggggcctccagggtgccacgtacgatgcagtgcagctccaccctgctgccggccttcacaaagcgctgccgatcgccgattagctcggttcggggtgctgtgggtggaaaaaagaataagtaggatattggtgctcaacgcgaaataatatataaaagatattatcgcggcttgcgcgggaaaatcttagagccaaatgtaaagggatttctattgagctttagttgaaatttgcagcattacattttgaaaaaggttacaatgggttgggggctaagtttaaagctatctttcgtaactgcgactagattcaagtgctgaaaatataagattcagattgaagactatcctattcatacagaaatactttattaggacctcaaaatatcttacttattaattttataactcaaatttgtatcccaacatagaatttttcaccattaaaaatgccatctatttgacctagtcatattttttcttgcggtgtataagtatatgtcggccagcagtagtcgtctcacttacttatcacaaacagctgcaccttggcgctcattttgggctccgttgccagctggcactcgtaccagccggcgtcctccagattcacatacttgatttgcagcgtccagctgaggctgctgctgttgcccctctcctgacccccaggaacagcgtgggcgaaggagttgcccagggcagcgacgggcgtcgcagttgtggacagggcccctccggatacaagtgtcgtcaaggtggtcgactggagcagcgatgcgaaccgggcatcgttgataaaggttgtgtgatccaccgcaatgatatgttcatcccgcaaccgaacccaggagagcggttttcccgagtgctggttgagctgcaggtgcgaattatcatggatattatttgtatgttgcttgtaatggacaaaggagtttggaagtaggcttgcgccctcaccaataagttcattcattattctgcatttcgcgtcaccaacaagatttacaattgtgtggcttagaaaccccattacaaagtagcctcctcactcaactgaatggctccacattgttcccatatggcctccgaacccatccccattcccaatccttcacttaccttgcacggcagataggcatgttggccagcttggacggtggcgttcagcgggggcaggctgagctggcggcgtggcaggagctcccgttccttggccagctccttctctcgccgcagctgctgggccttttgttcgctgtcgtaggcgtggagacgggactgctcgttgggcttagatggcatcggactgccggacgggccgatgtccgcgggaggagctgctccggaggaggcattccgcagcatgtgaggcaaatcggctggtatgaattccggaaagggtggcaagtacgagggaatcgagaaaccctttgttagcgtcgcagtgtccggcctgtcgctccacgaatccaccacggttgtgtcgtactcctgctgctgttggtcatcgcccagcatcaggacaggagatcctgccgatcccattgtgcttgtccccgtcgcaggcgaggcaattagcgaggcgttctccatcggagtggccgtggctgctagcgctgcaaaataggtcaagaatgatgggcccatcagttggcaaactttatcgaagtttttccggacaaataattatttcagtcttttgacaagctgacaaacaatcgaaatgcagctgtcagttagttatgtggaaagtttttgcggaattaataccaaattaattccctttgcctaagttatctgcattttaatggacttcttatcgaattggaatatatcaagttaaagactgcaccttaagaacataaatacatacaaaaaatttaccttgaagcttcctcggtgtataatagcacctcaatattccaaagatgtttcagttaaaaaagttaagatccctaattgatatacatatacttaattaagtcgaaaactcttattccaccagctgagtattttttcgagcgctatataaagaattgaagtttaaaatttactaaaatacatttactaacttcatttaaagcatttttattatgtaatagtggactccaagccaaagcaaattattttgtatataacccaacggaatctgtttgttcgccgcctatcatcaaattaagcgcattaggcaagccttttgtgtattaattgacaaattgcgatatattttagaaaatatacattttccagcagcatattgcaatatgtcatggaaaatgcaaatttatttgctcagggcatctgttcgaatgcatttaggtcaagtgtatgggggtttgaaagttgtattttctttttagcaaggtgcaaaacaatttatcaatttatttataatttcgtgtgaaattctcattttccccccagctgcactcctctggggaatgatactcgggtcgtaattatgaaaggagaaattataaaaactaaattcaatttgagatatattttgatggttatctgtgtagagaaacgcccatcaaaagcagttatgccatcagatgatatggactccgcttagctacaaattacacatttaaaaaaattcgtttaaatacaattcttctaaaccagttctcctactatgatg

SEQ ID NO: 35786 - DNA, 1221 bp, DROSOPHILA
atgggcccatcattcttgacctattttgcagcgctagcagccacggccactccgatggagaacgcctcgctaattgcctcgcctgcgacggggacaagcacaatgggatcggcaggatctcctgtcctgatgctgggcgatgaccaacagcagcaggagtacgacacaaccgtggtggattcgtggagcgacaggccggacactgcgacgctaacaaagggtttctcgattccctcgtacttgccaccctttccggaattcataccagccgatttgcctcacatgctgcggaatgcctcctccggagcagctcctcccgcggacatcggcccgtccggcagtccgatgccatctaagcccaacgagcagtcccgtctccacgcctacgacagcgaacaaaaggcccagcagctgcggcgagagaaggagctggccaaggaacgggagctcctgccacgccgccagctcagcctgcccccgctgaacgccaccgtccaagctggccaacatgcctatctgccgtgcaagctcaaccagcactcgggaaaaccgctctcctgggttcggttgcgggatgaacatatcattgcggtggatcacacaacctttatcaacgatgcccggttcgcatcgctgctccagtcgaccaccttgacgacacttgtatccggaggggccctgtccacaactgcgacgcccgtcgctgccctgggcaactccttcgcccacgctgttcctgggggtcaggagaggggcaacagcagcagcctcagctggacgctgcaaatcaagtatgtgaatctggaggacgccggctggtacgagtgccagctggcaacggagcccaaaatgagcgccaaggtgcagctgtttgtgataacaccccgaaccgagctaatcggcgatcggcagcgctttgtgaaggccggcagcagggtggagctgcactgcatcgtacgtggcaccctggaggcccccaagtatatcttctggtaccgtggcgaccaacaagtgactgccgaaaacgaggccagcggcgcccagagcggatggtacacgcaaatcgaccggaatatcttcggcagcaccgagcacaatcggaacacgattggttccctggtcattcctctggtgcgcaagattcactccggcaactacacgtgtgagccggaaaacagtgcggcagcttctatgcagttgcacgtcctgagcggtaggtga

SEQ ID NO: 35787 - protein, 406 aa, DROSOPHILA
MGPSFLTYFAALAATATPMENASLIASPATGTSTMGSAGSPVLMLGDDQQQQEYDTTVVDSWSDRPDTATLTKGFSIPSYLPPFPEFIPADLPHMLRNASSGAAPPADIGPSGSPMPSKPNEQSRLHAYDSEQKAQQLRREKELAKERELLPRRQLSLPPLNATVQAGQHAYLPCKLNQHSGKPLSWVRLRDEHIIAVDHTTFINDARFASLLQSTTLTTLVSGGALSTTATPVAALGNSFAHAVPGGQERGNSSSLSWTLQIKYVNLEDAGWYECQLATEPKMSAKVQLFVITPRTELIGDRQRFVKAGSRVELHCIVRGTLEAPKYIFWYRGDQQVTAENEASGAQSGWYTQIDRNIFGSTEHNRNTIGSLVIPLVRKIHSGNYTCEPENSAAASMQLHVLSGR

SEQ ID NO: 35788 - DNA, 2255 bp, DROSOPHILA
tccgcttcgattgtgggctagattgcccaacttcggtggatgggttgtagtttctcgaatcgtgtctttcgttttctccaccaccgagcttggggtgctgtttcgttgtatcccgcttgcaggatcaaacgagatgcaggatcatcgtgtctgatctagcagatgattccatggtagcaagcgaccgatggcgagtatcagatactttaacttgcataacagccaagttagccaacttatctgagctgttggaattacacaatttctaaagctcatcgcttggatattggtttcttcctttgtcgatggtttctagttgttctaattgtcatttacgcgatagtcagagaacttcagagagatccatataatccgaatgaataaactcgacataaaatatcgcaagtcttgcaccatggagcagtcttgcagtaacaagtcgttcgaagaagtctcgttggtgaactgcgtcacagtcagacgttgtccaaattcgactggaagaacaggtggctctgccagaaggactggtactggatatatgactttttcgaaatatttatattattagccagcacgtaaacgggcagtccttataattactaacgcgatttcaatactctataagattaggcacaatttatttttaaattcgagctattgtagtcaatttaagatcccacgttaacacaaacttctgtggtcttaatcgtgaccaattttgttgctctaatattcgaggatcctgatattctcttgtttaaaggtcaggatgttgggaatattttgtttctattcgatattaaaatgtgtatgcataccaccaactgtgcgtgttggtaattttacccgattttaaagttctttcttaatagattaagtacaatttaaagtaggttacaaggttatttagcaactagagttaatggcataaagacgtaactttaatatttatgtatatattcgcttatcaaatggactcttaggcggtaacaataaattacaaatttgggagactggtttggggagcagcaccactgaccaagggtttggccagcgtagtgaatcgcctgctgaactgatcctttaccagctctggagtgactgtggaggccgcgtccaggtactgcaccactggaatctggcccatttcgagcacgggaacctgtcgcacgcgaagtcccggtaggagtacttgggattgggccataatcagtgcaaggagtccaaccagtggtataagatgcagcctcattttgagttgatgcagcttggagaatgctggtgtcccactgttagcttcacactttatacttatccaggaaattccggaagtctcttaccttccccaagcatcgggtgattgatctgcaattggcttaccgcatctgctctgctcgtgtccgttcaaccggttaggcagtatcgttattttgaataactggaattggcgtgcggaatgttaatggccacagtcttcagttcgaagctcacacttcaaaatgtgatatcaaaatgttcattttgtaattgtaattgatgtacatagcacaagttttgaacgacaagtataaagaaaaagacaaagcgaaaatctccttcaattcgaatcttaacagctcataaagttatgaggcagagtttccaccctctgaccaagaaacgaatcgtatttcatcctccctacatcttgcagagtaaattaaatagaataggtatagtgattccgacatagatatttcgtattttgaatgcatccaatggcatggcaggggaacgcttacataagcattctatcacaagtgattagactaatttagaaagttaatctgttaatttcattaagctcactgatagctctcccactgaatgacatttttgagtcatagtcacaaaagatcacaaataaatcgaattgaccattcacagccagactcaaacaaatttcagacggtgaaaacactccttcaatccttagaatcagtgaagtcgggccattagacgcttgcaggaatacccctaactccattcagaagagcttcgactttggccggttggattttccacctacatacgtacacgatgcatgtgtatttgaattaactgaataagaacgccgattagcagctcagtaggcggaatcagtagacagcgatacaggtgagcggtcgtttatctactccataccatacagcgtgctaagtcgcagctgcgattccagtgatatcgcaatatcgcgcaatctgacatcgaat

SEQ ID NO: 35789 - DNA, 255 bp, DROSOPHILA
atgaggctgcatcttataccactggttggactccttgcactgattatggcccaatcccaagtactcctaccgggacttcgcgtgcgacaggttcccgtgctcgaaatgggccagattccagtggtgcagtacctggacgcggcctccacagtcactccagagctggtaaaggatcagttcagcaggcgattcactacgctggccaaacccttggtcagtggtgctgctccccaaaccagtctcccaaatttgtaa

SEQ ID NO: 35790 - protein, 84 aa, DROSOPHILA
MRLHLIPLVGLLALIMAQSQVLLPGLRVRQVPVLEMGQIPVVQYLDAASTVTPELVKDQFSRRFTTLAKPLVSGAAPQTSLPNL

SEQ ID NO: 35791 - DNA, 3049 bp, DROSOPHILA
gtgtcccatcaggattgtagaggattgcgggtgcgcctttatgatgggcaccatgggaggatcgttgtttcagtacctcaagggattccgaaacgctccgtccggtcttcgacgtggcttgcacggcggtatagaatcggtgaggttgcggacaccggccatagccggcagctttgccatttggggcgccaccttcagcacggtggactgcgtcatggtctcgtaccgccagagggaggattcctggaacgcgattgtcagcggagcggccactggcggaattttagccgcccggaatggaattcgagccatggccaacagtgcctttgtgggctgcctcgttttagccatgctcgaaggagctggagcagcagtggctacgatttatgcatcggatggaggagtcaaagcagaggagtccctaatcactgttgaccagcaaatgcagagaccccagtgggagacatccgttgctgattcgaacctaactggggcggagttagagcgggtgttggatgaatgtcgggcatacagggcacacaacaagatgcagcagcctatgcgttcggacgcagtggagggtaaggaactggggcaactgatgaagccaatgcactcgttggtcgatctggtaaagctggccgaaattgtctgatagaaaagcttttaaggttttaagtcaacctcccatgcttcttccaaattaagtgttaattcgatattcagcgttaatcttatattatttttaaaagcccagtaggtacaaggaatgattttctatctcatggagaatatttttccatcttcaataaaagatcagctgatatttgattgcatctaataaaatactatggcactatgcaggctcaaaagagcttctaagaaaaatatatctcttctagcgtgccaccatgagcagtattatagtattatacatttttaacttatgttttagcataaaactgttgaaactgaaacatctgacctgtccactgacgacctaccttcctgatcccatgaagctggcatccgccagaccgatttgatagctggagctcttttcgccattatggtgatgatgctggtgctgctgctgcctttgacctgtttccgtttccgcagctgcagccttctcctggctgcccggctgcccgaggagattcagcaggttgtctacctcggcgggccaactctgcgcctggtgggcaggcgtcatcatctgggcggtggagcagttggcgccggcgccgctgcattccagattggcagatgccacagcttgttgcagttgctggatctgctgccgctgctgctgcttattgttgttgctgctgttgagcttttggcgggtcaggaggcggcactcggtgcggtggtcgggccaatggagatgctggtgggcgggggagcagtagtagacggccttgcacttggcgcagcgcagtagttgctgctgagtgccgcagatggagcagcgcggcgggtccatggccgatttggatgcggagtgggagccggaatggcttgctgaatccctgacctttccgcgacccctgctcattgcattttgcgggagaggagagccaaaggcgacgaccgattttaaccttgacagctctcccagctttttttaccccacctcacctacgccaactgaggcaatcacacacacacacgctcgcagattatggctatttgttatcaatgcgaattacggcactcgggcgttttagccaacatttcacttaagactgtttgtgcttattttaatcacgtaggccaccgaatttgccaaataaacaaaaaaaaacgcacatacaacgcacacacacagacgcacgggcagctatatgtgcattgttgttggtttttcctgcgagtattctcttttgtaagacgttttagggttgcaacttttaaccctattgactgttttataccctgccttgagctctattacgccccttgtttataaaaaccgcgtaaactgtgcaaaaaaagggaaaaattcttaactcagcactaaaatttctttttgatagcgatgggcgtcgaccgatacttagcgtgcagcgattgacatgtactcgttgtacagcactattaccggcgggcagtaggtatcgatagctgaacgagccaacgttagtggtgattattttatactggcacttatatactaacggtaatcaaagctttttatttcgctatttttatttactagctttaatatttaattgcacaagattcggaaacaaaaagctattgggaaaattaactcaaagcggccattaaccccataagaattactttaatacaacttcagtcgatcgtttatcaattaagcaaggtctctaagaatggcaaatacccttatcgtctattccaatacatttatatatatatattttaaagtcgatagtcgatagcgcgatgtgccatctccattatcaaaactaaacagatgctgggcggaaaatcaactggttcctcgtgataacttaatcccactaataagcgcaatgtcgtccagtgaacgagtggccaaagtggtgctggtggacatcgagggcaccaccacttcgattagctttgtgcacgatgtcctgtttccctacgccaagcagaatgtggaaaagttcctgagggattcgtgggaagaagatgatataaagcgtattgtccaggatctacagcaagtgccccagtatgcggactacaaggccctgttaagtggtccacctacggaagtggatgtagatctgattgcaggctttgtgcgctatttaattgatcaggatctgaaggtcacgccaatgaaaacgctgcagggcttgatttgggcgcagggctacgctaatggagagctgaagggccagtaagttccccattcaatattctcctatcatggccatataagttttacaatctgaactctagaaggttatcaaagaaaaggcttacttaacgtctgttcccaaaaataatttgggtgtctttctgagatccaattatacagcttggtgattttttaaatatgtatgctagc

SEQ ID NO: 35792 - DNA, 1049 bp, DROSOPHILA
cccatcgctatcaaaaagaaattttagtgctgagttaagaatttttccctttttttgcacagtttacgcggtttttataaacaaggggcgtaatagagctcaaggcagggtataaaacagtcaatagggttaaaagttgcaaccctaaaacgtcttacaaaagagaatactcgcaggaaaaaccaacaacaatgcacatatagctgcccgtgcgtctgtgtgtgtgcgttgtatgtgcgtttttttttgtttatttggcaaattcggtggcctacgtgattaaaataagcacaaacagtcttaagtgaaatgttggctaaaacgcccgagtgccgtaattcgcattgataacaaatagccataatctgcgagcgtgtgtgtgtgtgattgcctcagttggcgtaggtgaggtggggtaaaaaaagctgggagagctgtcaaggttaaaatcggtcgtcgcctttggctctcctctcccgcaaaatgcaatgagcaggggtcgcggaaaggtcagggattcagcaagccattccggctcccactccgcatccaaatcggccatggacccgccgcgctgctccatctgcggcactcagcagcaactactgcgctgcgccaagtgcaaggccgtctactactgctcccccgcccaccagcatctccattggcccgaccaccgcaccgagtgccgcctcctgacccgccaaaagctcaacagcagcaacaacaataagcagcagcagcggcagcagatccagcaactgcaacaagctgtggcatctgccaatctggaatgcagcggcgccggcgccaactgctccaccgcccagatgatgacgcctgcccaccaggcgcagagttggcccgccgaggtagacaacctgctgaatctcctcgggcagccgggcagccaggagaaggctgcagctgcggaaacggaaacaggtcaaaggcagcagcagcaccagcatcatcaccataatggcgaaaagagctccagctatcaaatcggtctggcggatgccagcttcatgggatcaggaaggtag

SEQ ID NO: 35793 - protein, 186 aa, DROSOPHILA
MSRGRGKVRDSASHSGSHSASKSAMDPPRCSICGTQQQLLRCAKCKAVYYCSPAHQHLHWPDHRTECRLLTRQKLNSSNNNKQQQRQQIQQLQQAVASANLECSGAGANCSTAQMMTPAHQAQSWPAEVDNLLNLLGQPGSQEKAAAAETETGQRQQQHQHHHHNGEKSSSYQIGLADASFMGSGR

SEQ ID NO: 35794 - DNA, 2675 bp, DROSOPHILA
aaaatgtcactgatggtgtggggctgtatcaccagccgtggagtgggaaaactagccttaattgagagcacaataaatgccgtgcaatatctagaaatgttaaaaaacaaatttgaaggccagtgtagaaaaaattagtctggttagcaacaacaagccaaattttaagttttaccaggacatgatcagaaacataaagagtgcaatgtaccgcacctggcgcccttaataactgtggtaaagtgatcgataccgccccctcagagtcctgatctgaaccccattgaaaatttgtggacctacttaaagaaagaaggtggcaaaaagggacctaaaacacaacaacagcttatgactgtaatagtcgaagagtgtgaaaagatcccgtttgaatatgacctgcaaaaacttgtccaatccatgaaaaaagggcttcaacttgtagctaaagccaatggggaacatactacataccaaaacttttaaaattttaataaaataatttaaaaatttaggattaaacatcgatttagtgttttgtgtaaagagtttcttgacagtctcaaaagtgtttaaacttggaatttgttgttttttttcttgtatatttaatatttttaatttgttttttgatttataagtaaaataaatattgtttaattatattttataaaaaaaatgcgtttaattaagcaaaaaacctttaatttttagctttaaagtcaaaaattcaacttatttcacagtgtgtaaacagtttcttgacaaactgtatatttcgtttgtaggaccattggtaaatatttgtatctagttagaacggacgtaaaagtcgtaaggcaacattctcaaagttatgtataatctataaacacacgtttttaatcaaaggccatattggtcaaaagctgatagcacatattcgcaaaacaaggaaagttcactacaaatcaagttttgaattaattacggattcttttggtcagtacatcacccgaacatggagtacaatcgccagccgtgtcccatcaggattgtagaggattgcgggtgcgcctttatgatgggcaccatgggaggatcgttgtttcagtacctcaagggattccgaaacgctccgtccggtcttcgacgtggcttgcacggcggtatagaatcggtgaggttgcggacaccggccatagccggcagctttgccatttggggcgccaccttcagcacggtggactgcgtcatggtctcgtaccgccagagggaggattcctggaacgcgattgtcagcggagcggccactggcggaattttagccgcccggaatggaattcgagccatggccaacagtgcctttgtgggctgcctcgttttagccatgctcgaaggagctggagcagcagtggctacgatttatgcatcggatggaggagtcaaagcagaggagtccctaatcactgttgaccagcaaatgcagagaccccagtgggagacatccgttgctgattcgaacctaactggggcggagttagagcgggtgttggatgaatgtcgggcatacagggcacacaacaagatgcagcagcctatgcgttcggacgcagtggagggtaaggaactggggcaactgatgaagccaatgcactcgttggtcgatctggtaaagctggccgaaattgtctgatagaaaagcttttaaggttttaagtcaacctcccatgcttcttccaaattaagtgttaattcgatattcagcgttaatcttatattatttttaaaagcccagtaggtacaaggaatgattttctatctcatggagaatatttttccatcttcaataaaagatcagctgatatttgattgcatctaataaaatactatggcactatgcaggctcaaaagagcttctaagaaaaatatatctcttctagcgtgccaccatgagcagtattatagtattatacatttttaacttatgttttagcataaaactgttgaaactgaaacatctgacctgtccactgacgacctaccttcctgatcccatgaagctggcatccgccagaccgatttgatagctggagctcttttcgccattatggtgatgatgctggtgctgctgctgcctttgacctgtttccgtttccgcagctgcagccttctcctggctgcccggctgcccgaggagattcagcaggttgtctacctcggcgggccaactctgcgcctggtgggcaggcgtcatcatctgggcggtggagcagttggcgccggcgccgctgcattccagattggcagatgccacagcttgttgcagttgctggatctgctgccgctgctgctgcttattgttgttgctgctgttgagcttttggcgggtcaggaggcggcactcggtgcggtggtcgggccaatggagatgctggtgggcgggggagcagtagtagacggccttgcacttggcgcagcgcagtagttgctgctgagtgccgcagatggagcagcgcggcgggtccatggccgatttggatgcggagtgggagccggaatggcttgctgaatccctgacctttccgcgacccctgctcattgcattttgcgggagaggagagccaaaggcgacgaccgattttaaccttgacagctctcccagctttttttaccccacctcacctacgccaact

SEQ ID NO: 35795 - DNA, 675 bp, DROSOPHILA
atggagtacaatcgccagccgtgtcccatcaggattgtagaggattgcgggtgcgcctttatgatgggcaccatgggaggatcgttgtttcagtacctcaagggattccgaaacgctccgtccggtcttcgacgtggcttgcacggcggtatagaatcggtgaggttgcggacaccggccatagccggcagctttgccatttggggcgccaccttcagcacggtggactgcgtcatggtctcgtaccgccagagggaggattcctggaacgcgattgtcagcggagcggccactggcggaattttagccgcccggaatggaattcgagccatggccaacagtgcctttgtgggctgcctcgttttagccatgctcgaaggagctggagcagcagtggctacgatttatgcatcggatggaggagtcaaagcagaggagtccctaatcactgttgaccagcaaatgcagagaccccagtgggagacatccgttgctgattcgaacctaactggggcggagttagagcgggtgttggatgaatgtcgggcatacagggcacacaacaagatgcagcagcctatgcgttcggacgcagtggagggtaaggaactggggcaactgatgaagccaatgcactcgttggtcgatctggtaaagctggccgaaattgtctga

SEQ ID NO: 35796 - protein, 224 aa, DROSOPHILA
MEYNRQPCPIRIVEDCGCAFMMGTMGGSLFQYLKGFRNAPSGLRRGLHGGIESVRLRTPAIAGSFAIWGATFSTVDCVMVSYRQREDSWNAIVSGAATGGILAARNGIRAMANSAFVGCLVLAMLEGAGAAVATIYASDGGVKAEESLITVDQQMQRPQWETSVADSNLTGAELERVLDECRAYRAHNKMQQPMRSDAVEGKELGQLMKPMHSLVDLVKLAEIV

SEQ ID NO: 35797 - DNA, 10337 bp, DROSOPHILA
taataaaaagagaaagctgaaatcatgagaacgctttggtcgaatgcccgaactattgcttatcctaagttttgcctacttttcttataattcaatttaccttacactcttcgagtaacgaaaataacaaaagcgaacacgaaattaggatgaccaggctatcagatacctagtatcagatgtctcttaaaactattttaaaattaaatgtacgaaagtaatattctactaaagtgcaacctattgaaatagattccagcggaaatcccgaggaatttcgaaattaaatgcaggagaattccttgataatttatgtataatgtatgtacgcgtaacaatcacttcgccaatcggatttaaacaaaagtgaaaaaaattgattataaaataattcttaacattttaaatttattttttccttttttggttcctggatgaatatcttatccgtgagtctaggagtatgaccttgagcagttgttgtgtcttctgcaaattgacaaaatggctatattggccaccaaccaattttgaacccgactgaactcatagctgaactactttacctggaagaagtccggagtccccacatcgacacaaggaccaaccgtaacccgctggagactcccgcccaacacggtgtcattggtgaccgttgagcaattgctgcaagctgcgcagctaatgttgttggttatctggcggctgcagtagagttttgggatgatgtggatgctgggatgagtgatttgatcctggggagtagtgtattagtagtgtagtatttaatggtgagaaaacttaaaaaaaaatatcgggcacagttatttttgggtgaagatgccgttaattttaaggtagccctagttctcgccagacttgagaataccccagaccaaactatgtggtatttcaatcaagtcaggtggtctgcctcgtattttccacagttatatgtacggtcacactggcgagcggacgtacacttcgcttcgatttgtccgcctgtgttttttgtaacggccacggaagtgcatttctggtgttctcgtaaattctttgtgctccagcgagtagggggtggaaagtgtggctaaaacgggaaaccgggagatgccgaaacgccattagcaccaattgcacgtcggctattttccaattgtgtgtgtgcatttgtttgtgtgcaagcgaaaaagtgcaagtgtgcgaaactgcaatgcacatccgtatcgagttttcttgatttccccataaacagacggaaaaacagcgcaacgacttcgaaagtgcagccgtgtttgtatggataaacgttcctacctggccaccaggtgagttccccaaccagttcacactggcactccaattggaagaacggactaggatcgagaataagtaggtacacgagcacccaagttggaattaaacgcagagaactcaagccagacgcacatacccccacacgcacgcacacacccttacgcctgtatacacacatgttcttgtcaacagctgagttgttggtgctacacagctgtattgcgttgcgataacggcacccggagtatggaaatgacagctgtccctgtctgcaccaccccacccccccccccctcccagggtgctatacccttctgacgcactgcggctagagcaagcgaaccgggacccttcggtgtatatgtgcactgttattgttttggtggtgcaaagtatcgatgtcgatgctgcgatacttattccttgggaaagaaatgtctacttctatgggttaaattggatttcagggaccttaattaataataatttaatgacctgccaagcatagattgcaagtaaatagcaactaaaaaataagtatctactttgttttcatttttactcatatactaatagtttattttaacataacaatgtattctgggaattggcagaaaacctattcgtgtacctatttcctttgatcttagcagaccatctgcgctatagcactgaataatgacccctcacgtgtcaaagggaacttgccccaagttatttataatattttgtagctttgcttttgctattttggctgtgaggtgcgtgcaccgtcgaaaaggtcagacatgggctgatgtctggcagctataaagcgggtcaagattgaataacgctcaaaagggtgaaacgagataaatggtggaggggttgacgattctaataatgtcagtagttctggagtttaagattgacgtatttgtttgtatttcgtacatatctacagctgtgttcagaaaatagcagtgcgaaggaaactaagtaatacaaaggtatttttccatgtcctttttcggaatcgactttttattccacttatttttgttaaattgaatgtgtagataggaaaaaaaaagaaaagccggttagtttttcttgttatcctttttttatttacattcttgagcaaaatcgcaatttttaggctgttcataagaatagcagtgcctggttttgaccaacgtaaagttccgaaatgatcattattttctaaaaagtgagtttggttaagttaattcgtatatttaaaagggcaaaaaattaaaaaaaaaattttaaattatattttagtgggtggaggacagcactgctcccaggagaaaagaatgttaattcttaagcttagaaaggaaggaaaagcattaaggacattcaaaaaactcttgaatgtgctgccaaaatggtatccaataccattaaatatgaatggaagcccgaaaaccgtggtaccaaacgtaaaaccacagagatagaggatcgacgcacagttcgttagagcaaagcctatccttttgcatcctctagggacataaagtctgagctgaacttgggaatcagtgacgttaaaatttcagtgcgaggagtccacgaaaggttcccccacttagcccaaggcttattcaggcaaggtttaccttcgctaaaacctaccgaaactggccagtctgcaaatggcgtaatatcctttagactgatcggtcaaaaatagtgctatttggtggaagtggttcactacagtatatctaacgacctccaaacacggagtaccacccaaaacacccactgaagactttcaatcacggtggacctaaaatcctggtatgggcttgtttttttacaatggttatgagtccataacatatgatttatggtattatagaccaaaacgcatatgtaaatatacttagtgatgtcttattggcatattctgaatataatatgcccttaaaatggacattccaacaggataatgatccgaaacgcagatgcaaatcggctaagaataggttcacccaaaatggaatagatgcaatgccgtggtaagcaccatcttccgatttaagcccgattgaaaacctgtagggggacattaaacaatatgtgtggaagaagtcccccgacgtctaaggctcaaatttgggcaagtttgtgcagggatgcatgggcaaaaattcctcccaaacgttgccaggacctggtggactccatgccgcgtgggtgtaaggctgtgctggctaacaaaggctatccagccaagtattaggcccgaattaacatattaaaaagaaagactaagttcgttctaagtcaagttgaattttgttactattttttcatagcactgctatttcattgaaaaccagaatttctgcctattatgttgttttaatctatattttcgaaactattaaagaaataaaagcgaaacatttgttaaattgtttgaaattaaatacctaatgatattataaaaaaaaatttcccattaaaactgtaaatcataagaattttttatcttaaacactcaagtccaaagcactgctatttttcttaacacagctgtacatatatctagagcatttcccctccatgtcattcgaactttttgtgtggttatcaatttacccgctagtttacatttccgcaatgtgtctgtcttttccttcttcacatcgacctacatgtactagactttttcgctttgttaaataattactgctgtcatgtgcttcttagatgttggcgtgagtcaacgagctcaaagttaaaagaaatcggacacagttctattagttctgtttatggtacaggcatttaaattataaacaactcggtctatagataaacgaaagtattgattaggccttcagagctctgatatacatatgtacgtaaaatccggcccactaactcccacgttgcaagttaaccgagacttgatgtcatcaatcttatcgaaccttgtatagcacatagcatgtatattgtatagcatatactaaaaaaacgtttgtacctgtagtgctgtccagttttgcacaacgtgtcatgaggcgggtagaaattggcgagatatagccctattctatacattcacaatgggtacgaaagcactcgattgttattgtttgagttgccgataagccagtacagattagagggcgaaaaacgaggggttttcacgaaataagtacaaaatacaaatcgttgaccacttagcactcatttaggatgacactttgttccaacagatcgctttcgtgcttgcagcaattagcagcatgcaattagttgacgctaatcataatgaatcagcaacacaaaaaggcctgcttttattaagaaacatttcttattctattatagcccaggagaaattgtttcgattccccgggttccgcttctttatggcattcaaatttgtaccgacctcaattgggtactatcatatgtaaatattttattaaatgtataaatcaacgcattgctcgaggtgccctatgttttttgtttgcttctctgttctcggtttagtggcatttgagttcatcacatttgttttttgaatgatttgctctcagaagtgggagatgagtatttgtttacttcaaattcatatgagggtattttgttgttgatttgtttctaaattataaagaacatgctctggttattccatcgaaagtgtagaattaaaagtttattaaattctggcattcaaaagagaaaagtatgccaataaccaagttctatgaatagtgtgagggctgaacgtaagccaaattcatgaggtatatttatgatctagatatataaataaaatttgatactatacaaatcaaacttggaaaggtccacagataatgccacaaacaaattaattctcaagcaaagccagctaattagccagaaagaaacaaataaaaacgaataaaactattattaccattatggctaattgcagttttattcaatgccaaggctaatatactactaaagcctagttttctgtttttgcaagcaatatatcttaagtagctgcccaaaattaattaaacaaacaatatggctagccatattagcagagctaactcaaaagcggttctcctccgtcaatgtcaagatacaaagctaggaaatgcgactttggccagcctgcagctcgggtgcaaatgtgggcaaggggcgaggtggtttgttttaatgccagattatggtcaacagccggttattgcagtctggccaagatctctcgagcgattcaaggcgaaggtcgccagctgcacgcaactcgaccgggcagaacccgttttccaagtgccacagctacagcttcccggtccgctttttttttgtttgaatccgattctgaaagcgattttgcgtgctctgggtgccgtctgtgatcgtcgttgaccttggggcgattcgttgctcatacgccgcgtgagacgggctttgttggcttgttggtgcgagttctggtttcgggcactgaaatgcgtgcgactctctaataagcaacaatacagtctgcctcgctagtcagctaactaaagagtaatttgcatacgtttgtcatttttgaaggtgtttttggcactgttctccgcttttgtgaaatatagagattcatttgttcaagaactttactcggagatgtctttcccattgttttgagatgattggagcttgctggctttctttcgctttggccaagttcaaagcaattgtacattgttagtaaatgaggtgccgtaaagtttacgatcggaacgtgaattgagttcagaaccagtttggttctggctaagtgcgctatgatacacactgcagttgttgagtactttaagaagtattttataacttttgcttctgccacgttcatctcgatctttgtttatttataactggcgaacgcttttctctgcccaaaactgcaatcaagagttcattcaactcattgctatgaactgctatctactgcattgtactttttgttttccactcccattgggtggcatacaaattaaaccagtttctaacacttgcgcattttcctggttgctcagttcagcgagctatgaacacgaatcgcgcaatgtacatacgtataaaatgtatagcaataatttctgaacatgtccaattatctgccattgaaaacccatcaacaaaggcaaatagaacccattgagaagtatttcaaaacctattttgcaaagggaattggacgcgatttaattgaggttcataaacgatttatttttgtagaagccaatccttaaaatgtttttcgttatattaatttatgattgcaacgcttgttcattggagtcttatcgggatttctggcattttaattaccagcgattattttttatcggtttatgagtcataagcgaacttaccatttaaatactttaagctcaggctaaaaaaatatgtgtgcagtgagtttgttgcgatatttttccagctggttgtttatgatacagttgcacaattggctttgctattaaacttttaccaatggccaaatcaattattcatcattattctaaaaatgagtcgttatctcgtagttacagtgctgtttcatcgccttttgataactttatggtcattgaaccataaactcatcgaatgaacattttattttttcgactttccgtgttttcgttcaaaaatattcacaagtctatgctaatgacaaaaaccatcagatgcggaggaccgaggcagaggtttgaaaatgactccatgcagttgattcagtctgtcacagtcccctctgcgttttccgtttaattttcatcatcgacacctctcagtaagtaattaagagttgaaaggcccacctctacgtgaactgctaaagtcacaaaggccgaacatcaaagggtaagagaatggagcgtcgtaagtacgacgctgcctcctccactctttcatttgttactgctattttaagtacagtcaggcttgattaaaccataacttgaacttaataaacacaaagaagtaaagaaatcatatttggtcatgtgcgccaaaatatgaaaggtttgaaccccttttctaacgggtccaaactaaggatatggttgctttttgagtttgtgctgatgatgtttcactgtatatctaactgaaacctgttttcttctcttagtaccgacaaagcggacgccatagcgggagacggagacgtgggccagtcaagatgacgcagaccaagcagccagcagggcggtcgtccacctcggccggggattttgtagcccccattagctctacgagtgcctccaagttcacgccctgctccgcctccgaccacaatgtcctgctgaacaacttccagcttaagaagaagagctacagggtcctgcttcacggacagcagttggtttgggagcgtctgcagaagatcaagcaatcgccccaaggaaacgaggccaaggcaccgttgccgccggactcgccagctcaaccaggcggaatctgctcttatggaccacaaagccacgtgctccacctggacgatgtggttagcataaggagcggggacaccaaggcgagctccctcaaaccgccttcgccgccaggctcggaacgcagttccggatgcagtggcgatgttgctcaagggaagcctaccagtcaatacctgaccatcaactatgccatgaggctgagcaagtcccaaacggattgcaatcggtgggagctaaggagactcaccttcttcaactcggatccctacatagtgaggcagtgggaccaggagctgcaaatccgtctgcatagctcctcccccacccggatgcgagtgcgccgccttttggtctttataaacccctatggaggtcgcaaggcgggagctcagacctatgagcgccatgtgagacctattttccagcttgccggcgtagacgccacgtgtatcaccactcagagggcaaaccaagtgaaggacatacttctgagccatgatctgggagtatacgatgcggtttgctgtgtcggaggcgatggcaccgtagcagaggtcatcaacggactgatattccgtcaaatgcgagagttgggactggacgaacagcggccaccatacattccaagaccggctctgccagtgggtgtgattcccgctggcagcaccgacaccattgcgtatagtatgcacggcacggcggatgtgaggacagcggctatccatgtgattctgggccagcatcggggattggatgtgtgcagtgtgagcaatgggcagtccctgctcagattctgtgccagtgtcctgagctacgggtacctgggcgatgtggcagcccagagcgagaactaccgctggatgggaccgcgccggtacgagtacagtggcgtcaaggccttcctgaataatcgcggctatgacgccgaactgagaatgttagaagagcccgatcttctactgaccacgccgctggaggacattccgcagagtccggatagtgtgtgctcgctgggagagtcagtgccatccgtctgctatgccaattgccagcgctgcagcttcgccagcagcatacaggaacagcgatcctcattgttcatccaagaggaatctaaagaggcagagcgcaatcagcaggtagaaacagaggactctcatctagccgccagtgaagcagcactcctgaggcctcgtccgcgtccaggcaatcttcgattgcccactggctccatttcatcaatgaggaacctcggcaacgatcagtggaaggttgtgcggggcaatttctttatgatctgcggcgcgaacataacctgcgcctgcgccaggagtcccaatggcatctcccgttacagtcatctgggtgatggttgcctggacctgattctcgtgaaaaagacctcactgctcaacaacgtgcgttttctgctcaacacggcgggcagaagtggtgatattgtgagtactaactattacaactattcaactttcacatccaaaagaacacctttcctataagaggcgtccatttcctttgaaataacatttccataacattttaactgcatctttaattgccaaatcccctaagcctacaagctgagcttagtgctttctatcctaaaagccaaaaacccaaaaccgaaccccatctagctcggattgaagcgagggaaatctgtgacagaaaggttattttacgaagatctactagccgctctggtggcatccatataaagtatatacttgaccagtttcaacaatataatgttttatctagtgaatgcgatggtatcttttactgtaaaaatataaatgaaaaataaaaggatacaattaaattttgtagaaaacaataaatatttaaaaacattttcccattgcagcgcaatttgccttttgtagaggtatatcgcacaagggaattccggttcagaactttttctgccagcgaggaggactacagcttggcagggtcttgtcagccgattacaccgcctgaagaaatgaccgcccactcctcctcgacggagttttccagctggaactgtgatggagaggtggtgaccgacctggacataaccatgcggtgagttggttgtacctttaacttcaataaatcgcttattaaccgttccgtatctggcagatcgcattgtcagctcatcgaggtcttcatgcggggtccccattcctacagcaagcccctcaagggcggcaccacgcccacaaccccagctagctctagcgacaatgtttactgctgctgcaaggactagaagctttaaccccatagaattagcatcaatcgttggccgtgacatgtagctcttagttttgcgtagggtatccttattcgtatatgtatcgtgttaaagagcgggtctccccgtcattgtttttagcatagctcaataaagcaactgatattatcgactgtattatggcatctgaaagatgcggcagcaacctaaacattcccctcggaagcattatgcacatacctatatatttacaa

SEQ ID NO: 35798 - DNA, 2173 bp, DROSOPHILA
tccgcctgtgttttttgtaacggccacggaagtgcatttctggtgttctcgtaaattctttgtgctccagcgagtagggggtggaaagtgtggctaaaacgggaaaccgggagatgccgaaacgccattagcaccaattgcacgtcggctattttccaattgtgtgtgtgcatttgtttgtgtgcaagcgaaaaagtgcaagtgtgcgaaactgcaatgcacatccgtatcgagttttcttgatttccccataaacagacggaaaaacagcgcaacgacttcgaaagtgcagccgtgtttgtatggataaacgttcctacctggccaccagtaccgacaaagcggacgccatagcgggagacggagacgtgggccagtcaagatgacgcagaccaagcagccagcagggcggtcgtccacctcggccggggattttgtagcccccattagctctacgagtgcctccaagttcacgccctgctccgcctccgaccacaatgtcctgctgaacaacttccagcttaagaagaagagctacagggtcctgcttcacggacagcagttggtttgggagcgtctgcagaagatcaagcaatcgccccaaggaaacgaggccaaggcaccgttgccgccggactcgccagctcaaccaggcggaatctgctcttatggaccacaaagccacgtgctccacctggacgatgtggttagcataaggagcggggacaccaaggcgagctccctcaaaccgccttcgccgccaggctcggaacgcagttccggatgcagtggcgatgttgctcaagggaagcctaccagtcaatacctgaccatcaactatgccatgaggctgagcaagtcccaaacggattgcaatcggtgggagctaaggagactcaccttcttcaactcggatccctacatagtgaggcagtgggaccaggagctgcaaatccgtctgcatagctcctcccccacccggatgcgagtgcgccgccttttggtctttataaacccctatggaggtcgcaaggcgggagctcagacctatgagcgccatgtgagacctattttccagcttgccggcgtagacgccacgtgtatcaccactcagagggcaaaccaagtgaaggacatacttctgagccatgatctgggagtatacgatgcggtttgctgtgtcggaggcgatggcaccgtagcagaggtcatcaacggactgatattccgtcaaatgcgagagttgggactggacgaacagcggccaccatacattccaagaccggctctgccagtgggtgtgattcccgctggcagcaccgacaccattgcgtatagtatgcacggcacggcggatgtgaggacagcggctatccatgtgattctgggccagcatcggggattggatgtgtgcagtgtgagcaatgggcagtccctgctcagattctgtgccagtgtcctgagctacgggtacctgggcgatgtggcagcccagagcgagaactaccgctggatgggaccgcgccggtacgagtacagtggcgtcaaggccttcctgaataatcgcggctatgacgccgaactgagaatgttagaagagcccgatcttctactgaccacgccgctggaggacattccgcagagtccggatagtgtgtgctcgctgggagagtcagtgccatccgtctgctatgccaattgccagcgctgcagcttcgccagcagcatacaggaacagcgatcctcattgttcatccaagaggaatctaaagaggcagagcgcaatcagcaggtagaaacagaggactctcatctagccgccagtgaagcagcactcctgaggcctcgtccgcgtccaggcaatcttcgattgcccactggctccatttcatcaatgaggaacctcggcaacgatcagtggaaggttgtgcggggcaatttctttatgatctgcggcgcgaacataacctgcgcctgcgccaggagtcccaatggcatctcccgttacagtcatctgggtgatggttgcctggacctgattctcgtgaaaaagacctcactgctcaacaacgtgcgttttctgctcaacacggcgggcagaagtggtgatattgtgagtactaactattacaactattcaactttcacatccaaaagaacacctttcctataa

SEQ ID NO: 35799 - protein, 596 aa, DROSOPHILA
MTQTKQPAGRSSTSAGDFVAPISSTSASKFTPCSASDHNVLLNNFQLKKKSYRVLLHGQQLVWERLQKIKQSPQGNEAKAPLPPDSPAQPGGICSYGPQSHVLHLDDVVSIRSGDTKASSLKPPSPPGSERSSGCSGDVAQGKPTSQYLTINYAMRLSKSQTDCNRWELRRLTFFNSDPYIVRQWDQELQIRLHSSSPTRMRVRRLLVFINPYGGRKAGAQTYERHVRPIFQLAGVDATCITTQRANQVKDILLSHDLGVYDAVCCVGGDGTVAEVINGLIFRQMRELGLDEQRPPYIPRPALPVGVIPAGSTDTIAYSMHGTADVRTAAIHVILGQHRGLDVCSVSNGQSLLRFCASVLSYGYLGDVAAQSENYRWMGPRRYEYSGVKAFLNNRGYDAELRMLEEPDLLLTTPLEDIPQSPDSVCSLGESVPSVCYANCQRCSFASSIQEQRSSLFIQEESKEAERNQQVETEDSHLAASEAALLRPRPRPGNLRLPTGSISSMRNLGNDQWKVVRGNFFMICGANITCACARSPNGISRYSHLGDGCLDLILVKKTSLLNNVRFLLNTAGRSGDIVSTNYYNYSTFTSKRTPFL

SEQ ID NO: 35800 - DNA, 3151 bp, DROSOPHILA
cagctcccgatgccgagcccgattgcaggatgcagtcgcttccgccgtcacacagcctcgcgtactccgaccgggagaccaggtccacgttgtccttggagccagcggctgcctcgttgcccacgtcgtaatagcccacctgcatgtctttgtccatgcgattcagcagatccgtcatcaagacatcggcaagaatatccttggcgctataggactgcacctggtagccactcaaggcgaccacgagcatcgccaccatcatgtacacacctggaaaaacatgggctattctcttacctcacccacctataaatattacttcagcagacttactttgcgaacggaacaacatattgcgattccaagcggtttcaaccgtccacgtcgaagtttggtaaggtattgatttttcggcggcagctgctccgattccgtgtatatactaacgtgacgtagggctctgtgcttcgtgcggcggctaccagttgaatttgcgaaatatacgcagatccaatcgaagctgccttatggcagccacagctgaaaggacgcatgcgccgtactcgaaagctcttttatgttgaagcagtcctgtggggggccgagaattagattagcgccaaactgctggagctgaggttttcaggcctctttaagctttattagtataaaatgctggaagaaaataagaaaacttagtcgctaagaaaactttattttcttgaattgtatgactagaggtttatgttacacggtaatacgctataaatttccattccctccttaatttaaaagtatgaactataaaaaatgacttgaaagtaaaactgaaggaattttattttcaataaattaaaaatacacttataaaaaaataacattgaaccgatactccattgtcgaatattatggtagcgaagtagtaaactgaactactcaattatgatttatttttttgaccttagcatttacttagaaagaaggtggtaataattgagggttaggttgccaattcgatgaaatcgaattcatcctgcatatatttggcaaggcgcttatgcggtgctgtttttgtatgggccaccaagcctcggcgagttataaaatccatgttgcaaggctcacacctaaacgcaaaaaatacgatattaagacatatgactgcgcaagctgacaagcttacctgaactttcggatttgctttgagtgtgtcgaaaagtggttctgcaattcggaaacgctgctgaagatcattccgcattctaggcatggataaggtcgttcgttcttatgggctctaaaatgaaattggaagttgcatatagtgctgcgctagcattcaattcccagcctccttacttgtcgtgccgcaacttagcgcccagagacgcgaaagcctcgtggcagatggtgcactggaacctgcggttaattaaatgaacctgggtgcgatgctgcttgagaagcgccttcttgttaaaagtctgtgggcactcagggcaggggaagaactggttcatatcccgccggttctggtgcccatttaaatgctcggtgtacaggaacgcatcgtggaacagggttccacactcgtcgcagataaagaagttactgcgcctcttggcggcccgctccatttcctgctcctgtagatcctcctgctgcgccgcttctgctgccgcctctgctgccgctatcacagcggcagaggggtcgtcatccagctcgatttcctctaggtcttggtgttcctctttcgtgccttgataacaaacgtactggtcgtcatcgtagtgcgtctccaattgatccgcatcgatcagttgctcgtccagcggctcggaactaagctcaacgtgaacagtgctttgatcactggtcttctttatgatatccagcaggtacttttgcgagaagatgcaccgctcgcggaacttggtggccaggtccagctcggagaagcagcgctcgcaaacaatctccggcagcccctggtttcttgtcagctgaacaaattccaggtaataacaattgttggcgcggtcggaagctgacataacgacctacctccactcccgtgattagcttcagttgacccaaatattttccccgcatgtgaatgaatatgttgcgatctcgctggtggcccataattttgttggcgcaaatacggcaaacgtcggcgaggttcattgtttatcaagttaatgtgtttacttttagcataaaacgcagcgacggaaagtgttaccagatcataaaacagttggaaaaacgacagtgcttaatcgatttgttatcggtgaatccgatagtcagatacatttttatagcgcaaaaagattttttattcatttgattttattaatagttaaaacgatacaacatgcgcttgtttaatttaggttagaagcttgtaaatccaaaaagaaccattaaaattaaaaaatcaaattcgatgcccaacaatgccattgttaaccaacatagcccctgcagccagtgatatacaatttaagttagtttcgttttgtaaactactccatctattataataaataattagttaaattgtgagattcgttttatttgccgactaacgatatttttgggaattgaacatgggcgaaaatagcgaataacgagctaatcaatcgaaagatttcacacccctagttgcgcgccataattttttgtgatatttgcaaacgttttgaagatatttgcagttcacaaagtacttaaataatccgtgaaggtcctgtgcgcgaaccaagacattgaacatgtccaccgaagcgagtgtggcttccaaatggacgcgcccagatgacgtgggtaaggactcggaggagcacctgcccgccactaatgttgttgtttcgttttccagttcatcaaactgcagcggctcaagcagaagaagaacaaattggcagcccgcgtgagcaacaacaacaataggcggccaagacaccaagtggatgagacggataaaagcaagctactggaggctaagctcgcccagaagcgaaaaaatccgtttgcgaagtgagtttccctctctctcgctctccccaaaatccaattactgactccctgcctcagatccacagctgatgccaagaaactgcgcgttgatccgcaactg

SEQ ID NO: 35801 - DNA, 972 bp, DROSOPHILA
atgggccaccagcgagatcgcaacatattcattcacatgcggggaaaatatttgggtcaactgaagctaatcacgggagtggagctgacaagaaaccaggggctgccggagattgtttgcgagcgctgcttctccgagctggacctggccaccaagttccgcgagcggtgcatcttctcgcaaaagtacctgctggatatcataaagaagaccagtgatcaaagcactgttcacgttgagcttagttccgagccgctggacgagcaactgatcgatgcggatcaattggagacgcactacgatgacgaccagtacgtttgttatcaaggcacgaaagaggaacaccaagacctagaggaaatcgagctggatgacgacccctctgccgctgtgatagcggcagcagaggcggcagcagaagcggcgcagcaggaggatctacaggagcaggaaatggagcgggccgccaagaggcgcagtaacttctttatctgcgacgagtgtggaaccctgttccacgatgcgttcctgtacaccgagcatttaaatgggcaccagaaccggcgggatatgaaccagttcttcccctgccctgagtgcccacagacttttaacaagaaggcgcttctcaagcagcatcgcacccaggttcatttaattaaccgcaggttccagtgcaccatctgccacgaggctttcgcgtctctgggcgctaagttgcggcacgacaaagcccataagaacgaacgaccttatccatgcctagaatgcggaatgatcttcagcagcgtttccgaattgcagaaccacttttcgacacactcaaagcaaatccgaaagttcaggtgtgagccttgcaacatggattttataactcgccgaggcttggtggcccatacaaaaacagcaccgcataagcgccttgccaaatatatgcaggatgaattcgatttcatcgaattggcaacctaa

SEQ ID NO: 35802 - protein, 323 aa, DROSOPHILA
MGHQRDRNIFIHMRGKYLGQLKLITGVELTRNQGLPEIVCERCFSELDLATKFRERCIFSQKYLLDIIKKTSDQSTVHVELSSEPLDEQLIDADQLETHYDDDQYVCYQGTKEEHQDLEEIELDDDPSAAVIAAAEAAAEAAQQEDLQEQEMERAAKRRSNFFICDECGTLFHDAFLYTEHLNGHQNRRDMNQFFPCPECPQTFNKKALLKQHRTQVHLINRRFQCTICHEAFASLGAKLRHDKAHKNERPYPCLECGMIFSSVSELQNHFSTHSKQIRKFRCEPCNMDFITRRGLVAHTKTAPHKRLAKYMQDEFDFIELAT

SEQ ID NO: 35803 - DNA, 2928 bp, DROSOPHILA
ctggagaagacgagatatctgctggatattcattaccagtggtcgatccaatcggttttcggttgctcagttgtctttttttccatacctaattgattttgcattttgcgttgccacagagtcgaaagaaactggtttttattgtgtttcaaaacaaacaagatgagtttctgagtacgcaaaccatacgagggtagtaactagagaagtttaaacaagccagtcggtgcaaaaaatgcattcagccgttaaatcgaccgtgacaggactcgaacctgcaatcttcggattcgaagtccgacgccttatcctttaggccacacggtccggttgaaacgtcccgtttgtccctgccctataaagctcaaaatgggtactcccaggacatactttcaccacactttcgcatcctgacacctccacctcccaggatgtggcagtaaaaaccacccttgccggcataagcttcaaaattgtgcgttcctggaatccttgtgcgcagaatcctccacaaggaccacatgtagtacacagcatcccaaatcagctgctgtatgtgatttggaaattacattactaaatctcaaaatcagcctttttccaagctgtcccaacatttaattaatatcaatctacaagcactatctttattcaacttcaatttgattgctacaaacacactagcgttgattggccagagggtttaatacaaaattgaatttttattacattgcctataaaatactttactgtccacttctataaccttcaaaacacaatatttacattataatacagagtatcctcataaaaatataaatcacagaggatatctttgcgttagtcttctttctggtttccttccgtcagactttcaactttgtaaaatttgtcaagtcaactgtttagattccgtgtagccagcaatgcaataagaggctccaaatttcactgatacatcatgcaagccgggaattcagccactctatccaaaaaatccatggctggtggcactgcgaagaggacacaagcagtagcacccaccttcgaggtcacccagctgagcagctcccagctgtccagcaatcggggcgtccagctgccgccactgatgatgaggggtcagaccgatccggatcaggtggagaacgccacattccgggtggtccaggccgatcgtcgtcccattagcgaccagcaattcaacacgctgataaagcgcctcgtcaagtgcttcatgtcggaggtggcgatcacaaagcggctacagaaggctatctccaagcggtccgtaaatccggttgagcggcagctcatccggcacatggaggccctgcttcagaagtacgaggcggagcgatccgccttggtggtgaatctcagtctggacacccgctttaaacggtgtcatccccttgccgcgcagctcgtgggggtccagcccagcaggtccagcaaattacaaaagagcaatcctctcgagaacgacaaagctccaaaaaaaaccacgagccgcaagaacgagcatgatattcgaaggaggcaaagacaaagtggaggatccctgcccaaggggtcgatcgcaggggccattgtgggcaagcgactcagattgcaggaaacctttaaatcctatcctgaacctcaccaaattgaaaaaccttctccgggcaaccaaaaccgattagtgtcggtcaacaacgatgtatctgctcaagtgtcgccgagttcttctgacgttttttacgattttccggatatagtcgaattttaaaatccaacttattttgtcttgctaatttaaatatgccaaaagaacatggaaatttccccctagcactcccccacaaactgagtaagggctatctgatattggaggaactcgattctcttgtttttctttaagtttctacaaccgaacagttaggttgattttcatcattaaataaataacattgggtttccctgcaactaaatctttctatcgcctccaatataccaactgagtaactctccgatttacctctaaccataaatattgcgatcggacgggaatctggtacaaggcctccattggcagaacaatatgatgtgattgcgacggcaattcaaagtaatcttagctaattaccataaaaagagaagacccaggccacatcagtctcagttccgtgccacatgtggagcaagtgaggcgaatccgagtctcgggtggagcatgcgacttgcggagctccagccatttcttaaataactccatgttattcaaaaagttacagaagtgaaagtgaaaagttgatgggggaaatccagaggcgcacgaagccgtgcgatcatgtaaatttaatcgcagatatgcccaagccatgagtcactaaaatcagtctacactgaaaagaaatatataagtggtccattttcaaattagcgctatcccttcagttttagttgggaacgagatgtttcgaaatcatcgaattctttcagcagtcatgtaaaataagtgttcaaggtgcatctcgtgatttggaggtatacactcaaaccggtctaagggcgaagtcaaaggacgcctgtccttgggagccgagttccatggccataaatagctggtccattaaaaccggcttatcgaacaatcgcaacctgggcttacttacttacctctcttcacttcgccgactctttgcagccgatcattggccacccactccaggattggcgctagcaccaaccgtgggagatgtctgcgatgcggcatcgcccgatggcccctccgggccaaggaccaggagcgggaaccgctggggagcacgtcgacagcgatgacaacaactttaccgacgacgagagctcgcccctcacccacgacatttacggcggcaggtaggtctctttcccggatcaagtatttcggaataggagtgg

SEQ ID NO: 35804 - DNA, 928 bp, DROSOPHILA
atggctggtggcactgcgaagaggacacaagcagtagcacccaccttcgaggtcacccagctgagcagctcccagctgtccagcaatcggggcgtccagctgccgccactgatgatgaggggtcagaccgatccggatcaggtggagaacgccacattccgggtggtccaggccgatcgtcgtcccattagcgaccagcaattcaacacgctgataaagcgcctcgtcaagtgcttcatgtcggaggtggcgatcacaaagcggctacagaaggctatctccaagcggtccgtaaatccggttgagcggcagctcatccggcacatggaggccctgcttcagaagtacgaggcggagcgatccgccttggtggtgaatctcagtctggacacccgctttaaacggtgtcatccccttgccgcgcagctcgtgggggtccagcccagcaggtccagcaaattacaaaagagcaatcctctcgagaacgacaaagctccaaaaaaaaccacgagccgcaagaacgagcatgatattcgaaggaggcaaagacaaagtggaggatccctgcccaaggggtcgatcgcaggggccattgtgggcaagcgactcagattgcaggaaacctttaaatcctatcctgaacctcaccaaattgaaaaaccttctccgggcaaccaaaaccgattagtgtcggtcaacaacgatgtatctgctcaagtgtcgccgagttcttctgacgttttttacgattttccggatatagtcgaattttaaaatccaacttattttgtcttgctaatttaaatatgccaaaagaacatggaaatttccccctagcactcccccacaaactgagtaagggctatctgatattggaggaactcgattctcttgtttttctttaagtttctacaaccgaacagttagg

SEQ ID NO: 35805 - protein, 257 aa, DROSOPHILA
MAGGTAKRTQAVAPTFEVTQLSSSQLSSNRGVQLPPLMMRGQTDPDQVENATFRVVQADRRPISDQQFNTLIKRLVKCFMSEVAITKRLQKAISKRSVNPVERQLIRHMEALLQKYEAERSALVVNLSLDTRFKRCHPLAAQLVGVQPSRSSKLQKSNPLENDKAPKKTTSRKNEHDIRRRQRQSGGSLPKGSIAGAIVGKRLRLQETFKSYPEPHQIEKPSPGNQNRLVSVNNDVSAQVSPSSSDVFYDFPDIVEF

SEQ ID NO: 35806 - DNA, 3014 bp, DROSOPHILA
gtcttacatggtgaccaattaccttagacaataagaataactcttaagctctgtgtatatagtatagtataaaatgtaattctttagttgtcaactagtaatcaacacatttaaatgcactaattgcacaaaaattatttactggcaactgtccattaatctgaagtgtaactgctcaggatttgtgtctttgagctttgtcctttgatattcagcggctttcaacaattgtgcaaagggaacgcagtttggagaaggacgaacgagccagtgaatccaattaaaatgcagcggtttctccagctgaaatgcgactgctgtgggcagtaaagattgctgaagccacaagagtggtcaaccaagtcctaaataaataagataaagcggcggaaaagtatgtgctcggtgcacttttcagtgcactttgccccatacaaattctctgcgagtccaactaaagtggatgaattaatggctgaactttcggcaaatttggttcttgcgcagcagttttgagactgaaattgctgctactctttgactaacttacataagtcctataaagaattaattttaaggtatctaagttaaggttatctaaagggtaaaatttcttaagagtattgtaacataatagtggtcgctccaatccaaaccaataaaccaaccaaaagcgatgatgacccatggcaaatagtaccttgtagtgtgcagattggcatttcgcaataaggaataaggcatcccacccatttccatccatattcatgtcatatttatgccagttgtgagccctcgttaaatgccataaactcttttcccaatttcatatttgcttttcatacgcgtgccaaaataatgcgaaacggaaacaactcaaccatgtggacacatgtgcctgtttgtttatttgcttgtttgtttgcttgcccgtttgtttgcggaaatatgctgataaaaaacaaacacccgcccaattggcacggccatcgcaatcgcaatggcaatgggaatccgccagaagcgatttccggctgacaacttcgccgagtggaacaacggacatccgctggggctgcgaacggtgcacgcctatgtcttggtctacgacatgggcaacttggagacctttcaagtgagacccacaccgccatgtaactccaacgatacccctgacgattcccatttgcttccattccattccagtactgccgctcgatgagagatcagatcttggacagtttcagtcatcgtgattttagcataattgtggtcggcaataaatttgacaatgtgactgaggcgcaggccaactcgcaggtgagtctatttactcctcagccatcaaatcactcaaatccaaatccgtggagaaataggaagatttacgtcatgtaatcagaaagtatttttgatgcacctttaaagaacataactaagtagtgagagtcactaaatattagtaatgtcaattataaaatatttttattctttaaaatatctatcgtgaatagagataaatttaactgtattcagcgatctcgaatcgtttgatactgtccagggtatacaattagtaatcatgtaaagaccaaagttggcagctattggttttcagcagacttttactcaataccgaatcctttccattaccgcacatccttgccatcacacttatcctgaactggccgaatggcaggagctcaaggacatttccacgctggtgcgcaaacattggcgctgcggctacgtcgagtgctcggcgcagtgagtaatcaaaggccacgctgccaaccgatatcgatatgtggcctaaccggggcttctcttctttggggtcttccgcagatataactacaaaatcggagacgttttccgcgagctgatgggctgcaccagcgctgtaggaggaggcggcgccggcggaggtggaggcgtggccggggtcggtggcctggttggcactgagtactcacaatcaactaggaataaaggacgctgtacaatactgtagcaagagttgcataagttttataagcaaacgcgctgatctggcgcattacatccgagtgaattcatcgcaagacggtggctgcagctgggacacggtggcgtatacgcaatctccagggaggaagcacaaagacgacattgttgccccttgccaacgcttgccctctgatgcatattttaccatatattttagtggccacactccgcacatcttctcctttgtttgccattattacaacattttgtgttcccggctgtttccatggacgcttttgctctgcttatttaaatggcagtggcaatggcaatggccatggccccgccgcacacaggacacgtttggccagcacccagatcccgatcctgacgacggcttttgtgcgtccgcatttgcaattcaattcatatttcgctggcaggaagtgcaatggccatgaatatgcagagatatccgcaaagtgcagccacaatggccggcgaaagttccctttgcgaccatcatcattatcgttgtggctattatttgtgtcgtggatcgtaaataggcaattaatcccaccataatttacaatacgttttatgtacgaacgaataaccttgttatcaaacaaactaaagtcggttaggaactaaagtaaagaactaagctatacacacatatacttaaacatatatgtatacattaacgttgtgatcatttcaagaattagttcttaaggcactccgacccagaacgtcggccaatgtcaagtgaagtcaagtcaagtcaagtcaagtatccgtatccgtatccggaactggaataccagaaatacttagctataggacacagtacgagtaagagcaatttaataaatagtcgtaagtgtttggagagcggtcgaaggcggtaaaatcaaacagttacaatcatgccatgaaaatcctcaacaggccagctccataatatccataaatattcgctccgcaatttgcttgaaatgaataaccacccgaatctg

SEQ ID NO: 35807 - DNA, 564 bp, DROSOPHILA
atggcaatgggaatccgccagaagcgatttccggctgacaacttcgccgagtggaacaacggacatccgctggggctgcgaacggtgcacgcctatgtcttggtctacgacatgggcaacttggagacctttcaatactgccgctcgatgagagatcagatcttggacagtttcagtcatcgtgattttagcataattgtggtcggcaataaatttgacaatgtgactgaggcgcaggccaactcgcagcagacttttactcaataccgaatcctttccattaccgcacatccttgccatcacacttatcctgaactggccgaatggcaggagctcaaggacatttccacgctggtgcgcaaacattggcgctgcggctacgtcgagtgctcggcgcaatataactacaaaatcggagacgttttccgcgagctgatgggctgcaccagcgctgtaggaggaggcggcgccggcggaggtggaggcgtggccggggtcggtggcctggttggcactgagtactcacaatcaactaggaataaaggacgctgtacaatactgtag

SEQ ID NO: 35808 - protein, 187 aa, DROSOPHILA
MAMGIRQKRFPADNFAEWNNGHPLGLRTVHAYVLVYDMGNLETFQYCRSMRDQILDSFSHRDFSIIVVGNKFDNVTEAQANSQQTFTQYRILSITAHPCHHTYPELAEWQELKDISTLVRKHWRCGYVECSAQYNYKIGDVFRELMGCTSAVGGGGAGGGGGVAGVGGLVGTEYSQSTRNKGRCTIL

SEQ ID NO: 35809 - DNA, 5956 bp, DROSOPHILA
cggctccatagtggaagttgcccacgtccgcgttgtagaagtacgacaccctacggtccgtcatcgcgccaacttctcaattggatcggttattgcagggacgccgtagtcccctagttgtggaccaaatcctcgccgggcagcaggtacgtcttcgcatacaggacaatcagcagaacggccacgatgaaaaggagtcgccgggttgtgtcgtattcgcccaacagcatgccgctcccgtggtcacctttgggtacctttgtttaatcgtgagatatcaatttgctaacttattgccaattgaagacaacttaaagcggcgtgcgccgatagtgtactaaaaatggacatagctagtgatgtacaaacgcacagtcacgtcacgagagcatccctatggtgatgctataatttttgttctgctcaattcacaagtctctctgtgcatgtggttttattttatttttggtcgatgtaaggaaggctagatgttgtaaaatatacgtgtgtcttttagttttcatttaggtttatttttaagcctaatgtattaaatgaaataaatacacgaacgtacgcttgccaaaaaaaaaacccgccagatatgaccgaaagccgccgggccggcagcactgtccagttagtttatcttctattttgattttctaattcgactctgctcgcgctaattttcgtgatagagaatattggaatattggaatacgcgtattggagtattggaattggagaatgcagtaatcaacaataaaagtcagtggacaagggaatgcagaaagtgtgtcaactggctaaaaacggcgaatcaggaagcgctcctttgggcaaccgataaatccgccagccgagcaaaatcggagccaattacgaaaccgccattgattttggttcccatcaatatgtaagttgtgccccggcttctgaattagtccccaaaaaactttgagtccgcggaggaagcagtacccaccagaaatctgcgatgttgaccctgtattacgtgagtgccaccgtcctgcagtcctggcgcattcaaaaggcgtgctccaagatcgccgagcacctcgcgcagccctcgagcatcgccttctataccctccaatcgggcagcgatgacggattcggtaagtggcggcgtcattggaaggcgttcacgcttatatagactgcctgcttcctccacagatcccgccctggccagctcggagttgtgctgcaatcggaacgcggccaaggtcacggacatcctgtggctgcacgccaaccagcggggttgctgcctgcgtccgctgcaaacgctacacatcacgccttggatcagctttccgccggcgcccagtctgcttcccttctcctatgccgccgacacgttaacgccggcgtccacgcccacggaggcggacgtcccgcgccaacaacgggtttcgctctctgcccaaggggaggagcggatgcagctgctccttgaggccgacatagagccactacagcggcccagctccgaggacacatcagcagtacgggtaagttaacccgacggcgtgttgcgttttttttaatctccaaatccatcaataaaaaacagtaaggcttaagcaaattcaagttataaatgtttaattgccacaattcggagtccacaaatacatgtttatacatgtttatttgcaacagaatagttcaaagacttcaggatgtaggaatagctttttaatggacttttaactacatagtttggaattcaccattaaagggggactacgaatattactccaaagtatcttaagaatgctaccgtaattaaagttagcccactttgtatcatcataatgagaacagatagggacaatcgaccttcgggtgacgccgcaatgtggacggtgttgcgtgcggtaatcttattaagatgtacatggttgaatcgattagagcgctggcgtcatacatacatacatacgactacactaactaggggtatcctctcgtgtgtcctttcttcttcttgcatgtcggcggcccatgaatcagctggaagattacggtaagctaattgcttggaaaatagattcccacctggcggtgctcatcgaaacagacgtcgagcacttcacgaaacttttgataacgactttcttgagaaataatttatgcattaacgatcagctgccacttttgcggattgagtgtaagctgcacctgaaatcgttttaagaatttgacttcatcttaaaaatcccactgatttattgtttctccctcccagcggtgcaacgggaaggggatccgcagccctttgagcttctggccaagcatctgaagcggcaatcccgcataagcgtcggtctggacaaggatggatggaagaagcacatggaggacttgcgtgccgtaggtgtgctggcgcaccaggccaccgagttcgagtaccagaggaatcgctctgagggaagaacgaaatcggatcccaccacacatgatcaacgcccgacttcggagcttttggccaaggctgtggccgtggtggagcccaccaacaaggcatatctgtctccggcaaggacgacagaagcctcgctcaaagccgaggccaagggaacgtcaacaaaaccttttccgactaaaagcgatgccaaacccgccactcttgccaagagcgagggcacgccagccacaagcaaagaggactccaagttaacgccaactaagggtgcattaaagacaagcgaactagagaaactagcggctgtccaggcagcgcagcagcagaagaaagaggcagtccaggtctctcccgtcaaggctgctttcttagctaaaccacctatgctaagtaaacatgatgagcctgataaggcatcagatcagccaacgaagcccaggaaatcctttgaggcggtaaagccgttaaattctcctccgtcatccagagctgctccctcgcgtcctgtgctgcaacgcaacaaggatagcctgcaggacgcaaaaccattgaatgttttggtctactcagacagcgccagtgcgcgggaatccacattggccactctgcagcagctgctggagcgcaatgtgtacacgatctatcctctgatgcctcagcaagcggctcaaaaatactggacggaacagactgcgttgctggtcgtctgcggatcggtggcacacggaattgggcagatattggtggactactttctgcagggcggcaaggtgttaagcctgtgctcggatatactgcactttgtactccccaactatcgcacagcggaggtaggactctgttttgtggaaaatatacccaaattcgccaacatccatcccgtgttctacaggttcgagagcacgaattggttcagttctcctatgacaagtggcagcgggtcaagatgatgcaccacatcttttgctaccaaccgtcgccggtgaagaagcacttctccactgacagcgaggagtccaccaagtcgcactctcgcaaaccgtaagtagctattgctgctcccatccagactgccagtgaccaaaacacattgctaaccttgccgatcttcttaatagtgccaataacaaatagcccattaactgagtatcagtgtatttgaaaccgaaatgttgcatgttttatacacccgaaagccctattcaagtcgattattgcacagccgtcgggtaaattgtaaaaaagaggccaagttataacgctttactttttagacccttgcagaaggtatatatcttccagtcagaagttttcagggcttaaagggttaaaaggcactttcttcattcttgatcagttttaccagccaagtccgtctgttcatccagttttaaggattctagcctctcagttttaaagctgtttgcatgaaaagacttcctcctgaaatatgtaagtaagaaaagggaataatcggtcctctatttcttatagcttccataggaataatcgaaaaataaatgaaataaaaatggaatatataattcccgttttaatttgtattatattttttcttgacatatacatatgtaatttctgcaagggtatatgaacttcggcctgccgaaaccaacctcctgtcttgtttcatttatgtatattattactttttctgaatggggcttgaaatgaaatgaattaatcctaattaatcgttcttatactaaaccgattctaaccaattccaattctcattttatttctcaaatgtttcatgctcaaattggtctcgtttactctaaatatggcttaatttctatttgattcggtgtgcactgtaatccatctatctaaactccgttttcaatccgcctaactaactaacctatctatgttttctgtaagctctcttaactcttgttttttatcgattgaatgtgccatccatgtaatttaattgtttaattgtgttataaacatttggcatttcaaaccttttcaccatcctgctacgtttaccttctaaatccttaaatttctgcgtgtgcttctatatgtgtgtgctatcactattataatccatcctaccaataactaaaataacaacaaaccaaaaacaaacaaaaatcgaaaaaaaaacacaaatcaaaccacgaaacgctgctcagagctctagtatgtccaaggtccatggaactgaaggatctggccggtcacagccacaatttggatgtccatgtgctgggaaccgaggaaacctggaatacgcccagcttgatgttggccaaaagcctgcagagcggcggaaaggccgtcttctcccaagtaagtgattgctcatgtaaatataacaaacatatattaaaaaaaaacattcctatgaaacaaaaaaaaaaacaggtgcacttggaaatgaatcccagcgaatttgaatccgatgagactaagtactccattctaaagcaaaacgagcgaactcgcctcgagatatttgcggatctcctgggaaagtacttggatgtgcaggtccgcggtggagacggtgtcgaccagccgcagcctggagttgtctacaagcacgcatatttcctaggtcggcacgaggtcagttcgtctctccatttgttttggcatcagaatccaatattctagctctttttgttattcaggccaagtttgagcttctggagaagctacgtctgcgctgcagcggatccgacaacgtgatagcaacgccgaacctgacgatgaagttctgtggcaaggacgataagcctccagtggccaacaacaatgtcctgcccatactcatacattcctgtccggatgacttctccaccgtggattacttcgatgtgagcgcattctaattctagtctatagcagaattaacccaaattcctcttattttaaagaatcttaagacggaacacatcggacgactggtcatctatgcaccggtggtcagcagctccatgcatctcataaacaacctggagctcatccacggcctggctgtgctccccgtgcagcagacgtccggagtgggtcgcagaaataatcaagttagtactctagaagcatccagatttaagttcttgttgaaatcatcgctttgtgctttccagtggcttagtccgccgggctgtgccatgttctcgctgcagctgcacctgaccatggacagcgctttgagctctcggctgcctctgttgcagcaccttgttggaacggcgattgttaattcgctccgcagtcatgaagagtacggggtgagtcaagactgtaaagttttaccatttagttgaatcttaagttaagattgtttcgattatctccgcctgtgggacgatgggacgaacctcaggatctgtaaaactgccaagtgcacaaagtgattttttaggtttaataagtttatttgacattttgtttcgatttcgcatttaaagtccatttactatatacacttgaccatacataattcacaatatatat

SEQ ID NO: 35810 - DNA, 2472 bp, DROSOPHILA
atgttgaccctgtattacgtgagtgccaccgtcctgcagtcctggcgcattcaaaaggcgtgctccaagatcgccgagcacctcgcgcagccctcgagcatcgccttctataccctccaatcgggcagcgatgacggattcgatcccgccctggccagctcggagttgtgctgcaatcggaacgcggccaaggtcacggacatcctgtggctgcacgccaaccagcggggttgctgcctgcgtccgctgcaaacgctacacatcacgccttggatcagctttccgccggcgcccagtctgcttcccttctcctatgccgccgacacgttaacgccggcgtccacgcccacggaggcggacgtcccgcgccaacaacgggtttcgctctctgcccaaggggaggagcggatgcagctgctccttgaggccgacatagagccactacagcggcccagctccgaggacacatcagcagtacggctgccacttttgcggattgagtcggtgcaacgggaaggggatccgcagccctttgagcttctggccaagcatctgaagcggcaatcccgcataagcgtcggtctggacaaggatggatggaagaagcacatggaggacttgcgtgccgtaggtgtgctggcgcaccaggccaccgagttcgagtaccagaggaatcgctctgagggaagaacgaaatcggatcccaccacacatgatcaacgcccgacttcggagcttttggccaaggctgtggccgtggtggagcccaccaacaaggcatatctgtctccggcaaggacgacagaagcctcgctcaaagccgaggccaagggaacgtcaacaaaaccttttccgactaaaagcgatgccaaacccgccactcttgccaagagcgagggcacgccagccacaagcaaagaggactccaagttaacgccaactaagggtgcattaaagacaagcgaactagagaaactagcggctgtccaggcagcgcagcagcagaagaaagaggcagtccaggtctctcccgtcaaggctgctttcttagctaaaccacctatgctaagtaaacatgatgagcctgataaggcatcagatcagccaacgaagcccaggaaatcctttgaggcggtaaagccgttaaattctcctccgtcatccagagctgctccctcgcgtcctgtgctgcaacgcaacaaggatagcctgcaggacgcaaaaccattgaatgttttggtctactcagacagcgccagtgcgcgggaatccacattggccactctgcagcagctgctggagcgcaatgtgtacacgatctatcctctgatgcctcagcaagcggctcaaaaatactggacggaacagactgcgttgctggtcgtctgcggatcggtggcacacggaattgggcagatattggtggactactttctgcagggcggcaaggtgttaagcctgtgctcggatatactgcactttgtactccccaactatcgcacagcggaggttcgagagcacgaattggttcagttctcctatgacaagtggcagcgggtcaagatgatgcaccacatcttttgctaccaaccgtcgccggtgaagaagcacttctccactgacagcgaggagtccaccaagtcgcactctcgcaaaccagctctagtatgtccaaggtccatggaactgaaggatctggccggtcacagccacaatttggatgtccatgtgctgggaaccgaggaaacctggaatacgcccagcttgatgttggccaaaagcctgcagagcggcggaaaggccgtcttctcccaacaaaacgagcgaactcgcctcgagatatttgcggatctcctgggaaagtacttggatgtgcaggtccgcggtggagacggtgtcgaccagccgcagcctggagttgtctacaagcacgcatatttcctaggtcggcacgaggccaagtttgagcttctggagaagctacgtctgcgctgcagcggatccgacaacgtgatagcaacgccgaacctgacgatgaagttctgtggcaaggacgataagcctccagtggccaacaacaatgtcctgcccatactcatacattcctgtccggatgacttctccaccgtggattacttcgataatcttaagacggaacacatcggacgactggtcatctatgcaccggtggtcagcagctccatgcatctcataaacaacctggagctcatccacggcctggctgtgctccccgtgcagcagacgtccggagtgggtcgcagaaataatcaatggcttagtccgccgggctgtgccatgttctcgctgcagctgcacctgaccatggacagcgctttgagctctcggctgcctctgttgcagcaccttgttggaacggcgattgttaattcgctccgcagtcatgaagagtacggggtgagtcaagactgtaaagttttaccatttagttga

SEQ ID NO: 35811 - protein, 823 aa, DROSOPHILA
MLTLYYVSATVLQSWRIQKACSKIAEHLAQPSSIAFYTLQSGSDDGFDPALASSELCCNRNAAKVTDILWLHANQRGCCLRPLQTLHITPWISFPPAPSLLPFSYAADTLTPASTPTEADVPRQQRVSLSAQGEERMQLLLEADIEPLQRPSSEDTSAVRLPLLRIESVQREGDPQPFELLAKHLKRQSRISVGLDKDGWKKHMEDLRAVGVLAHQATEFEYQRNRSEGRTKSDPTTHDQRPTSELLAKAVAVVEPTNKAYLSPARTTEASLKAEAKGTSTKPFPTKSDAKPATLAKSEGTPATSKEDSKLTPTKGALKTSELEKLAAVQAAQQQKKEAVQVSPVKAAFLAKPPMLSKHDEPDKASDQPTKPRKSFEAVKPLNSPPSSRAAPSRPVLQRNKDSLQDAKPLNVLVYSDSASARESTLATLQQLLERNVYTIYPLMPQQAAQKYWTEQTALLVVCGSVAHGIGQILVDYFLQGGKVLSLCSDILHFVLPNYRTAEVREHELVQFSYDKWQRVKMMHHIFCYQPSPVKKHFSTDSEESTKSHSRKPALVCPRSMELKDLAGHSHNLDVHVLGTEETWNTPSLMLAKSLQSGGKAVFSQQNERTRLEIFADLLGKYLDVQVRGGDGVDQPQPGVVYKHAYFLGRHEAKFELLEKLRLRCSGSDNVIATPNLTMKFCGKDDKPPVANNNVLPILIHSCPDDFSTVDYFDNLKTEHIGRLVIYAPVVSSSMHLINNLELIHGLAVLPVQQTSGVGRRNNQWLSPPGCAMFSLQLHLTMDSALSSRLPLLQHLVGTAIVNSLRSHEEYGVSQDCKVLPFS

SEQ ID NO: 35812 - DNA, 2533 bp, DROSOPHILA
gagtgggaggtgccgttgccctcaatccgcagctgacggaacaacaaaggcccgcgctgtgctgcagcttcttcttgcgcttctatccgcgactttttgggcgtcgcttggttctgttatctgctcctccgcttttcctccgctcgcatgttcctgcacaatatgcttatattattcgggctgcaagttgattacattacttgctaattgcttcaattttgtgcttctatttcgtttggcaatttattatcgatttttggtttagaaccccagcttctgtcccagttttatttcagaaacggatcttgggacgcggaggatctcaaacaccatcgagatagggactcaccatgcactccgcaaatgtaacaagtgaattacgcgttcgatttaattttcgctaagaacacgaagcgaaaaatggttgacaaatcaaacagctgacgagtagaattcgcggtactgcccacttgctggttctgcactcgccgagtggcagcctcgcacatgagagcgctgagcggaaatatttaaaatttaggcgtactaaaatatcaagataaggtttgtggaagtctatattgtataaattagctaaataacagtgcaaaaatctttgtttctaactcttaaaggttagaaaaacgtgtgaaagtagaactaaagacaaggggagccaatttatggacttcttattctgtgaaaaactaattggcttactaaaataagaaaaattctaagctcgatataaatatgtagtccattttaataatgtttgttatttgatactaaagaaaaggcatttctgggcgtcatttataggtttttttaaacgaggtgggatcatacgtcagataattatgaaattgacgtttcagatagatcaacaataatttctcgcatatcttcttcatcgagagtcagtgagtgctgtttcaataatgttttcaaatctactttattcttaacattgtatggattgtgtgcgcgccataagtatctagctaagcagggcactccttcgcagctttgtgatcgaatccagcgcttctcctagctgccgctgcagattagtgctctcggcgaccagctctatgcagtccttgaacttgttaacagcattgcgcaagctcatcggtggcagtaccctggaaaaaggagtaagtgagttatcacattgacccacatacacacaggctttatcagtgctcacgagaaccaatgcaggggctccacgaagcccttggacttgtcaaccgcctgtcgctcgatgcagacgccatccgtggagtccacgacccggcagagggcgttaaactcggcactgttctccgtgggaatctgggccgtggacacgcactggctgcctccgtgctgaaatctagtgcgggccaggagaatcgccccactggcgttacatcgctccaaatttatccgacactgggtgtgctcctcaacgaggtggaacatgtccaggtacaagtcatccagtagctggcccgcggcctccttttcgcttctttgaatgctcattgcgggctgaggaataactttatttatatattattattatttcggtctgacggagatttttcaatcatatgatcgcaccaacaaccctgacttatcgctgctatgcgccgagttggcactaccgtcgataacaaatgttatcgccagccctattctgatttgcaaactaacaaccgactgatttgaatcaaaacgaaaagaaacggctgaaaaaagtttggttttgtcgcgtgcatacgagttttacgcaatgaattgtaattactgccgcaacaaacacggtcatgcccaattaacaagtaaacggtcaagctgcacactctcggggaatccgactaacgaaaagggcaaacagctgttgttgttttcttgcgcattagtttttggagaggggtgaggtgaaaggggctggcttcgcagtttgttttacgatgctgttgcgagattagagaaagtttataaaaagccctgccattagcattcagcagcattagcaatcgggaagcagtcaagttgaaaccacgtcgggattaacgccaccagactaacaacgagtggatgccccaagtgcaaacagttccaaagtcaactcaaatatacccaaatcccaggagattgcatcggatcgggtgataatgcccgatagttgtacggcggacctacgaagtcgccgccgcgaaaatccaatcgaccgcaacggcaatattggcggcacaggcaaggagcaggtgctcgtcagctagccaatagtgtttttgacgcctggcttgttaaatccatcgcgtgtgcatatggcatcggcatcctatacgatatagccgctcactataccatatatatatgtgcaccacacacatccatacctatctggccatacgtaaccgcgtttgatgacaaacattgacgaaaagcgtggccaagtgtgcactgaaagaaaagcgaatgctatgattccttctacgaaccctataaaaatatttatcaacattctagttttagt

SEQ ID NO: 35813 - DNA, 468 bp, DROSOPHILA
atgagcattcaaagaagcgaaaaggaggccgcgggccagctactggatgacttgtacctggacatgttccacctcgttgaggagcacacccagtgtcggataaatttggagcgatgtaacgccagtggggcgattctcctggcccgcactagatttcagcacggaggcagccagtgcgtgtccacggcccagattcccacggagaacagtgccgagtttaacgccctctgccgggtcgtggactccacggatggcgtctgcatcgagcgacaggcggttgacaagtccaagggcttcgtggagcccctgcattggttctcggtactgccaccgatgagcttgcgcaatgctgttaacaagttcaaggactgcatagagctggtcgccgagagcactaatctgcagcggcagctaggagaagcgctggattcgatcacaaagctgcgaaggagtgccctgcttagctag

SEQ ID NO: 35814 - protein, 155 aa, DROSOPHILA
MSIQRSEKEAAGQLLDDLYLDMFHLVEEHTQCRINLERCNASGAILLARTRFQHGGSQCVSTAQIPTENSAEFNALCRVVDSTDGVCIERQAVDKSKGFVEPLHWFSVLPPMSLRNAVNKFKDCIELVAESTNLQRQLGEALDSITKLRRSALLS

SEQ ID NO: 35815 - DNA, 2258 bp, DROSOPHILA
ctttgtgcgccgctcaggcctcccacccattttggtcctcctcctcgcccgatagcacgaatcgtaaaaggtatgtctgctgctcctctcctttgccgtcatcctcctctgtggaaaattgcacgaaatgcacttgatagcggggatgttgccaggtgatgggggcttccatcagcaggcctgtgaataaagagcaaaaccgaaagaaaaatgagtcgaggacggcttgttaaccatttaagcgacgcaccagaccgtggccagtgcacagtgctcaacagctccgttgtctcaattaaccaaagctctatatgaatggcagttatgggcgggacagtggggttaggcaggagcggccttatcagcccacggggtgcagaaaacggctttcagcttgtatatgcatgtatgccattgggggcggcaaatggggtagactaattgaatttggcaaaagtggggtgtgtgttactcgcagctcaataggaagctcaagcgctgggatgtgggttaagcccctaataaatggaactcgtctttcaatggacaactgaaagtttgcaactgaaaatggataacatattgaattccctacagcttacatatatttgtgatttattaatcaaaaagaatatgtggtatatatgccattggactctctttgttcgtttcacttgagccaatatggcaaacaaccaacatttgagcattgactctcgagttctataatccatgaaggtgctaaatgtccgaaaggttcttggatggcgtccattgaatcacgtcgtgatttgcacattaagaggaccgcaaagcggggcgtcccaccaaacagatgactcaactaagaaaaagagctctgcttacagtgagccttctttaagaagaacctttgctacatgtagaagttaagtcaggcaactatggagttgtatagggaaggcattctgcctgagaaaatgctatcctgcagtggcgaccaatcggctggctggttaagtcaactcacatgtagcgagtgtatcgagttggtctcgtagccgcctttgctctgcatctgggtggagatcgcgttgaggcggttggccgacagctccacgtccgcggatccgatgtggcccgtgtggacgaagttggtgggattgccgatcatggaccggtcgatgcgcaggcgttggtgtgggcggcgggagggcgagcgctgctgctggaagcagcacgaaaaccactgcagccagatctcgccggtgctggccatcttccccttgctcctggctcgctggctggcgctggacggggactcagtcttctggtattgcgggcgatcaatcgtgaggcagctgctccccgacaggttggctgtgcacgtagagttgtgtagcgtgggctatgcacctcggctcctaaaacgatcaaatggtaattgagcataagatgtataacttcatttgcaaaccaaagagacatgagatgatagtgcacctagtcgtatcagtggatatggaccaaaaaataagccatacaactgttgtattatagtaataaatattgcactactcccaaaaccaattgggaataggaatatgtgtattcagttccagcccagaagcgcagctatggacccagaaccatttgcgttgctccagaaaaccagtggcgtacagagatatgcgattcattctgctggcatgctcctccgactggtgtgggaggactatccccatctgcatgctgcttgtctgctctacttgctgccccacttgttacctggcttttcactcggctacacaatacagagacacagctacacactccgatggaaatacagattcgaatacggatacggatacagacacagaatcatattcaggtgcggccacctttgcaaactcgcagaacagaaacaaaaccacagaattataaggcccgaggcgttgcccgggaagtcgcggagttgcgaaagaaatacagcttagaagctacaaaaaatcaacaattaattggcacttttgtgtaattaagattgagagaaagacacacaaaagacactgatgaaagaagcggcaagaagacggaagacgggatttcgaagctatgcatcactcacgatcttcgtggtctgctagctcaactagttctgattctggggaatagcctgtttgtttctgcgactgggtacgtttcaattgaacagctatccccaattcaactaaacaaatacccatagttatatggccgcgaagtatccatgtctcagc

SEQ ID NO: 35816 - DNA, 258 bp, DROSOPHILA
atggccagcaccggcgagatctggctgcagtggttttcgtgctgcttccagcagcagcgctcgccctcccgccgcccacaccaacgcctgcgcatcgaccggtccatgatcggcaatcccaccaacttcgtccacacgggccacatcggatccgcggacgtggagctgtcggccaaccgcctcaacgcgatctccacccagatgcagagcaaaggcggctacgagaccaactcgatacactcgctacatgtgagttga

SEQ ID NO: 35817 - protein, 85 aa, DROSOPHILA
MASTGEIWLQWFSCCFQQQRSPSRRPHQRLRIDRSMIGNPTNFVHTGHIGSADVELSANRLNAISTQMQSKGGYETNSIHSLHVS

SEQ ID NO: 35818 - DNA, 2834 bp, DROSOPHILA
ttttctccatcccattctaggcatgatcccacacaagaccaagcgtggccaggccgccctcgcccgtctacgtgtgttcgacggcatcccatcgccctacgacaagcgtcgccgcgtcgtcgtgcccatcgctatgcgtgtgctgaccctgcgctccgaccgcaagtactgccaggtgggtcgcctgtcgcacgaggtcggctggcactaccaggacgtgatcaagagcctggagcgcaagcgcaaggccaagctccgtgtcaccctcaagcacaaccgcgagctgaagaagctgacggtcaaggcgcgcgagaacatcgcgaaggccgccgagcccttcaacaaaatcatcaaatcctacggctacgaggtttaaggacaacaacaagggcagaattacatacgttcagatgcgtagaagttttttaaaagagaataaaacaacatctagtttaaaaaacaaattcgtctttgagggtctcctatttgtttgcacacagtagtgattagccatcgtggatggactttttcttattgcagttcaaatgacttcaccttgtcctattcttttatgttttgaatcttgatatgcttatcagattctagtataccctacaatttaatgttattacgtttgcaaacaggaatttgatctttattagggaaaattgtagcgataaaatacaactacatatctaaagtagctttcgtaatatcagcgagttggaacactgatacctatgttttagctgtctttccagatcattcgaaagatttagtatgtcatcatagctgggctctttcatattttcaaatgatttgaagaattccttttcggattccgctgtttccttgctaatgctgtttttagctttgctcaaaccgaccatgatttcattgtggatagcttgtattccttcgaatactttaagcattttaagcgtgtttaccatgacgacattatccttgacgatctcctcgtaggaagtcgcgtttcgaactattgcgttcgcttgcgttgggtccatttccatgtacttgcggtccgaggatgagttgcgctgcctttcaatttcctctcgaagctcgctggcgacgtgcttctccgcgttggacagaactccatgttagcgccccagagaagcgtgaagagtagcattctaaatgcctcgaagaaacccagaaattggcacaggacctccttgtccgcacccggcaagttggtgatcggcggcagcggtgtggtcgttatccaatacccactgttccagtaggtcggtggagaggtctctacggactcatcggaatcatctggctttgcctcgttcaaagtgggagcccctgaatccgctggggcgccacaggtgtagctctgaaataaaaaaaatgtttcaggatattaccaaaaaagctacagctgcaattaaaagcgaatgcatttcgctcagtggaaagtctcactgtgctgctcgttgttctggccttcgtttttataggaaaatatgcagtgaaaaacgacttcatatcagaatgcaaccatatccacagttctaaaatttgaaaaacgggaaagtttagataatggaaaaaaccatggcatctcattattgtacttattgtatatctcaaataaaacacaaagctcttaaaagaaaggagaaagtcttgatatcttaataaactattgcgggtttatgcgggttatgttatttacgaagataagagtatcgttgagtttattaggaaaacagttgtaataagggttcggaaaactttttaaattttattattattattattattaaatttaaaggtaggcacaaaccaatttcatatttcaatcttaatttcaatacgtgaatattaaatacttaagctgttaatacataccgtatcattttaaatgaaaatttgatttttaaacaaaactataaaataaatatgcagtgtcgatcccagtgactaatcaaattcctccaaaatcgttttcaacttcttccaaacgatattctccaggagttttctttcggagttaacccaacataggaccacattgtattcgatgtggcaatgcccccgaagtgaagatccgttcagtcgtgtcgttcggctgaaagccctattttaattcaatcctttttcacttccccagaatgcccggcactgagttggagaaactgccaggatgcaggactcctgtataatccagaatatatgttgggttgaaacatgtttcgagtttttataatcagagcaagccaaagatcaattggaacataaaggtatatataatttatctgacagttcgtcgatttcttcagtaaaaagtagcagagtatttaaaaagattcaattacaatgaccaacgacagaaaagaagatgaaataaagcgcgacaagaggaaacgattggaggacctcttgaagcgcacttaccgccagaaggtgaggatcattcgcggactgactgtccgacaggcgagtgccacggatctcgacctgtgcgccaagtggttgaaggtgttcagacgggccaccaaggaggaacgctgggcgaaggattacctcgtggaactaattctgcgccagctgcagaacacaggccacttgtcgctgcccttcaccaacctggccaatcgcagactggatctgcgcctgctcctggacgaggaggggcgtcaacggctgcgtcacttcagttcgcggcaggtggtggccccgaagccgtcgagcaacagtctggccaggagggtgctcaagtcgtcttcgttcgagtggaggcgcagggtgcgtcacctggaccatctggaagaccagtatcggcgcgaggagca

SEQ ID NO: 35819 - DNA, 381 bp, DROSOPHILA
atgaaattgagctacacctgtggcgccccagcggattcaggggctcccactttgaacgaggcaaagccagatgattccgatgagtccgtagagacctctccaccgacctactggaacagtgggtattggataacgaccacaccgctgccgccgatcaccaacttgccgggtgcggacaaggaggtcctgtgccaatttctgggtttcttcgaggcatttagaatgctactcttcacgcttctctggggcgctaacatggagttctgtccaacgcggagaagcacgtcgccagcgagcttcgagaggaaattgaaaggcagcgcaactcatcctcggaccgcaagtacatggaaatggacccaacgcaagcgaacgcaatag

SEQ ID NO: 35820 - protein, 126 aa, DROSOPHILA
MKLSYTCGAPADSGAPTLNEAKPDDSDESVETSPPTYWNSGYWITTTPLPPITNLPGADKEVLCQFLGFFEAFRMLLFTLLWGANMEFCPTRRSTSPASFERKLKGSATHPRTASTWKWTQRKRTQ

SEQ ID NO: 35821 - DNA, 5224 bp, DROSOPHILA
aatcaataaattgttcatctcttagggccctaaaagcgcgcattagattcaggataagttcaacttattctgttttgttattcccttacttggctaaaaagtttccctttcttttttagttgactaagttaacgcccatctcatgagcacgcccacacactttcgaacctgggaagaactttgcttttattttaatttaatttgcgaaggaaaagtttccatttccaggcgataatgaacgccttcatttgttcaccctttctgaaggttgattgctcttgctttttgtgagatgcttgcaattggcgaaatgattatttattattattaattatttaataaattatacatttcgacattttttgcataacaacgttttaatttagaaattctcgcagtctctgactgacgtgtgtgtgtgtaagtgttgtatgtgtgttatatatttcaatttttcctatttgcaaaacctttgacaacagcaaacttgtggggaaacgagaaatgccgtcccaataggggtgaaaaacacaacgacctgctttctgccaactacagctaccactacaactacaacaacaccaaggcagccacaacaacgacacacccaacagtgggcacaacccaatttccgccccccggtcgacccattcccttcagagaaaccattcggctcagagtgtcgacactccctagttaccgggctttagttgttagcataaaaaagggccaagaacagagggaaaaacggcaaagcaaaaagaaggcaaatgagtaggaggcggaaatgcgccggggccggaaatggagcagccgccatgttggcaggcatgtcatgttgtcgttgtcctcgttgtcacgaatgcgcgtttcctccagccgctctcccgctctcattgcgcgccatccctttctacttgtgcatgcaagtatgtaaactgattaaaagaaattttatattgttaatctgcttcgcgtagtggaaacattctagtgaattatgaacaacgtgcagttatccccactttacccgtttctcaggcttattttacaacacaatcgggattacttttgctaaaaaataaattgttaaaaatcacaatgttgctaataagagtaaataataatcatatactttaaactattttatatgtatgctatcttcttcttagggtagtgtaaataagccaactaaatatttaagtatgacatcaatcttaaactcatgcaaatcctcccttgcagttgtctgtgggcatcgagaacggcatcctggagtcgtacaactcggactttgagctgcagttcagtcatcccctgaagcatatcgtcggcatgtgccgcatcatccacaagccgcaggcgaagagcatcggcaacggctttctgcagctgaagtctagtgctggccagacgtcgtcctcctcggcagtcgcatcctcgatgggcggcgcagccagcagctcgctgaccggaaacggactgcgccacacactgaccgcatccacgtcgtacggctccctctcctccagcgcggcgtgtgcttatcagctgcagttgcagcagtcggcggaggcatccgcggagcagccgcaaaacttcatggagttccagggacccatcaccgggctggtctacttgctgaaggatcccaaggatccgctgctgcacatctatctgttcgagtgcgaggccgtcgaggaggtaagtggaggcccccattccagatccctaattcccgctcccggccagaagacggatgggtaaagttgtagacagttttagtcgacattgtgtcagttgtctgtcctccggcatttgcttttctcacaatctcacaatctctgccattttgaggggaaagtgaactgaaccgagcatcacgaatgtgtgtgtgcggacagtttgtggccttttgaaacgctctcgtatggaaatgtttagaaaacttgccacacaatagtttccacataaaaactgcttggattatatggcagagaacgtgcaggaaatgccccaaaaggattttgcggctttagcagccaccataataaatttggatgcctaacaagcgactgcctcgggttgcacaaatgtggcataattctaattgtttcaggttaagttggttaagatgcacaaaggggttacctacaacgttgatcaagcaagcaaatccctgtcccgtaaataatatttaacttgtaacttaatttctatttaatttatatttgtaatacctttcaaactttaggtgtccagtaaccttttaaactaaatgaaatattttggcatttaaaccaatagaatttctcctttttcaactatttaactacttcgttttagttggtcctcaatctttttcgtctacgtgtctaataaaataagaggtttccttttctcagtactctccattctgaataaactaaccatccgttactgatacgttctaaacctcctttatatcctccttccaatcctccttcccaagtgcatttaccctaaagttatgagtgagttactgcataaagcacactaaattcacccaaagatagcttcattcatatggcctgctgcttcgagtctattgaaaatggaacttatcaagcatgagtttacccagatgtctgagcccagcacgccataaattgacttccgtttgcatttctaattaatccagttgggtcagtagagacccgaaagaagcattacattaaattaggactgcttcgcatgaccttctgcaacatacacgcaaaaggttaattccgaaccaacggaccaagagcaaatccacttctacgctttgccaagtggagcggtcacgcccccttcggtgccaaaacaatggggtaaaaaattaaatgccagttttggccaaaagtgctggtgctgcaagttagagcaaactcaatttgttgctcctaaagttaaatgaatgttagaaaatgtttaaagctttcggttggtgttcttgcctctctgctttaaatctcctcatggagcgtttccacttaatttcatcgtaattggtagagaatttttcgcgagagctgttgttggtttattgcatgtcaaaagcattttaagccatgcgttttggccgtgatgttgactgggcttgattgttgatagtgggttttgggttggtggtgtcagcgctggcgttgcccgggagttttattgagcctcagtttccagctggtttgattcacaatatctgggtcagtcgccttaaacccccaacaaatttcgatggcatgttaaagaacaatgcaggtcgacataaacaaagtattaatgtgattctaaagtagctaggttttcaactgcacactccttggaaatctaaaattttaatttgcctatacttcgatatatcgacatattcgcctatatactgcgatattctaattgtggcttatacatgtagacattcatattgtattgaacttaaactagtttattgaaatgccaatagctttatgttttcattgaatgtgaatcttcttcgtagctagatagttctgttaatcatatttatatgataaatatatatcatatttatatactctatatttatgagcagttgttgcccaacttaacttgtattaatacaccaactctccctttgagtgtaataagtgaaattcctacctctgtctaaactaagctactgcagaagatgaagtgaagcgaacgcagaaagcgaagctcccacataattggcccactgtggtcaacctgctggcaatcgtttcgccgattgagccactaattgaagccattaggcgcagagataaacgcgctttgctccgcaaaccctttagctttcaaagcaaaaaggaaacccattacgcaaatgctgaaaaaataacggctaattgcgaggcgccaagtgttggcagtgacatactttcgggggcagggacagtggcaaatgtggtggagatgtggtcctcggcggcacttaaaccacatcataagctcgtaaatatttaaagcctttgtccgctcccacctgcgcaatgtccttgtgcatcattagcaggtgggtcctttgctaaatgacgcatggcgcaaggctgccattcgcccgtttagacaccgagcttattgtccttgctcccacaggacggcaaaaggtccttcgagagccgaatgtcagtggcggtcgtggttctggtcgtgaccatcgacatgaacttctgcctcgccggctgaacagctcggctggattaacaagaaactaatcgagtgaggagctggcaacctttcaaacatgctttgagcatgccatcgtcatgttcatgctcatgaagagcaaacgattggagtgtccagatcgtctacataatgcactgaaaaggccttaaaagtacacaatcacataccattctgcaataaactttggcactagataacttttgaaggcgatattgaacgtttagagtatccgcctgccccgaaagccgctcttgccgacagataattggctttcacttttatttcctcgaatcgcatgcaaaatattgcctccttccgtttgcgaaggaaaacttggcaagcccgcccggtgaacaaattcaatttgtcgcacatcggggaaggaagaagccttttatgccatgattagattagagtccgtcccatccccatccccttcacttggtttttagtttgggccgccactcggttcttggtcctttgtggcagagccaaattgcttttgcattcacttgcctcactttctgtttattattctcatttatctataggtaaaatacatgtttcagttttagttattacaagtttcggtatgaaacgattatgagttgaatttgctaaagctaacgctcatagaataataacaaatattgataactaaaagtgaaaaacaagcaaatatttttcaaacatacatacatatatgcctgattttagtaatcaagctattcatattcatttattattcattaaccatttttttttaggtttttatctgcgttaatatcttgcggtaatgtttttcgttgagctcaaaaaaatgacttgcttggtgcttaaaaacatcgcaaataaaatcagaaataaattcttgcagcacttacgcgttgagttacagcctaaaagtaaaaaacaacaataaatctgagatcagtgcacacgcttaatttttaaaattttccaatatcaatagacacattccacattccttgtatta

SEQ ID NO: 35822 - DNA, 558 bp, DROSOPHILA
atgaacaacttgtctgtgggcatcgagaacggcatcctggagtcgtacaactcggactttgagctgcagttcagtcatcccctgaagcatatcgtcggcatgtgccgcatcatccacaagccgcaggcgaagagcatcggcaacggctttctgcagctgaagtctagtgctggccagacgtcgtcctcctcggcagtcgcatcctcgatgggcggcgcagccagcagctcgctgaccggaaacggactgcgccacacactgaccgcatccacgtcgtacggctccctctcctccagcgcggcgtgtgcttatcagctgcagttgcagcagtcggcggaggcatccgcggagcagccgcaaaacttcatggagttccagggacccatcaccgggctggtctacttgctgaaggatcccaaggatccgctgctgcacatctatctgttcgagtgcgaggccgtcgaggaggacggcaaaaggtccttcgagagccgaatgtcagtggcggtcgtggttctggtcgtgaccatcgacatgaacttctgcctcgccggctga

SEQ ID NO: 35823 - protein, 185 aa, DROSOPHILA
MNNLSVGIENGILESYNSDFELQFSHPLKHIVGMCRIIHKPQAKSIGNGFLQLKSSAGQTSSSSAVASSMGGAASSSLTGNGLRHTLTASTSYGSLSSSAACAYQLQLQQSAEASAEQPQNFMEFQGPITGLVYLLKDPKDPLLHIYLFECEAVEEDGKRSFESRMSVAVVVLVVTIDMNFCLAG

SEQ ID NO: 35824 - DNA, 3882 bp, DROSOPHILA
tatagattgcgacaacaaatgcaaatttaagtggctaattaaaaaggtagcccacatttttagtatggtaattgaggagtactaagtgcctaagaacaaagctcaagaggctcatggtaattaatagaattctatgtactaagtttaataattaagaaagtgtttttttttttctattcatctgaacaaatatgtccagttcttaaaattgtatttaatttggaaacaaattgtgcttatgtgcccttgaaaaggcctttacttgacaatcggatacttaaaactgaagaaaagcaattcatttataatgaatttctaatcttagccatgtgccgcttctcgtttattaatagctatgttcgctccaatattaccaaatttactggtcagcatgtcgtatgcgtaatacatttttttatcgttcatctttgcccttgcgtcttacacttaaaacccagatctagtgctagagcaattcaaaattggttagttcaattaccgttttaagttcctcggtagccaccatgtttcaataacttccaaaacagcactatttagacgattagccgattaacccgcaaatgcgaggttatatgttcgttttattagtgtttattttgctactgccaatttttcgatcgctccagttccctgaaaggcttaactatcgaaacgtgtggatggcgcgacgagcgtccgagctgaactgaatttctccaaggaaatcgcttagcagctaagcgaaatgagcgcccactgcgtcggcgacagcgacagaggctgatactagaagcctgatatcgcggtggcagaggcagtagcagcggcagagacagcggcagaatgacgcagcccgatataattccaaatacgattcatggcctgggcttccactgggtttcctttgggtttcctttgggtttcctatgggtttcctttgggtttcttatgaatttcctattggttgccactgggtttcgttaggtttcctttgggtttcctatgggttacctctgggcggtcgtgaatcaaagttaaccttgctcaggcgattgtatccggaggtattcgactgctggtcctggtagttctgaaacttctccacgagtttgctcaaaccctgttccagcgatggagagctgaccttatggaacacctttagcacatagtccaccagggcctgggccagatgctgttggttacatggggaaagggaaaatttgggaaaagtttgtacttatttaacatgataatcgctaaaatatgggtgtatattataaaataacatgctatgtatcatccacaatattgaatcctatagattataaaatgattaatagtaggcaatgagtaacattgttacttattattatttagatgtttattcagtttctgaaataccatatatattctattgagtttttacccctgcaaagggagaggcaaacctttggaataataatataagtttaaaaggtgataatcattcttaaaaacaatcaaaacgaattgtcgaattgtgtgattacaatcttaattttaaaatttaaagtgaatgtctcataaacaacatatacaatatattttttccttttctacagttgaattggaaaaacaaaatgtgtgagtagcagcttcctgtttttaaataaaatgaagtgacgcattgatggccgcatattcttgtcacacaatttgtccaggattttgttaaagtttgagtaaggaattgtatattgaatcacacttaccccaatattaacggagcccacatggcagcgattgtgggtatggttgttgtcgtttatcatcagctggaacactactggatccttctcctcgattagaagtccaaaaaagttaataaatcgcagggcatgcgagtgcagggctttcacgttgagctcagctccgttccggaacttcttaataccccaatagtaatcatttaggaagctgtcaagtaattttttcaggcatgatcttgtcaaaagaaaacccacctatagaatacgtcctgaccgtagcgccgctcaaagggtctgaccaagttccacgcctgtctgagggccaatctttcgctgagcgtgaaacccatttcgtccttgataggaccgaacttaatctttggtatacgctttgggtaggtaagacttgacaaggaaatgttcttagcaattacttcttcactcatcattaaatttagtttatttttaccaaatcgatagtaatcttaacaaaagagaaacaaatacgagcaatgaaaaaaacataaaaaatgtgtagattgattttaaatagctaagacaagattttccatagcatacttaaaggattttaaattatttcattaaacttgaccgccatatgaaaaacaagccattattcgacaagattcttagatcataaaaacattttactctaaaaaattcccccatgcagccaactttaaaggttgcaaaaagtacatgctagaggcttctaaccgcaaacaccaacggaaggtcaatgaaccctctgtttctggtcctgcaagaggaccacaccaaccctgtccaccagcccacatgtctggaaagccttcatttgcaaatattgtgagacgaagtcagcccgtcgcctgccgttattgtcccccatgcaagcgcttaccttgagtctaagctcgagcagctgttttctaggcttgacaaggatgatgtcactagttgaaacgctaatgcaactgctcctgcaaactcgcaccttccattctgctgctcaaaatgggtcctcttaaggtagcagcttggaatgccaatggggcctcctcgaagaccaatgagattctcgccttcatcgagctttacgaaatcgacgtcctcctgctgtcggaaacccatttcgttttcccggtccaccttcagagttcctgtctttacccaccacactgccaaccacccggatgacagcaaacgcggaggtgcagcgatccttatcagatccctcgtctcccaccaacccttctccaccctgtcggaaaatcacatccagacagcagttatccagctgacggcaagcaggggtacttttaacattgcctcgggtgtactgccctcctaatctcaggtggacggaggctgacgtcgagctgatcatcgctcaatttggcacaaagttccttgcggcaggtgactggaacgcagagcacagatggtggggaaactacaggatgcgcacgagaggcagggtgctgttctctgctctggcgggcgaaggtatcgacatcgctgcaactggagaagctacttgctatccctttcgagcaagtgccactccaagtgccatcgatttcgggatctccaaaggattcagacagcaagaaattaacgtgcaactactgtcatctgaccatctccccctgctgtttgagctggatgaagacgcccaggtattcaaaggtgtcacaaaaatgttgtcacctactgcaaatactgtggccttcaaggagcattgaggccacagtagatctcaatccccatagacacctgcaatagtctggaagcgtacgtacattacctcgcagccacaatcgcggaagcagcacagagggccacacctcccccacatcaagctcgtcacacgaccgcaaggagggagctgctctcccacaaaaggcgcctcaggagacggtacatcgcaacaggagatcctagcattaagcagctatactctagcaccactaacaaactgcagcgtttgctagccaggacacgacgagaaaatctggataccctgctggagggtactggcccagataacaacagcaatttttcattatggaggctcacaagaggtatcaagagacagccgttgtttcaatctcccgtccagagtcacagt

SEQ ID NO: 35825 - DNA, 567 bp, DROSOPHILA
atgggtttccgacagcaggaggacgtcgatttcgtaaagctcgatgaaggcgagaatctcattggtcttcgaggaggccccattggcattccaagctgctaccttaagaggacccattttgagcagcagaatggaagcctagaaaacagctgctcgagcttagactcaagcttcctaaatgattactattggggtattaagaagttccggaacggagctgagctcaacgtgaaagccctgcactcgcatgccctgcgatttattaacttttttggacttctaatcgaggagaaggatccagtagtgttccagctgatgataaacgacaacaaccatacccacaatcgctgccatgtgggctccgttaatattgggcatctggcccaggccctggtggactatgtgctaaaggtgttccataaggtcagctctccatcgctggaacagggtttgagcaaactcgtggagaagtttcagaactaccaggaccagcagtcgaatacctccggatacaatcgcctgagcaaggttaactttgattcacgaccgcccagaggtaacccatag

SEQ ID NO: 35826 - protein, 188 aa, DROSOPHILA
MGFRQQEDVDFVKLDEGENLIGLRGGPIGIPSCYLKRTHFEQQNGSLENSCSSLDSSFLNDYYWGIKKFRNGAELNVKALHSHALRFINFFGLLIEEKDPVVFQLMINDNNHTHNRCHVGSVNIGHLAQALVDYVLKVFHKVSSPSLEQGLSKLVEKFQNYQDQQSNTSGYNRLSKVNFDSRPPRGNP

SEQ ID NO: 35827 - DNA, 2735 bp, DROSOPHILA
ttgcgcgtctgctgcgatcggaaggcttcgcgggcacaccacacgaatcccagtaaattggtgtccagaacggctcgcatgtcgcggcattgttgggatccgtgatgagggaaccggtagtgatgccggcgttgttcaccaggacattaatgtaatgccttaacattattgtcattcgaaaaacaaaagcctgtccttttttaataatataaaatgtattaccttaaatgcacgtatgcatgtacgtacatatgtacatatgtatgtaataaatacttcgagctagctcaattaaaaatcaaattaaatattattactgttttggagctaagagagaaggagcttttatcaataaatatatagaatgacaagtcattctgatgtaaaaaattacgatctgagaataaaatgcaagaaaaaaaactgaaaaaaacatgacatttgaaatgtgcaaacaatatcgatgatataaaacaactgttaatataatgagtatcagtacatagcaagattagtatatgtatatattacaaagctacctcagggaatcggtcaccacgttatcattcaaacatgtgcatattctttctagaaataaactttttttttaatcataacgtgggtaaacgttttagaattctttctcgactatcagctactcagctagtaacagggcgagggagacattaaatttttttttattttattattttatttttttttgcacatctttgcatttttcgatctttggatccattaacaacacacagacaaagacggacagatcgacttctgctctacgattaacaggtctaaaattcgataagcgaagatatgtaattcatctaaaataatcctttttacggtaccttttgtggtacttcgtatcatagtaggcgccgaatgtatatttagtacaataataactattaataaataaatccaactgcatgcagtagctggagtaatcgtgacctggttaactcgacttgggtgcgattcagtgcttgcgaagtgtgtagcgatcgatcggccccgatggcataataccatccttggcctttatcagcgccggaaggcagatggtctcgtagtaggtggttagattgtacttagtgaacagcttgcgcatctgcttggcgaactctcctatctccatgctcctgacaatcgatcctggttctgggatgaggatcgacttgaacggatcctcctcctggatacgattgtgatagttgccataggtcgtccgatagtcaatgccgtccgagccgtcgagttggaccctatgctcgcgctggctgatgagcgactggtagtctttgggcgagtagtccgacatataggtggttttcagcaggtcctgcagatattccctgatgaggaagtagtcgacgggcgggttcacgaagaagagcttgtagatctcctcgttgcaccacttgttgcgcttgacgaactgcgcgtactcctcgcgccagtccatggatcgtggccatgtccgcgtcttcaactcctgcttctggaccttcaagttgtgcgcatagtggcccgagatcagggcgggatccgtttgcttccggaacgcggtgactgttcgcttcggcttgtcggcggtgtagtccttgtagaacgcttgcgaggtggtgatgtccttgcagcacctcggcagtatgtggtccagaaagatcaaatccatttcggccagcatggcgtcttgtgttttttcagccattgcggaaaatatatttttatgtttttttttgtgtttccgtaaaactcaattacagtgttagcctatgtaaaggtactgtgttctaagtatttttcaatcgtcagattcgaaaaggtatcagtgttgtttgttataacataaaatctcttgacgttggaagaactacttattttttaatataatataatatataaaattaattggtcttgtattataatcatactattattgccaaggcattaaattaacaatgagattcgcaaatctactatgaagtaaataaaattggataaagagttttttaagagattccctaacattaacaatatattaaaaaaatagtagataatacggaattcatattacggatattaacatacagttttgcggcgaattcgatcttaactcagcagtttataacattgcatacttttatgccctatggatttatgcccctattggatttattattatactccttacacataggtcatccgttgatgaccttaaaaatgttcttttaaagtgcaccaaaacttgcacgccatagctttaaagctgaaagactatattgacatatcatattgtatagttattctgatcaataaatcctctgactaaaaatgctaaacccccgaaagggtcttaaaaatgtatattttttaccgtttttgtaagcaattgccataatatttaaatgtctggctcagagaaagaaattgttggtttataataatattattactagacttttattttcattacgacttaacaagaataacatgtaacaattgagtttgacttactacactagccagtaaaatacttgcagagggatccttatcattatggaatcaagggcactatcaactaagggaccagctctctagttacgcttgccattgaggcgatcctggatctgctgcaaactaagcccctttgtctccatcaccacgaagaggacgaagaagaaggccaccaccatgcagacagcgaagag

SEQ ID NO: 35828 - DNA, 735 bp, DROSOPHILA
atggctgaaaaaacacaagacgccatgctggccgaaatggatttgatctttctggaccacatactgccgaggtgctgcaaggacatcaccacctcgcaagcgttctacaaggactacaccgccgacaagccgaagcgaacagtcaccgcgttccggaagcaaacggatcccgccctgatctcgggccactatgcgcacaacttgaaggtccagaagcaggagttgaagacgcggacatggccacgatccatggactggcgcgaggagtacgcgcagttcgtcaagcgcaacaagtggtgcaacgaggagatctacaagctcttcttcgtgaacccgcccgtcgactacttcctcatcagggaatatctgcaggacctgctgaaaaccacctatatgtcggactactcgcccaaagactaccagtcgctcatcagccagcgcgagcatagggtccaactcgacggctcggacggcattgactatcggacgacctatggcaactatcacaatcgtatccaggaggaggatccgttcaagtcgatcctcatcccagaaccaggatcgattgtcaggagcatggagataggagagttcgccaagcagatgcgcaagctgttcactaagtacaatctaaccacctactacgagaccatctgccttccggcgctgataaaggccaaggatggtattatgccatcggggccgatcgatcgctacacacttcgcaagcactga

SEQ ID NO: 35829 - protein, 244 aa, DROSOPHILA
MAEKTQDAMLAEMDLIFLDHILPRCCKDITTSQAFYKDYTADKPKRTVTAFRKQTDPALISGHYAHNLKVQKQELKTRTWPRSMDWREEYAQFVKRNKWCNEEIYKLFFVNPPVDYFLIREYLQDLLKTTYMSDYSPKDYQSLISQREHRVQLDGSDGIDYRTTYGNYHNRIQEEDPFKSILIPEPGSIVRSMEIGEFAKQMRKLFTKYNLTTYYETICLPALIKAKDGIMPSGPIDRYTLRKH

SEQ ID NO: 35830 - DNA, 6398 bp, DROSOPHILA
ctgtcgtaaaaatattacgtgggatgcgaggaacggactgctccatggcagaataataaaactgagcaatcagctgcagccctatccccctagatgtttattataatccgaattgcgtacttgtgccgcagattcgcggcacttcctctcaaatttgcatagcgacaagggtggcatgcgcttgagttcataattttcgactggcgctgtcgttgctctgcaaacaatgctacgggggtttcctccttttggccatctaattggtttgtgcccgtgccgagtccttggccgcagttttcccagagaattgcaccttgtgctccggggaatcggtttggccatggtcattaaagtgccagcgccatccaggtgaagccaaaatgaagaaggatgcaaaatgggcgctttaaagaacataaatttaaagccgtttaagacagcttatatcattcaggatgaaaaatccatctttagacgaaaatttcttactaaacggcactgcgcttccaagttttctatcagaattcccaatccaccgattcgagattaaggcatagtttatgcatcgtgtacaaatatttgtatacaaactcattacacgattttcagccacagcgggacacactccaacttttcaaataatttttcataaaaccagcagaaagtgttgcggcttgggtaataaatgccttcaggtgcttagagtgctgcgtgtgttgtctgccgcgtttttttggttgtttggttgtcagttggctgttgcttcgccgttgccgtgttgtttatgacaggattctgttgccacggggcaaacaaggagcacgatgccacccacatcgcacacttggcgcagttttgaaagttgctaccaaaactttttgcttgcgtgggaatttgttggcgtgggggcacatatttgccatgccttgtgtatgacataaaatttcaagttcaatcgtttctagccaaaaacgcaaaatgagtttactttgaataaatcatgagtcaagtgggaagtgaaaagtgggggagtacatcaccattaagctgtgttcaaacttacgggctggcaatgtggtttctaaaatttttacctggggcttaatgctaaaatctgagaaccaatttcggaagcttaatagacaatatatatatttaattataagccagggaactatttatggcttgttatatttaaacatgaaactgatattatttctatttaagtacattaatttgctttttttattttgagcacgatagtaacacaatatgcttgtctaagaataaattccgaaatagggagcttcaatttagcacccatacctgaggaaaaagcgaacgccagctgctttacttaaattgaaaatctgagctgacaattcgacgggcatttgcccatttctctggcctgtcagcaaaatgtttgcaatataaatacttgatatagacagagcaccatcggacaattgcagctgctcattatttcgcatttccccccctaaataacccaatcgacttcattcagttcacagttccattctaaattcgatctcccaatcgtgtcgccaacagatgcgcccgtctgcagcagcagctccatcaccgtgattggagcctccttggaggaggacgtgcccataccgtgccgcgtcaactcggacccgcccgaaatcgacttcgaatggaccttctccaccagcggtgagcacttcgaggtgccctcgggccactacgccacaatccaggaccccaccatgaccaccaccagcgatgtgaggcgcacggtcgtcgagtccaacgagacgcacttcgagagctacggtgagtccatacatttaacattattgctaagttgtaagaggtgattaaaattactgctaatacttaggcagaactttaatattgataacttgagaatgaaaaaattaatcattcgcacgagaggaattcgtgatttcgagacgaaagcgattttaatgtagatattttcaaacggaagcagtattgagtttaagattgtggaagaggtgggaaggctgaacaaatgttggagacaggcaaatgagagcagtttcaatctaagaacatttcgatctcgatctgaaatcagcaagggcataattctgattttgagcttaaaactcttaaatcgagatcgttgagaatgcgttttttctctgagcgtacacactccagtttcagccattacataatagttttgaacagccttagacggtaaggcatttgcatgtgcttgcgcttgagcgggctttagaaattagcatttcgcagaggcctaagtgcggcagaggtggcagacacctgtgtatctgaacaataggggcagtggctgtgggcttcagatacttttatcaatacactcgtatcatgcacatactcgcaccgcatggtcgcaaattggattatctcctgccggcccagttggcttgactgagctgcttgggcaagcagaacttatttcatttaacttggccaaaaagcttaatttaataaacgcccaaaccgaattgcaatttgcacctgtattctgtcccccatgtacttacagtggaaaccgtcagcgagctgatctacacgcccaaaggcgagcgagactacggaacattggcctgttacggccggaatgccattggaaaacagtcggatccgtgtgtgttccaagtggtgccagcaggtgagttccactgccttcctaacaaactttaaaattaataggaactattaaattaataacaaatcaattctaaagtttagctaccaacttcgatctaatataattaatgtagacatagctattgcatttaataaatttattaccaaaaacccatgcaataccactatttagtttacttcttgtcgctcagacaataaatcaggttttaaccaaatttaaattttagccaatttaaaccatttgcaatcatttaacaaacactaaagtgttgttgatggcaagatattgatacaaaatatgaaatccatatcgattaatgaaaaattaacacaaatacaacggcataacttgcggacagccaaatatgcatatatctatctatcaatttccttgtcaaatagttgtttaaaaggcgaattttaacttggcattaggccaggaagacgatccatttaccgtagttagtaccactgtatttttgaatcgcatttattccctgcaacataatacgtatgctgcgaatgttgtttggcattgattggtttcgcttactcgatctttgtagccaagccgggggcactgcgaaactgtacactacggccgtatgtggtgacctccgcctcgctgaactcatcgaatcagacgacaatgcatgccaatcagatactgcccacacaatacggcagacacgagtcgaattacccgcacatggagtacgtacgtgagcgccataacagcagtggcggcaataacaatggcactgccccggcagctggccggaacaatgtggccaataaaaatatgaggggcaggaccagtgccggccaggccaaatccaataataagcagctcactcagcagcaactacagcgtctcaagaagcggacatcattcacaccgtcccaaacactggccgccatcgagcggcagcgccagaggaagcagctgtcgcagcagcagcagcagttgcagcaacagcaccaccaagccactgcaaccaagtccggtggcgataacaaacctgatggatcgccggccaagtcgtcgaagcagcgaatgcggcgtgccagccgagacccccagatacaacagcaacagcagcaccaacagcagcagcaacatcagctgcatgcagcaacatcaataaccagcagccagcggaagcaggcagaatcaaatttatcaacgtcgcatctaggtaaaggcagtagcagcagcagcaggagccgcagaagcagcagcagcaacatcaacagcaagagtaacaatggcaaacaaccagcaaagtattttaataagcgacagaaaaacatgcacaaacagaagcaccagcaaaagctgaagcaactgaagggaacaacaaacgagcacaacagcaatataatccatcattatgcagcattgagttcgagtttgaggcgaaggaagcgactagcagcaaatgacatcttggcaactgtggcggcggcatccacatcggcatcattatcttccccacccgcatcctcggccgcatcattggcagctactgccacggcggcggtggaaatcgagcaggatgtttctgctgttgatgcccctgctgccgacagtggcagcaacaataagcgctctcgcaaatccctaaccatcctagacaaacagaagcagcagcaagagcagcaacagttgctgcctccgaatgctccgcaaataagcaaccagccggtagcagcaattagcggcaacaatgtcaaggaaacagcagcgacatcggcacacggtgcagttgcagcgggagtcaaagacaaggcgccgtcctccaaggaggactccactgacaatgacaacgacagcgatggtgacgaggacgacgacgatgatgacgatgatggagcagagattgatgctgaaacagagactaatgacgaggaagaggatgaagacgagggtggagaggcccacgatgacgacgcggacctggatgaagatgttgcccagctagccaccgacgccgattacttggccgacggtccgggcgatctgcaggagtacgaaactgtggaggaggtggatggccaggcgaaacatgtgcacatgctgtccctggaggagcagctggatctggagtcgctggaggacaacgtcgaggaggaggacgacggcgaggtcgatgatatgtacaatgttagcgatgatgactttgtggccagtgtggctctctccacatccgacaccacagccgccaccccgcttcaaaggacaacagaaggacctcacattagggagaaagccacccaaagccaaacccaaaccgactccgctaccgaatggcagcttccccatttcgactactcacgcatggagtatagtttcagcaacggcgtagtcacccagagtttgctgggtggtggggcggtaactggggctggacacgacggatttgcgggcggcggaaccatcaatttcgacaactacgacaacatcatctactccaccatggaactcgagtgcatgccaggatacgacggcggactgcagcagcagttcttcctggaggcctacgactccaagaccatgaagctcaggcttaacatgagcagcacctacatggacgtgcccgtcttccggatcgatctatcaggtgagtgtgtctaccttatcaactatccacctgatttgtttcaagtacttttaatgatgattaaagatgacatataagtgttaagtatgcaatcttaagtatgggttatagtaaggataaacttagcgtatcttagaacttataccatttgctcaaagtacaatagttaatagtccatgcctaggcggtatataaataaatacaaggttgcttttgattacaaagttatttatatcagcaggcttacaagatcaggctcagatcagataatataacttttttaattcctcttaatgtgtgtctcaaacaaaatctacgctagcataaattgtttaaatattacgctaaacgggcaactcaattgcttgacctttaatggttccggggaaatccaatatttccgcagattctcgctgccccggagcaatgttttattacacgatgcttatatattattatatttaaatgaggctggcttagaaatcgcgaggccagggtgttggtcgtacaatatttacactgctgtgcgaaagccgcaaactaaggacttgacttttatgcggccaacagcagcaaggaccaaggaacaaggagctggtagctgggagcaggaacacagtaacagcaacaaacactaaaacaaaaacaaatcaaagtaacaaactgagcaaaaagttgagttggcgaaattgcgcgttggcttcaagacaaggagaaaatcctgcggctcggcgaggaatagctacagtgaaagaaattctgtgaaaaatgggtttgaatttataaagtcactgtttttatggcaatattcgacttcaatgagttttcaaatacttgagaagttactaagctaaacctttaccattacttaccaatacttctgagtcctgatgaaggatatacagtatttgaatattgtccaggagctatatttccaagaaaggattgctcttgatagtgtaatcaacttttgctagtacacgctgaaactatgtttttaactagacaatatattcaacgaagtttactttcaatcccaaaaatgtaaggtatgttaaaaagatactttgagatact

SEQ ID NO: 35831 - DNA, 2526 bp, DROSOPHILA
atgagtcaagtgggaaatgcgcccgtctgcagcagcagctccatcaccgtgattggagcctccttggaggaggacgtgcccataccgtgccgcgtcaactcggacccgcccgaaatcgacttcgaatggaccttctccaccagcggtgagcacttcgaggtgccctcgggccactacgccacaatccaggaccccaccatgaccaccaccagcgatgtgaggcgcacggtcgtcgagtccaacgagacgcacttcgagagctacgtggaaaccgtcagcgagctgatctacacgcccaaaggcgagcgagactacggaacattggcctgttacggccggaatgccattggaaaacagtcggatccgtgtgtgttccaagtggtgccagcagccaagccgggggcactgcgaaactgtacactacggccgtatgtggtgacctccgcctcgctgaactcatcgaatcagacgacaatgcatgccaatcagatactgcccacacaatacggcagacacgagtcgaattacccgcacatggagtacgtacgtgagcgccataacagcagtggcggcaataacaatggcactgccccggcagctggccggaacaatgtggccaataaaaatatgaggggcaggaccagtgccggccaggccaaatccaataataagcagctcactcagcagcaactacagcgtctcaagaagcggacatcattcacaccgtcccaaacactggccgccatcgagcggcagcgccagaggaagcagctgtcgcagcagcagcagcagttgcagcaacagcaccaccaagccactgcaaccaagtccggtggcgataacaaacctgatggatcgccggccaagtcgtcgaagcagcgaatgcggcgtgccagccgagacccccagatacaacagcaacagcagcaccaacagcagcagcaacatcagctgcatgcagcaacatcaataaccagcagccagcggaagcaggcagaatcaaatttatcaacgtcgcatctaggtaaaggcagtagcagcagcagcaggagccgcagaagcagcagcagcaacatcaacagcaagagtaacaatggcaaacaaccagcaaagtattttaataagcgacagaaaaacatgcacaaacagaagcaccagcaaaagctgaagcaactgaagggaacaacaaacgagcacaacagcaatataatccatcattatgcagcattgagttcgagtttgaggcgaaggaagcgactagcagcaaatgacatcttggcaactgtggcggcggcatccacatcggcatcattatcttccccacccgcatcctcggccgcatcattggcagctactgccacggcggcggtggaaatcgagcaggatgtttctgctgttgatgcccctgctgccgacagtggcagcaacaataagcgctctcgcaaatccctaaccatcctagacaaacagaagcagcagcaagagcagcaacagttgctgcctccgaatgctccgcaaataagcaaccagccggtagcagcaattagcggcaacaatgtcaaggaaacagcagcgacatcggcacacggtgcagttgcagcgggagtcaaagacaaggcgccgtcctccaaggaggactccactgacaatgacaacgacagcgatggtgacgaggacgacgacgatgatgacgatgatggagcagagattgatgctgaaacagagactaatgacgaggaagaggatgaagacgagggtggagaggcccacgatgacgacgcggacctggatgaagatgttgcccagctagccaccgacgccgattacttggccgacggtccgggcgatctgcaggagtacgaaactgtggaggaggtggatggccaggcgaaacatgtgcacatgctgtccctggaggagcagctggatctggagtcgctggaggacaacgtcgaggaggaggacgacggcgaggtcgatgatatgtacaatgttagcgatgatgactttgtggccagtgtggctctctccacatccgacaccacagccgccaccccgcttcaaaggacaacagaaggacctcacattagggagaaagccacccaaagccaaacccaaaccgactccgctaccgaatggcagcttccccatttcgactactcacgcatggagtatagtttcagcaacggcgtagtcacccagagtttgctgggtggtggggcggtaactggggctggacacgacggatttgcgggcggcggaaccatcaatttcgacaactacgacaacatcatctactccaccatggaactcgagtgcatgccaggatacgacggcggactgcagcagcagttcttcctggaggcctacgactccaagaccatgaagctcaggcttaacatgagcagcacctacatggacgtgcccgtcttccggatcgatctatcaggtgagtgtgtctaccttatcaactatccacctgatttgtttcaagtacttttaatgatgattaaagatgacatataa

SEQ ID NO: 35832 - protein, 841 aa, DROSOPHILA
MSQVGNAPVCSSSSITVIGASLEEDVPIPCRVNSDPPEIDFEWTFSTSGEHFEVPSGHYATIQDPTMTTTSDVRRTVVESNETHFESYVETVSELIYTPKGERDYGTLACYGRNAIGKQSDPCVFQVVPAAKPGALRNCTLRPYVVTSASLNSSNQTTMHANQILPTQYGRHESNYPHMEYVRERHNSSGGNNNGTAPAAGRNNVANKNMRGRTSAGQAKSNNKQLTQQQLQRLKKRTSFTPSQTLAAIERQRQRKQLSQQQQQLQQQHHQATATKSGGDNKPDGSPAKSSKQRMRRASRDPQIQQQQQHQQQQQHQLHAATSITSSQRKQAESNLSTSHLGKGSSSSSRSRRSSSSNINSKSNNGKQPAKYFNKRQKNMHKQKHQQKLKQLKGTTNEHNSNIIHHYAALSSSLRRRKRLAANDILATVAAASTSASLSSPPASSAASLAATATAAVEIEQDVSAVDAPAADSGSNNKRSRKSLTILDKQKQQQEQQQLLPPNAPQISNQPVAAISGNNVKETAATSAHGAVAAGVKDKAPSSKEDSTDNDNDSDGDEDDDDDDDDGAEIDAETETNDEEEDEDEGGEAHDDDADLDEDVAQLATDADYLADGPGDLQEYETVEEVDGQAKHVHMLSLEEQLDLESLEDNVEEEDDGEVDDMYNVSDDDFVASVALSTSDTTAATPLQRTTEGPHIREKATQSQTQTDSATEWQLPHFDYSRMEYSFSNGVVTQSLLGGGAVTGAGHDGFAGGGTINFDNYDNIIYSTMELECMPGYDGGLQQQFFLEAYDSKTMKLRLNMSSTYMDVPVFRIDLSGECVYLINYPPDLFQVLLMMIKDDI

SEQ ID NO: 35833 - DNA, 4802 bp, DROSOPHILA
gtaggagtcaaaactaaattttccaattaactaaagccgcaattaacatatacattttgcaatagtattgcgtcattgattcggaaattcgcttttgattattatctaatattttgataaatcctcttacttggtgatacaattatgtgctctgccaaagccaccaaatatgccagtaaatatgtatgaaaatgtgccctttgtccgaactcccctcgcgttttattgtttttccgcatgtctccaaaactttcgagtctccccatttgtcccccaaaccaactaattctatattcacgcttatgcgtttcgtggggaaccctggcctttttctgtccatccatccgcccgtccatccatccatttatccatttatccatccatgccgggcatccagtggccgaactttgctagttaagctggctaagccttttttaaaagcctttggtacacactgctaaatgcgcattatcattaaaatgttcaaaagtttgcttcttttttcggtcataaattttcgaacgcggctctgtggtcacgccgcttccgttagaaaaccacctcgggaaaactctctctagacgggcgggttaataatgcatgagtggaaaagtttgctgccagcgaaaaacagttggcacgaaatttaaaattaatttatgcattaaacattaatttaaatttgaactgcgaggctatgactagagcacacccatattgttgctcattcactgtatgttcttcacttaccattacgttttccataatttcactttgtatatttcaagctaaatcacagaattcggtgcatttcgttttactttgtttctaatttcaaagttcttagggtaaacattcgcatatttgtttccaagctatgcctgagtcctgcaaatttccataaagttaaaaatataccatcaggcaaataaccgatttatgtttgactcgaataaacgtacaaattccatgcaaccattgctcttatttaaaatgtcacatgatgcaaaggactttagtcgaaataaagccaaatacaaataatcttggtgaaagtgttgcgtttttgaacgaaagaagcttgatttcagcctaatctcaactgtagattgcttgtaccttacccacaccatagaagtaaaccatactttataatccctgctccatcaacaggtcgaccggagccaactgtgacctggatgaacggaacacggaccctggaggcaggcagcggagtctcgatgggccgacatgtgaccgtgaaccggctagaggtggcccaaatctcacgctccgccctgaacaacacgtaccgctgccaagcgtccaacacgaagctggtggcacccgtggagcgcagcatccgcatcgagatgttacgtgagtggacgaacgagcagtcaatgtggtcggtcacgcctaatctctaaaccttaaacttccacagtcaaacccacgtcagtcaatttaaccaataagttgaaggtcttcgcctcgaacacgcagtacaatctcacctgtattgtggccggctctgttccggatacggaaatcaaatggacgcagaataatcggcccttcaaacgtggcttggtaagctcctccgcctccatatccctttctccgagcatctaacgcaatcttggccaggcgcaatgcccactcatgagttccttgcccgttggccagctggacacttctctaatcgattccaccacatctctctcatctagttgtcaaccagccagagcaatggcagagtcatctccactctgacattctatccacagccggaggacgacggcaccatgcttaagtgcgagggctccaacccacggctccagaactcggccatcgaggactcgctcatgatgaatgtcatctgtaagtgaaactccttatgaatgcacactttagtgatgaaagtcgatttagtttattttttggcgggcaagttatttttatccaataagttatgattatgaaaaactgatgcattcatagtttccacttagtttgcaaatttaaatagccatcttaaatatttgcggttaaattatcatagtcattagaatgattataaaaactacaggaaatatgaaagtatcatatatttgaatggtttttcctttttttcatatttaagacagaaatgaacgaagtgcattcttttcgtttcgtgttaatttcgaaaaagcgatttgagttttcataaatggacaggacacaaatcaaagttgcctgtgaaaatacaaataagtctaaattatatgacattatttacgcagcacgctcccaagaatgaagccgttcgcctacatgtcaatatttattccgctgacatttagcgtggccataaaaaacgtgccgcgaaatttgttgcctgttttgcttcgttgcgcatatttgcaaaatgtcataaattttactttatatgattatcaatttagagtcaacagcaatcgcgaccttctacttccttaggtttcttgggacggggtgcttaagctcctgcctcactaggggttttccttgggttagttgttttatgttgtcactttgttttgccgggttttccatcggataatcacaaatttattgaattttaaagccacgcatagatgcgcagcaatatgtgcgaaattcgggcataaatattgaatggccatcgcgtaagctgcaaaatgaaagttggagaaagttttcatccaaccctttgacccgctgacggtcaaatatgacgatgggaatatgaattaaaaaaaaaaacacacacaaatacacaaggaaaagcttgtttaaaggattagcgcagatgacttaagcttttaatggacccgcgcttttgatcggaaaatggagtatggggagaatgggtaaatgggggaccgtgattcgtgtttgccccaaagaaaaagcgtgggagctacctagaatcgactgctttacagtttccagtctggttaaccccttctcagccatttcctcgccaatgacactaacaatttgttgctttcccttcgcgaggctgtcactttccttggcgcggccaatcatgatgttgtaaaatcgccgggaggatgcgaaaacactaaataatttttatgatccatcattgatattggggcgttgctcgcggcggcggaacaattttaatttaaaaatttctgtcatttggatccggagtggcggcttaaagcttcgttccgacgctgcgttgttaacatttatgggccgtagattgatgaggacaacaacgccgcgttttattatgcaataatatttttcgatttatgtttaatacgagcccgtccccagcatagtaatttgaatgcataaaaagcgcgcagagcggcgaaatttgcacattagcgcaggcaattaaaatgccagatcaactattattaacatgtggcttcttgacgccttttcagatccgccgcaggtcaccttgtcgctgggctccacgctgcgtccggacgacatcaaggagggcgacgacgtctacttcgagtgccacatcaagtccaatcccaaggagcatcgcatcatgtggtcgcacgacgtgagtcctggccaagtgaaaatgtttagcttgcataaattaaccggttgatttgccattccgctctagggacaaccggtcacccagaatgtatcttggggcatcatcatctccacccgctccctggtcctccagcgagtgggacgcatccactccggtttctacgcctgctcggcggccaatgaccgcggggaaacccaatcggctccggtcaacttgaggattcgatgtaagtaacacagaccttcaaggaattttacacacatacaccgccatatatacattcagaagtgatggcgccattttcaaattactgctagtattgaaggaaagcctctcgtttgatagaataccctgtagtgccttaagcaaaaaatacgaactttattttgtggagtgaaaaatcaacagcaagtgttgagcttactcattatcttttgatgatttatttcattctaacacatagagcaaagtacaaaatatttatacttatttaaaacagaggtcggtgcagctttaaaaactttataaaaatcccattttgtattattaagcaaaaacaaaggaaaccgaaaatttgcacaaaaattatgctgacagttgatgtcagtggagcggagcattaaaaatacatatgcataaatttatgcgcaaattgacacaccgagagaaaaatgggcaagatgttgtcgaattcgcaaatcgatttcattccgataagtgggcgggggcacacccacatggtaaattgacaggcacaacaacaacaacagtggctatgcatttgacaaaatcgcacaatgtccttgctggaaagccctaaatcgaccccctccggccaccgaaagcacaggatggtaacaatgtccaaaactaaattatgctaaaatgacagaaaatattttgtgcaaaaagccgtaatgtggactatgcatcgcatatacatatgtacatccgtttacatcggccattcaccatatagataatatattttatatttaatttatatgggggtctttgtgcgtggctgcatttcgagtgtgtgtttcgtcaaacaaacgacacaatattgcaatttttggtcgacaaaaactaaatattcccatttcaatgcaaattcacacaattatatcgaaaaatagttccctcgaactgcatatattgtggtatatttattaaccccaaataagcttcctatatgttcaataatttttaacaaaagtattttatttaaaag

SEQ ID NO: 35834 - DNA, 852 bp, DROSOPHILA
atgatgcaaaggactttagtcgaaataaagccaaatacaaataatcttggtcgaccggagccaactgtgacctggatgaacggaacacggaccctggaggcaggcagcggagtctcgatgggccgacatgtgaccgtgaaccggctagaggtggcccaaatctcacgctccgccctgaacaacacgtaccgctgccaagcgtccaacacgaagctggtggcacccgtggagcgcagcatccgcatcgagatgttactcaaacccacgtcagtcaatttaaccaataagttgaaggtcttcgcctcgaacacgcagtacaatctcacctgtattgtggccggctctgttccggatacggaaatcaaatggacgcagaataatcggcccttcaaacgtggcttgttgtcaaccagccagagcaatggcagagtcatctccactctgacattctatccacagccggaggacgacggcaccatgcttaagtgcgagggctccaacccacggctccagaactcggccatcgaggactcgctcatgatgaatgtcatctatccgccgcaggtcaccttgtcgctgggctccacgctgcgtccggacgacatcaaggagggcgacgacgtctacttcgagtgccacatcaagtccaatcccaaggagcatcgcatcatgtggtcgcacgacggacaaccggtcacccagaatgtatcttggggcatcatcatctccacccgctccctggtcctccagcgagtgggacgcatccactccggtttctacgcctgctcggcggccaatgaccgcggggaaacccaatcggctccggtcaacttgaggattcgatgtaagtaa

SEQ ID NO: 35835 - protein, 283 aa, DROSOPHILA
MMQRTLVEIKPNTNNLGRPEPTVTWMNGTRTLEAGSGVSMGRHVTVNRLEVAQISRSALNNTYRCQASNTKLVAPVERSIRIEMLLKPTSVNLTNKLKVFASNTQYNLTCIVAGSVPDTEIKWTQNNRPFKRGLLSTSQSNGRVISTLTFYPQPEDDGTMLKCEGSNPRLQNSAIEDSLMMNVIYPPQVTLSLGSTLRPDDIKEGDDVYFECHIKSNPKEHRIMWSHDGQPVTQNVSWGIIISTRSLVLQRVGRIHSGFYACSAANDRGETQSAPVNLRIRCK

SEQ ID NO: 35836 - DNA, 4419 bp, DROSOPHILA
tgttaatcttctggcgccaccaaaagccaccgaagcagaggtaagcgttagttagtcgcctacaaataataagagtataaccaaaagtccttgctcctccgcagccacgcacgctctcgcgcaaattgtcgccacagccgccagtggtggacaagaaatcagccaaacagaagaaggggaagaagaagcaaaagccccaggaggcatcaccgctaaagagttccgatgaggagaaccacggccatcgtattcgaacaaatgctggctacgtgacggtggtcgatgagccgcccactaaagttcccaaaatcgagctgattaagacaagttcgggcatggttcgagttgagccgtgcacacccaaacagaagtatttccgcgagctgccgcccacaccgaaaatgcatgggttccgcgaggagccaggaccctccgggatgtcaaggaagcgggccaagcacgcagcaccaaaggtcgaacacaattccgccaaacaggcggcgctgcgcttcaaggagcagatctttgctcgcagatcttaggatacattacatttagagaaaaattagtggaaatgttaagtgtacacaatgcatacttcagtttttgtttcttttcattagcatttccccgattgaatttgattctattatttgttctattggttatttgttacgcaagcccttgctctttgccatatattattattttgttcaattgcacatcacttaaccacacttaacgctagcaagttggttgttgatccaatcaagatatgaaatcaattaagaaattttcgaacttgtccccttttttttttgagcatctgagaaacagaaaataaagcctacccatacaaatacaaaatgaaggaggaaactttttattacgggtccgaacattcggggacaattctctggaaaagtaggctggcggttgcctgtccgtcatgttgcacaaaacttttcatattttttcacatatggctcaccatttcgcaatgcgaacaatttgtaagtaaaatgctattctattctcaagatttagtatcctatttcgatttttgcttttagtcaatgcaaaaattggcgatgcagcctacatccaggatgaactgtcttcgtcgctatcctcttctgtggccagcaaattcaaagaattttcgaagcgcaaacgcatttcggacagtttctcggatctttcagaagaacttgagagaataggtttgcgacagatgaggaaacgcattaagttggagaaatcgttcgaaagaactcccaaaaagaaggtccagaccaagaagcatttaccaccggttcggaagaaggatagcgtgaaacgtcgccgcattattatagcgagccccagtgatgaagaacatgatggaaaagttcagaccaatgacgactcaagtgagaacaaaacagagaagcccaaaaaccaaagtaactgctcatccaatgccagtaaattgagcgaagcggcccaactgttaaacgtcagtgaggaaaaatcttccatctcggaaaccgagctggaaagatctcgccaagtcgctctcaacgaactgaacaaatcggagcggtttaacaagacagaaacgcaactcgatatcagcgtcatggaggtagactcctcggatcacgacgaggaggagaagacagagaaggttggagccaagaacaacagaagcctgtacgaaatcgtggattctgatgacgaggaagagcaagatcaagaccaaagtgatgcagctaaaccagctgaaagcgaaaaccattccgaaattaaaaaatctacatctttcatggaccaaatgtctggagccaaaggcaacaaaagcgtatacgaaataatggattcttatgaaactgaagaccctaaggagggctggtaaaaacgaggagtctgataaggacaaaccggccgaaaacgggaagtctgataaagacaaacaagccgaaaccgagatgtctgatgaagataaaccatctgaaatcaaaagcccttccacaatcaaaaaatccataatttcaactgcggatgaagaagctctgctcgccgaattggcctctagtgatctaagccatttggaaaaaatgtttaaccctctacagaaatcccgccgccagtccttacatgtccccagtcccgagctggcagccaagaatcccaaactgagacgccgtagtgaacgggttgaagttggcaatgacttctgcccctcgcagtcctttgttgacatggtggccgagaaaaagaggcagaaaaacaagcgcaagcgcctgtcgaaaagcctatcaggcgcaccagaggatcttgaggaaatggagattaagcacgagcgcaagcgccttaagagctcacatggtgcttccacggattcaatggaggaggacaacgaaaacgaaacaatgactgtcgccgaggaacatcacagcgacggggaagtctcgaatggtgaagttcctattgaagaaaagcccactacttcatctgagaaaccatctgcgtcggaattacctgaagaaggtaattcagcgccaccggcgctgaagaaggatgtaaagcgcctacaggcagcgcgccaggctgtgagtcatgctgttaatcttctggcgccaccaaaagccaccgaagcagaggtaagcgttagttagtcgcctacaaataataagagtataaccaaaagtccttgctcctccgcagccacgtacgctctcgcgcaaattgtcgccacagccgccagtggtggacaagaaatcagccaaacagaagaagaaggggaagaagaagcaaaagccccaggaggcatcaccgctaaagagttccgatgaggagaaccacggccatcgtattcgaacaaatgctggctacgtgacggtggtcgatgagccgcccactaaagttcccataatcgagctgattaagacaagttcgggcatggttcgagttgagccgtgcacacccaaacagaagtattttccgcgagctgccgcccacacccgaaaatgcatgggttccgcgaggagccaggaccctccgggatgtcaaggaagcgggccaagcacgcagcaccaaaggtcgaacacaattccgccaaacaggcggcgctgcgcttcaaggagcagatctttgctcgcagatcttaggatacattacatttagagaaaaattagtggaaatgttaagtgtacacaatgcatacttcagtttttgtttcttttcattagcatttccccgattgaatttgattctattatttgttctattggttatttgttacgcaagcccttgctctttgccatatattattattttgttcaattgcacatcacttaaccacacttaacgctagcaagttggttgttgatccaatcaagatatgaaatcaattaagaaattttcgaacttgtcccattttttttttgagcatctgagaaatagaaaataaagcctacccatacaaatacaaaatgaaggaggaaactttttattaggggtccgaacattcggggacaattctctggaaaagtaggctggcggttgcctgtccgtcatgttgcacaaaacttttcatattttttcacatatggctcaccatttcgcaatgcgaacaatttgtaagtaaaatgctattctattctcaagatttagtatcctatttcgatttttgcttttagtcaatgcaaaaattggcgatgcagcctacatccaggatgaactgtcttcgtcgctatcctcttctgtggccagcaaattcaaagaattttcgaagcgcaaacgcatttcggacagtttctcggatctttcagaagaacttgagagaataggtttgcgacagatgaggaaacgcattaagttggagaaatcgttcgaaagaacacccaaaaagaaggtccagaccaagaagcatttaccaccggttcggaagaaggatacatctggaaatcgtggctcatttggcttgcgacaaatgaggaagcgcgttaagttggaggacaccgacgagaagtcttacaaaagatctcccaaaatgaaggtcatatcaatgaagcagtcacctctgaagggaccggctccaatcatattgcgtaaaaagtttggaatctacgtagctagtgtttggactagtgctggctacgtcttggtgatccgggaaccgtctgcagttgaaacaaccaatagcagttcggtcagttggcttggggagcagtaattttaccacaatatgaatactgaatatttagtctgtattatatatatagtaaaattgttgttttatttatgagtcgaactaatgtcccgtcagttgactaaggacaacgccaagaaataaaaaatagttttaggagaaatagtttcacgactttattctttggatctcagcttaagactaaaaatcaaatgcaaattgga

SEQ ID NO: 35837 - DNA, 2261 bp, DROSOPHILA
atgcgaacaattttcaatgcaaaaattggcgatgcagcctacatccaggatgaactgtcttcgtcgctatcctcttctgtggccagcaaattcaaagaattttcgaagcgcaaacgcatttcggacagtttctcggatctttcagaagaacttgagagaataggtttgcgacagatgaggaaacgcattaagttggagaaatcgttcgaaagaactcccaaaaagaaggtccagaccaagaagcatttaccaccggttcggaagaaggatagcgtgaaacgtcgccgcattattatagcgagccccagtgatgaagaacatgatggaaaagttcagaccaatgacgactcaagtgagaacaaaacagagaagcccaaaaaccaaagtaactgctcatccaatgccagtaaattgagcgaagcggcccaactgttaaacgtcagtgaggaaaaatcttccatctcggaaaccgagctggaaagatctcgccaagtcgctctcaacgaactgaacaaatcggagcggtttaacaagacagaaacgcaactcgatatcagcgtcatggaggtagactcctcggatcacgacgaggaggagaagacagagaaggttggagccaagaacaacagaagcctgtacgaaatcgtggattctgatgacgaggaagagcaagatcaagaccaaagtgatgcagctaaaccagctgaaagcgaaaaccattccgaaattaaaaaatctacatctttcatggaccaaatgtctggagccaaaggcaacaaaagcaccctaaggagggctggtaaaaacgaggagtctgataaggacaaaccggccgaaaacgggaagtctgataaagacaaacaagccgaaaccgagatgtctgatgaagataaaccatctgaaatcaaaagcccttccacaatcaaaaaatccataatttcaactgcggatgaagaagctctgctcgccgaattggcctctagtgatctaagccatttggaaaaaatgtttaaccctctacagaaatcccgccgccagtccttacatgtccccagtcccgagctggcagccaagaatcccaaactgagacgccgtagtgaacgggttgaagttggcaatgacttctgcccctcgcagtcctttgttgacatggtggccgagaaaaagaggcagaaaaacaagcgcaagcgcctgtcgaaaagcctatcaggcgcaccagaggatcttgaggaaatggagattaagcacgagcgcaagcgccttaagagctcacatggtgcttccacggattcaatggaggaggacaacgaaaacgaaacaatgactgtcgccgaggaacatcacagcgacggggaagtctcgaatggtgaagttcctattgaagaaaagcccactacttcatctgagaaaccatctgcgtcggaattacctgaagaaggtaattcagcgccaccggcgctgaagaaggatgtaaagcgcctacaggcagcgcgccaggctgtgagtcatgctgttaatcttctggcgccaccaaaagccaccgaagcagagccacgtacgctctcgcgcaaattgtcgccacagccgccagtggtggacaagaaatcagccaaacagaagaagaaggggaagaagaagcaaaagccccaggaggcatcaccgctaaagagttccgatgaggagaaccacggccatcgtattcgaacaaatgctggctacgtgacggtggtcgatgagccgcccactaaagttcccataatcgagctgattaagacaagttcgggcatggttcgagttgagccgtgcacacccaaacagaagtattttccgcgagctgccgcccacacccgaaaatgcatgggttccgcgaggagccaggaccctccgggatgtcaaggaagcgggccaagcacgcagcaccaaaggtcgaacacaattccgccaaacaggcggcgctgcgcttcaaggagcagatctttgctcgcagatcttaggatacattacatttagagaaaaattagtggaaatgttaagtgtacacaatgcatacttcagtttttgtttcttttcattagcatttccccgattgaatttgattctattatttgttctattggttatttgttacgcaagcccttgctctttgccatatattattattttgttcaattgcacatcacttaaccacacttaacgctagcaagttggttgttgatccaatcaagatatgaaatcaattaagaaattttcgaacttgtccc

SEQ ID NO: 35838 - protein, 669 aa, DROSOPHILA
MRTIFNAKIGDAAYIQDELSSSLSSSVASKFKEFSKRKRISDSFSDLSEELERIGLRQMRKRIKLEKSFERTPKKKVQTKKHLPPVRKKDSVKRRRIIIASPSDEEHDGKVQTNDDSSENKTEKPKNQSNCSSNASKLSEAAQLLNVSEEKSSISETELERSRQVALNELNKSERFNKTETQLDISVMEVDSSDHDEEEKTEKVGAKNNRSLYEIVDSDDEEEQDQDQSDAAKPAESENHSEIKKSTSFMDQMSGAKGNKSTLRRAGKNEESDKDKPAENGKSDKDKQAETEMSDEDKPSEIKSPSTIKKSIISTADEEALLAELASSDLSHLEKMFNPLQKSRRQSLHVPSPELAAKNPKLRRRSERVEVGNDFCPSQSFVDMVAEKKRQKNKRKRLSKSLSGAPEDLEEMEIKHERKRLKSSHGASTDSMEEDNENETMTVAEEHHSDGEVSNGEVPIEEKPTTSSEKPSASELPEEGNSAPPALKKDVKRLQAARQAVSHAVNLLAPPKATEAEPRTLSRKLSPQPPVVDKKSAKQKKKGKKKQKPQEASPLKSSDEENHGHRIRTNAGYVTVVDEPPTKVPIIELIKTSSGMVRVEPCTPKQKYFPRAAAHTRKCMGSARSQDPPGCQGSGPSTQHQRSNTIPPNRRRCASRSRSLLADLRIHYI

SEQ ID NO: 35839 - DNA, 13055 bp, DROSOPHILA
cccagttgacttctgtttcgctttggaatttgtcacgtttcacgtgttttattgtatgccgctgacttttgttgttgctgctcgccttgagcttctgcgtcgttgttttctttagttattcgtagtatatatgcacataaattttctttttgttttttttttcggtttcatgttatattgtttgtagcccgagactgtaacggtaactctccagagttcgtacttgagaatcattggtgcacttaaagttaaccataaccatattggtatcggcttggcaaactaaatgcttataaatatatgtacatatgtatgtatataattcacacgcaactcatttatgaatatctgcaacaacaacaacgctgcttgtggttttgtaagtgccgtgagtttgcgagtacgtgttgtctagtcatcaagcccccaaatgtcgactgcacagtggagccaatcgggtattttgcgattttgccttagaatgcatttcaaacttataaaaacttccctttaaaagcaggtctcttgaaatataatcatattatggtatgtcggcatatacatttgtatgccagttgttacccttaaagtaggcaatagttacgtttaatggttgatacatgtaaattaacaaatttcataaacatttgatttttgaaaattgtatacttactttatattttagtgcctgatttgctgctaaacatatcccctgcctaaacaaaggcaatctgtcaaatttgccaatcatgtcgtaggaatcccctgggcttatctcccaggggaatttgtggtaataaaatttgagtttctgtcccactgtggcaatcacgttcgccgcacacgaaaagccttatctctattctctctcccaacaacacatgttgctctctcttctcctttggcgtgcacgtcattaatttggcgctctctcgtctcttttttggggtctcgtgccgccagcgagttttattcattcatttcgattctgtctcttgtcgcgaacagacgtttgggaaatagttcggtgcgggtgacgtgacagtgcaaaaattgaatacaaaaaaataaggcaagagggagagcaaataaaaaacagcaaaattagctggaggggcaacaacaaatttgatacatacctatatatacgtgctttaatagtgaaacacacgcacacgcatcacgttgctcgctcgcccgtacatatatttatatcggtgtgtgtgtgtatatagaggcggctggtaaaattccactgtgaaacgaaaggaagttattgttttctgtggctctattcatgtaccatatatattaacaaaacaaataacagtgtgtgcataaaattgataaaagctaaaaacgtgtaaacaaaaattaaacaaaaaaccgcgcagcgcaatcacgttttccgacactatttgcgtttcttctgttgttttttgtgtggataccgcgaacgaggaggaattgttccaacaagtgcaccttaattgaagctccagtaacagaagaaggagaagtacgaaagaaaaacaggaggaggagtaaacacgttatcgctatcgttatcgcacccaaacactagcaaacgcacacccagtgataagcgaaaaagagtaaacaggcggtacacacttatcagcatttttcactcgttccaacataaataaacaccccgcttcgtaatgcccttctaaaatttcgaatataaatccgggacgtgaaacgtgaaaaagtacccgaaagaaaaatatctcatctcagctttgaagagaaaagtaactcgccgcgcagtgaattcgccgcacagccgtcgactcgacaacctgtttgctcgcccataaattcgccccggcatttatctcacaattatttctgcactgacgtaaggaggagcacttccaccattccaccgcaactgcagcaaaccacgtcgacgcagcagcagacgcagcaggcgctccacaaaacgttcacactgcccaggagcggattcggtgcgtttccagtgcaagcagccggaggaggaggaggcggaggcgtgcggagcggttccgtctgtggatcgaggagcaggagccccattggcaccaccatggagccctattggaacgagacgaacggacatgccgcccatccggtcaagtatgagaggtaggtatactcagcacagatcgccagatcccgctgcaagtcgaaagcaaataaaatccaatccaatgactaaatcgaaccactcactttcacctgtgcgcgtttagcttaagcacgcagagaaaacttatcacaaaatgtgcaacaatccgaaagccctctccaattagttgaaaattgttaaagttttatccgtatctgaacgacaaattaaaccaaatgaatctttcttaaataaataacaatccgtaaatttttggataagcatattgctaatttagattcccaagacttgtgataccttttctctgtgaattatttaatggtttagtgtatctaagactcgcttctagtggttaagcctaagtctccgcctcctcttctataactcataatcgttatgtgcgtgcatgtcaggatcgggtgtggaccattcggatctgttttgggatgtgtgggccgcgtatttttagccgtcgagctagaaagcgttttgcatttgcaaaacaaacgcgaaaatcgggcgaagaaaacgtgggcagacactgtcgagaggctattcttggccgagatgggtgctttagttttgctttatttcatctttattttttcgtgtttgccagaaggcaaaacacaaaacaaaatccaacgcacgactcgcaaaacgtgatgtttcgttgattttttccctgtgagtctcccaatccccccaatctcccattccattgagtttgtatttttgaacttgaatttcgtttaaacgtgtccgagcggaatcagaaaaaagtgcgatttgcgttggtgtggccagagtggggattaataatccaagcgaagtggtgtggccagcgctgcaaatgagtaatataatcacggtgcttaggggttttacgcctgtctgctaaatgtcaacggccaaacgtggctataaatatcagttaacaacagcgtgggtctatgctccccaaccaactcctttgagtggccatctagtgcgtggagtagggtgctgttcacgtgctcgggtggcctttctagcttttgggtggcgcgttgggccgtgtccttttgaaggtcaacaagttttgtgtttcgctcaggtttctgttggttctgtggctgtgttttttgattgagctttatatttggctattttcggtgaccgccaccggtgctcctgggaacgttttcctctataaatacacaagggctaatcgaatgaatcgctcatcaaatattcaggtccccaatttgattggcctttggatatgttttcgtttcgtagtcgggttttttccagttcggtttttggtttcactacggttttggggggaaagctgctcatggcttgtgaacaaatatgattacgtatacgtcacgtgtgccgctcaattatgagtctagccggtttaattatcccaaaaaatatcattaatgaacggaactggttaaacataatggtgtatctttgcccacggcatcagcgctaaaaaaagtaatcaaaataaatattttaaattcggttgggccctgcgtccttatcatatggcacttggggtaaacacgcgtcttcgtcgcggctgaagtgtttataatttgcattacgcgctgccatcttaatcaacacccaagtcagtcataaaagcaaaaaatagcagagagaaaacacaaatagagataagcaaacacgcgataaaaagcgaaacgggcgtgacgcacaatcgctactctccaaaccgaaatgtatctatctatctataagcacatgtgtatctatatatgtatctataaagtgtccagagttgtcaagcgtcagtaagatctcgggtttgttgcacgacgagacagttgctaaacccccgcaaaataatcaaaatacacccccacaatcgcatttactactcagctgtctctcgttgttttcgatttcgggatcttgacaacgacgccatcgaattgaagacattgacccagtgattagtgatattaacagctaaccattcctatccaatggatgctccatatctggagtagcatgagatctctgaaaaagtgtgtttgtttgctggctacgtctgtgttgcagggacttcaaatggatttcctgcacaacatgaactcacagatgttcagcaagacaacacgtcaaaaaaatcaacaggagatacaagatagaagctgcgaaattaatctattaactaacaaaaactatcgaaagtgtagaaataagcaaatacaaaagaaagaattaattggctatattttttacctttattattgcgttgaaatatgtgaaagtaaaatacctatttattatttacttattaatggcaaaaatcccatatgaacacagttgtttttaatttattcactctttcgatcacgcttatcaccaaaaagaatatcaaacgcctgcagcacgctaaaaatagcagaacggagtgttataaattgtatggacagatatatatccgcctgcgtcgaaaatgctggcgatcctacccgatctcgatccgattcgattcgatccgcatcgatacatttcgttccgtcgccggacttatcgccaccatcatcgtccgttcggttcgccgtccattggcatttgtgaagcgggcacgtagtcgttcacgttccatgcaggctgacccctatagacccctcgaaagaaatccccacccctgtaaaacgccagtcctcaactcacgggaggcaaacgtgccgcagatattgtgaaattcgcatggtatatgtgcagtatgtggtggattttcgtgattaatgcactcgtctcgatgatttttttttgcgttgtgtccgctgactcatgaccattgcattttattgccgctaaacgatttaaatagatggatttgagtgtcttttgacccagttatggccagtgcggacattcatttcagctggggaatgcggatgggggaaagaaaattgttgaagatctgggatgcatgattagcggaggaattcggagcgagtgttgggacatttgtaaaattacttaaagaatttaagttagttcgttactttctattaatagttggggaaagcaaaattatagataacatttttcataaatgttaaagcttttaatggtctatgacgatgcatttctgatgcatcggttcagttaccaactgaactccataaggcacccattgctatactaaccaacgctggattcgcgcagaatacacaaacgacgatttcataaatcagctccgattgtgattcactttccatggaacaaagacggctctatctcatcaccagatggatttgcgaatgagccgcgatacgaaacttccatttgcacttttccagcgcttcttgaaaatccgttgaagaagcagcagggtatgcgtaataagcaaaaggcatccgcctccaagtggcctcgtatttgtatctacatatatgttttcgtacactgcatctacatgtatgtgtcgtatatgtatctttgcaagtcgttgttgtgtcggtgtatctgtttatactcgactcgcatcgaatttttattttcgcctagacagcacgccagagagcaatttgccagggattgttgccctcgattccatttcgattccatttacaaactcaatcccaaaaaccaagccccgaaactgttgccaagcaatccatccggcacgtgtgcacgtttgtgtgttggttggttgttgaatcaactgaaatgcgaaattcgaatttgttacgaatcgaattccgctagtgcagcaacttttttctggtctttgcactttggccaaaaacaattatatcacgtgcccgcccggtaggtcgcagttttttttttcaactgaatatttatgagcggtacgcggcatttctagtttcggatttagtttttagtttaagtttcagttccagcttgcagatctcacgtgattgtgtcgctcaccttaacagcagatgctccgctgcacttttagcgtaattggtgctaatctagccgtgtgtgtttgtaatataatatataatagaagcgcatacaccttatcagccgaccgacaagcccaaggtcgacgatcaggcgagagccagaccagaccggtccagccccgcccacttttgttaattagatgctaggacacactcttctatgtatttagcttgatttatttctctctcctcgagttcggcgtcatcgttctgccgtttgttttctcgtttcggttgttttccactctcgccctccgagatttcacaattcgaggcagcgcatttccactgcccaatgtcgatatggaaatttttgtgacacagatcagcggcggaaactgttggcattgaatgccacgattgtccaccgtaaacatgttagttgtgtaaatcaatacacaaggagaaatatcattaagaagttaatttttacgaaaagggtaatatttatgaggctgccttattcacaatatttcctagaaatatgttttatatgcggtccaaaatattatttcaatgtgacaattttatcaaaaacaagtcatacagcactttttcaagtgctaattctttaagtaataagacgttgattgaattattttattttccctctctatatttggacacgatgtaggcattgttatgctcttagcatcggcaaaagattcatgaatcacttgcgttcgaatgagaatgagtcaacattgaatgacatttgctgttgattaacgtaagattttgtgacgaagatatgactgtcccgtaactgattaacattattacagacttttgaggtgttgcagatcccaatctaatcagagtactattaatttggaaagacccattcgaagtaaagattaatcaaaaccgaaaagaacaagttgttttcggctttaatcagttagccctaatatttatggctaaacagagaccaacaaaggcataaaaacagaaaataaaatactagaaaactcgtcacgtgtagcatggcaatctaatctgcagggtttaattacccccgataaggacaggaaatggttaaacacaaacttgaatatcaatggacaagttcacagatatgagtattcgtatggtctcaaattcatttgaaaattctattatacgttactacgacacttggcacatgggctaattatcacagactcatgcgtacacacaaacgtgtcggtagctccccccctccatatagtaaattacgatccggatggggaatgctgtccatgccattggcaacccacgggtggatgatcggaggagctgtcgtcatggcagggtcgcggaatacttgtagatcccatcgtcagcctcgtattgcgatgccaattacttaatagtgcgacgacaaaaaccggggcacgaaaagtaaacaaacgtaagacattttggtgggccagcgccattcaaacggggggcacattgccaacttgttggggtcttcggcatgtctctcatgaatcaagcgagtgattctcactgacgttcccagtttggtgctctttggccaatgattaaaagtacgccaccgagtacacgccctgttcacgggatagtttgatatctacccgatggcgcagccccccaaaattaaacacgaatggtggcaaacactctggcaaactttgtcatcggtgtaaatttataaacgaccatgaacaattgaagattcatatagcagattcatactcaaagttgatggtaacgtttgcttcatgtcattcatctcgatcggatatatggaaatctgattatgaatcacacaaatcttatttcagctttaaaggaactaaaaattaattgatcgaattaaccaattatccaaccgaattctttacttcgttcagacagtggtaggcctgagtgcagtcaacctgcaatccaaggcgatgccacgcccagtcgaaatcactttatttgcattactcatacgcagtgtacgctcggtggcacgataattggccacggtttataaatcgaattcagtaaattgtgctaaacaccaagatgaaaacaagttgatggagctttatttttagggggggtggggcctcccgggcagacggataaacaagttctaggcgccagggactggtccgttctggtatctctcaccatatactatatggtatggctaattcggacttatgtactcgtagtatacacgggttgagtttgttgtggtcgcctgcttatcgcccagagccgtgacacttattattatttcgctctactttattttggttttctagcgctttctggtcgatgcttgtgatgtgtttgttttggttttgctttgagaaattggcattcaatgagtctgtgaaatgtagaattgtgtgggttttctctctcgcttttccctcgtggcgcttggcaacagttttatcgagatatttgtttctttacaaattatgttcaacttttcgcttggctttttattataatttttcttaattttttttggcacatggcaataaaaacgtgttggttcttaaattatctggcctgatgtatgtagtggacgttcgaaaacgtgtgtcgtttccttggggcatgtggcgggataaattccgaaaacgattttaaatgcaaatgagttttgagtaaaaatggttttatgatccacccacgatcctgacatcttgtccaattaaatgtgcgtgtgtaattgtgatagtgggatctcctgcctggactgaggatccattccggataccgtatcgtatgctaaccgtactttaaggcatttccacccgttttactacaacacaaaccaaacaaaacgctcgtttgattttagccaagcgaccacagcccaaaatccggctaactgatggagaactcattgaggcagacagatggatttggctgatccaaagcgatttcgagtcgaaccgacaagatttaatccactttctctttgttttcttgcagccttaatttattttgatgctgaattttaaatatatgaaaagaaaccacaaacgaacaataaaccatatttaaaacgcatttacctattaatcctagactaactagtctaagttactacacataagttaagctaagttatgcgtctaataaatgcattactaaaacaaataaaaaatattgaaaaactaccatctaaatacgaaaatatgaacaaaaaaaaaaacaatacaaaaccaaataatataaatcatatttgaacaagatttggacttacctgtgtttctttatccttcccacttctttttgcatatcgaaacgaattatagcgaagcagctgtctccagttttccttattgcacagaatctagtttaaatttttcaacatcagccacggcatacagcgaggacgatgctgaatatgccaccggaagacgtaataagacatcgagggtaaatattacagttttagagcgacccaaaactcgctatcatttctaaatcaattgcaaaaaaaaaaaatataccgaaatcgaaaatgaaaacgaattcgaaatcaatacgactgagacaagatcaaaggatcaaaagagcattagagcagcgcccggatgatgaccacgcccactagctatcacacactctcacccaccaccaactaccacccaccacacacacgtgcaatgaccctgagcaatgatgaccatgccgccatcgacgcagccgccacttttgacccttttttattgttagaaacaaagagcaacttaaaaaaactaatgaaagaataataaagtgaaaaaaaaaaatgagaaccgaaattagcgaaaataaaatgaaacaaaatagcaaaagaaaatcgtctctcagcagaacaatcattacttaggctaggggtcaaaaatgcccaccaactaccctgcaaaatgggttatcgaaaaagctgcgcttcaagccattattaaccagaccatctctacaacctctgcccacagcaagatccactttcccatcgaatcattgagaaacggagacgagatcgcatgaactcctgcctggcggacctgtcccgcctcatcccgccgcagtaccagcgcaaggggcgaggccgtatcgagaagacggagatcatcgagatggccatcaggcacctgaagcacctgcagagcgagtgccagcagaaggagagcgactaccggagtggctacatggactgtatgaaggaggcggccaagttcctctacgacgttcacatgcaggacttttgccaccgactattgggtcgcctgcaggagcacatcgatgagatgttcaaaagtgagtacatagccttataccgaaagaattattgaaagaaactcatggttatctctccacagcggactgctacaagtcgacgcgcagctgccacatgccggataatgtaagcgcctccagcggcagtccccatcaggcataccacccaccgctgtgccacctgcgtgacatgttggccacctccgcctcggatgtggagcacagtcaggaccataacgacgtcaaggatctgagtttccggaaccatctcaaccagcttcagaggagtcagcaggcggcggcagccgcagcagtagcggcagctgccgttgcagtcgccaatggcagttcgccggcttcgaatgccggtgtggattccaaggtcccgctgaccaatggtggcggcactggtggagcaccgccggcagctgataatgtgcccagtaattccacgggcagtggatcagctgccgcgtgtgctggcggaaacagcaacagcagcggcagtaacagcagcaatgcagccagttccaccatctgtccaccggccggaggtagctgtccagccaaggtcacaccactggcggcacaccagcagccccaccaggcaccagtgatcacttcgacggccccacatcatcatcaccaccatacggacagcagccaccacgacttcgagtcgtccagggagcccatccttcacaccgatacctctaacatgcactcgccaccgcccagggatctgctgctgcagcagcatccccacctggcccatagccaccacacccaggatagtctgatgtccgtgaggatgcgcaactattcggagtcctcgcacgagatcgagcacaacaacaactacaagtacaagaaccacatcaaggagcggtttgtccacgagctccacgacgaggagacgagcagcgagcattgcccggtcgcggcccacctccagagcgatcactcccacttgcaggccttgtcggagcactcaaaggacggcactgaacccgagatagcaccaattatggccaagaagcggaagttggccgaggcagcggccaatggagaaatacccctagaggttcacaccgagtccagcaacgcgggagcgagttccgccaaccggctggacaagccctcgccctcgttcaacttcagcgacatcaaggacatcaaggcggagctgcacaacggtaactccaactccagcccactgctggccaaactgagtgcggtggctgctgccggtggccagttgagcactccgagtagcacaaccgctccattgccgccgaggcacaccttcacggtgcccatattcgcacttcacggacagggcaactactacgtgcccctgaacgtggactataatgcactggtgcccttcctcaacggtatggatctgctcgagaagagttacaccagcatgcctgtagtgcaccccatcaacatcaacgtgaacttcatgcccagttcaccgtccgcatcgctcttggccgctgctgcagccgccgccgtggccgttggcaagcaacagcaacaacaggctgtggtggccgccggagcgggacttccgctgtccaccaactcggcggcggctcaggcagccgctgtggccgccgcagcggtggctaaggccaaactggagcaggccatgaaccagagctggtaaagcaaagcaatcgcaatgcaatgggtcgacagatggaacaacactacctcagtacttctgtgaataatcattaaatgattaatctcaaaacaaaaacactaagcgacatctgcgcccaagtgtacctacatacaaacagaaaaagttaatggaaatggaggagaagcaaacaaattcactgggggtgattcttaaatctctggcggattaaaatcatagttaggtcgtgtataatgttttacatttttgagcgttctcattgcaaacttttgtccacagagcatgagctatgtagctaaattccatgctgaacttgaaattcactgagtaaatatgttgaaaaactctagagattttagaagtacaccaatcttttacctttggattagtttgaagtttaaaccatagagacagcaaggagccgcctcaaaggctgggtacctaataataaaatgatttccaattgttaagcgaggtggatactagcaactagagtagctagttgttatacattttgaagaaaacttgaatgtctattatagtgcatgcattgaaaactacaaagaacatatatgtatgttgtgtgcaagccgatagaacgtatatgatgccaagagtcagtcccacgtaaaaaatctaatggattttaaaacaaaactaaatgtgaattaaatgtatttttagaggttaaacgttttttgcaatttaaataagtgttgtggtttcatataaggtagtcagatagccaagtgactcccgtcaaacaaacaaattaatctatatatacaaatcaaatatattgatagaaacatatatatatagtaaaccactagtcagcgaacttgtacgaacacgtaaaacaaaatgggagaaaaacaaatcaaaaacctattatattctatgtgtaaatattattagcaagcaaattgtcctttgtttaagtttgtattttagtgacaaattatgttaagttggttggttaacacgtgaaacaaaaaca

SEQ ID NO: 35840 - DNA, 3184 bp, DROSOPHILA
gcgaacagacgtttgggaaatagttcggtgcgggtgacgtgacagtgcaaaaattgaatacaaaaaaataaggcaagagggagagcaaataaaaaacagcaaaattagctggaggggcaacaacaaatttgatacatacctatatatacgtgctttaatagtgaaacacacgcacacgcatcacgttgctcgctcgcccgtacatatatttatatcggtgtgtgtgtgtatatagaggcggctggtaaaattccactgtgaaacgaaaggaagttattgttttctgtggctctattcatgtaccatatatattaacaaaacaaataacagtgtgtgcataaaattgataaaagctaaaaacgtgtaaacaaaaattaaacaaaaaaccgcgcagcgcaatcacgttttccgacactatttgcgtttcttctgttgttttttgtgtggataccgcgaacgaggaggaattgttccaacaagtgcaccttaattgaagctccagtaacagaagaaggagaagtacgaaagaaaaacaggaggaggagtaaacacgttatcgctatcgttatcgcacccaaacactagcaaacgcacacccagtgataagcgaaaaagagtaaacaggcggtacacacttatcagcatttttcactcgttccaacataaataaacaccccgcttcgtaatgcccttctaaaatttcgaatataaatccgggacgtgaaacgtgaaaaagtacccgaaagaaaaatatctcatctcagctttgaagagaaaagtaactcgccgcgcagtgaattcgccgcacagccgtcgactcgacaacctgtttgctcgcccataaattcgccccggcatttatctcacaattatttctgcactgacgtaaggaggagcacttccaccattccaccgcaactgcagcaaaccacgtcgacgcagcagcagacgcagcaggcgctccacaaaacgttcacactgcccaggagcggattcggtgcgtttccagtgcaagcagccggaggaggaggaggcggaggcgtgcggagcggttccgtctgtggatcgaggagcaggagccccattggcaccaccatggagccctattggaacgagacgaacggacatgccgcccatccggtcaagtatgagagctgtctccagttttccttattgcacagaatctagtttaaatttttcaacatcagccacggcatacagcgaggacgatgctgaatatgccaccggaagacgtaataagacatcgaggcaagatccactttcccatcgaatcattgagaaacggagacgagatcgcatgaactcctgcctggcggacctgtcccgcctcatcccgccgcagtaccagcgcaaggggcgaggccgtatcgagaagacggagatcatcgagatggccatcaggcacctgaagcacctgcagagcgagtgccagcagaaggagagcgactaccggagtggctacatggactgtatgaaggaggcggccaagttcctctacgacgttcacatgcaggacttttgccaccgactattgggtcgcctgcaggagcacatcgatgagatgttcaaaacggactgctacaagtcgacgcgcagctgccacatgccggataatgtaagcgcctccagcggcagtccccatcaggcataccacccaccgctgtgccacctgcgtgacatgttggccacctccgcctcggatgtggagcacagtcaggaccataacgacgtcaaggatctgagtttccggaaccatctcaaccagcttcagaggagtcagcaggcggcggcagccgcagcagtagcggcagctgccgttgcagtcgccaatggcagttcgccggcttcgaatgccggtgtggattccaaggtcccgctgaccaatggtggcggcactggtggagcaccgccggcagctgataatgtgcccagtaattccacgggcagtggatcagctgccgcgtgtgctggcggaaacagcaacagcagcggcagtaacagcagcaatgcagccagttccaccatctgtccaccggccggaggtagctgtccagccaaggtcacaccactggcggcacaccagcagccccaccaggcaccagtgatcacttcgacggccccacatcatcatcaccaccatacggacagcagccaccacgacttcgagtcgtccagggagcccatccttcacaccgatacctctaacatgcactcgccaccgcccagggatctgctgctgcagcagcatccccacctggcccatagccaccacacccaggatagtctgatgtccgtgaggatgcgcaactattcggagtcctcgcacgagatcgagcacaacaacaactacaagtacaagaaccacatcaaggagcggtttgtccacgagctccacgacgaggagacgagcagcgagcattgcccggtcgcggcccacctccagagcgatcactcccacttgcaggccttgtcggagcactcaaaggacggcactgaacccgagatagcaccaattatggccaagaagcggaagttggccgaggcagcggccaatggagaaatacccctagaggttcacaccgagtccagcaacgcgggagcgagttccgccaaccggctggacaagccctcgccctcgttcaacttcagcgacatcaaggacatcaaggcggagctgcacaacggtaactccaactccagcccactgctggccaaactgagtgcggtggctgctgccggtggccagttgagcactccgagtagcacaaccgctccattgccgccgaggcacaccttcacggtgcccatattcgcacttcacggacagggcaactactacgtgcccctgaacgtggactataatgcactggtgcccttcctcaacggtatggatctgctcgagaagagttacaccagcatgcctgtagtgcaccccatcaacatcaacgtgaacttcatgcccagttcaccgtccgcatcgctcttggccgctgctgcagccgccgccgtggccgttggcaagcaacagcaacaacaggctgtggtggccgccggagcgggacttccgctgtccaccaactcggcggcggctcaggcagccgctgtggccgccgcagcggtggctaaggccaaactggagcaggccatgaaccagagctggtaa

SEQ ID NO: 35841 - protein, 621 aa, DROSOPHILA
MNSCLADLSRLIPPQYQRKGRGRIEKTEIIEMAIRHLKHLQSECQQKESDYRSGYMDCMKEAAKFLYDVHMQDFCHRLLGRLQEHIDEMFKTDCYKSTRSCHMPDNVSASSGSPHQAYHPPLCHLRDMLATSASDVEHSQDHNDVKDLSFRNHLNQLQRSQQAAAAAAVAAAAVAVANGSSPASNAGVDSKVPLTNGGGTGGAPPAADNVPSNSTGSGSAAACAGGNSNSSGSNSSNAASSTICPPAGGSCPAKVTPLAAHQQPHQAPVITSTAPHHHHHHTDSSHHDFESSREPILHTDTSNMHSPPPRDLLLQQHPHLAHSHHTQDSLMSVRMRNYSESSHEIEHNNNYKYKNHIKERFVHELHDEETSSEHCPVAAHLQSDHSHLQALSEHSKDGTEPEIAPIMAKKRKLAEAAANGEIPLEVHTESSNAGASSANRLDKPSPSFNFSDIKDIKAELHNGNSNSSPLLAKLSAVAAAGGQLSTPSSTTAPLPPRHTFTVPIFALHGQGNYYVPLNVDYNALVPFLNGMDLLEKSYTSMPVVHPININVNFMPSSPSASLLAAAAAAAVAVGKQQQQQAVVAAGAGLPLSTNSAAAQAAAVAAAAVAKAKLEQAMNQSW

SEQ ID NO: 35842 - DNA, 3864 bp, DROSOPHILA
aacaggtttcattttcactcccgtcccggaaatcattgcgtcatgctgatattttgtattttaacacccctccgtcgccctctgactgccacgcccccttttttccggccacgtcatcctcaggctttgtgtttaggctgcaaaagtcgatttttgttggtttaggtcagtttagttagctggctttgacagctcaaagtcgaggtcaacttttgtatgcccatcatcagctgtctctgtgtgagtgtgagtgtgagcgagcgtgtgtgtgcgtgctcgagtgtccctgtgtgtgtgactgggtttcagtcggtgggtgtgtatgtccttacacaggatatatttatgggcccgcttgtcgagacgcttacactcgctgcgacgcgtccttgtcagttgccaaaaacataaaaaatcgattttattatagccgtcagtctggcccgtctatatagattttctgtcaccgctgatattgcctttgtctgggtatcgttgtccctgtgtgggtgtgtgttggtgacaggcttaaatttccggcggctctgctaaggtttttaaagatctaacagggtcaacgttgcgtatgcgttatgtgtaagttagctagggaaattataagcttaacatgaatttagataccttaacagatagtgaacgctatgtggcgactattagagtttgaatgtatcatacacttatgctaaacattggatttatttgtagaatgagtacacagaaataacagacgaaagacaaaatatagaattaagataggcattccaattatgacatcacaaaagcttatttccaagttttgcaatctttccaacgaaatcgagaccaaaacaaattgctgaaaaaaacataaacaaaattaatcaaatattcacccgctgagaaaaagagcgaactggaaagctttgcaaagctcactaaatgtgaattaattcaaaaagtttactaatcgaaagttgaaagaatctttttagtctgcaaaatgttgtcaacgcagtggaacgcaaataaacagatctctaggcagatctaccagctatgcaggggtctggcccaaaaggtaaggaaaatatattttaaatatatatttatatgtgtatgtagcataaatcaataggccacagcagtgaacttggaagaggccaaaccttatgctgatattccgggacccagtaaattgcaattgatcagagcttttctgccgggcggtaagtgaaggaaaagctttccagtattctctcattcgagaattgttgatcttttgttgaaatcctctcttaaggtctctataagaatttgccggtccacgaaatgtttctcgatatgaaccgacaatatggaagtatctttcggatgcccagtgtggcaggaaccgatttggtgctaacgatgaatcctcaggactacgaagtaatctttcgaaacgagggtcagtatccttatagaaggagttttgaggtaatggactactttaaaagggttcaccggcgggaagtattcgatggctatgatgggttgacttcggggtaagtaaactagatttgaggagtaatatgacatttataaacttttagaaatggacctgcttggggcaaaatgcgcactgctgtcaatcccattttgttgcaaccacgtaacgccaagctttatatgacgaatttggtacaagtaagcgatgagtttctggagcggtaagcaatgttagaattttcactaaaatctaaaagaacttctttaattaaatttaagcattcgcattattcgagatcctgttacgcaagagatgccagatgactttgccgtggacattcggcatttggtgatcgaatcgatttgctctgttgccctgaacacacatcttggcttattgggagaacagcggaataacaaggatattcaaaagctcgtcttggctctgcaagatgtagttgagctgggctttcagctggacattatgcccgcattttggaaatatttgccaatgcctaatttcaagaagctcatgcgttcattggatacaattacggacttttgctatttccacattgggaacgctttaaaacggatcgaggaggacgccaaggctggaacactgaatgagattggtttggaaactagcctgctggagaagctggcccgcttcgatcgccaaacagcagtgattatagccatggatttgctatttgcaggagcggatcctgtaagtttacaattgaatcacttcaaaattattaaagttcattctatttcattggcagactcttgtaaccctaggaggaatcttattcagcctgtccaagagtcctgacaagcaggctcgacttctggaggagatcaggggaatattacccaacaaggactcatcgctgaccatagaaaatatgagaaatctgccctatctaagggcctgcatcaaggagggcattcgcatgtatcccattggcccgggaacccttcgccgaatgccccacgatgtggtgctcagtggatatagagttgtggccggaacggatgttggcattgcggccaactaccagatggccaatatggagcagtttgtgcccaaggttcgagaatttatccctgagaggtggctgcgcgatgaatccaactcccatttggtgggtgaaactgccactccttttatgtatcttccctttggttttggaccaagatcttgcgcaggcaagaggattgtggatatgatgctggagatcgccatttcgcggttggtaagaaactttaagatcgggtttgactatcccattgaaaatgcgtttaaggcacagttctttgtgcaaccaaacattccctttaagtttaagtttatagagcgaaacgaataatgttgatgatgcttgcaaaatatatatcattgttcactcaggaaaacacgccttaaaataatacaaattgaatattatgtgcacaaaaaaacctatttaaagatgatattgtatagataaaaggtttcttaatattcccactttttttttgagtcaacaacaacttgtaatcgcctggctaaagacattcaagtgcttttggttgcattcacatgtcctcgtcgctgaagtgtccttttgaactcaatacggcaacatccacttgagccaacatatctttactgctgtcccaaaataactttggcatttgccggccatgtgaagaggactcttgactgcagagaaaaaatacgtcgtgtaatttatgtatatggaggggtggtgactggagtcttgaaaatcttgagaaaaggtattttaaatgagcttttgttcgcaaacaactttaaacgaattatcttatagtctaaagtatgaagatcgtatagattttggttaaagcctgtaagtatgcaatatttttgccaaagatcacttgtggcgccacctctgtgtcagattgagtactattcactgcctttaatcaacgttaggttcaagtttaatcagcttcgttatacactcgctttaagccatctatgcaggatactaacccatacaactcgaatgctcactcaactattgcctctgcctctccgcgtccttcgttatcggttgtagttggacaaacaaatgcgccgacataaataatgcaaaagtattcattttgacatcgaatagacaaagttgcattgaattttcatgtttgttcctctcgttcttttatttctttcagttacttgtgccggatcttatctgaccccctcgctttctcctccatgcaaactctttctatctgttttctgctagaaagtcctgctcgtatgtcctggattttatgctgcagaccggactcactcgttggtcgtcgtcttgtgcattattaaaactattctgatgg

SEQ ID NO: 35843 - DNA, 1518 bp, DROSOPHILA
atgttgtcaacgcagtggaacgcaaataaacagatctctaggcagatctaccagctatgcaggggtctggcccaaaaggtaaggaaaatatattttaaatatatatttatattgaacttggaagaggccaaaccttatgctgatattccgggacccagtaaattgcaattgatcagagcttttctgccgggcggtaatgtggcaggaaccgatttggtgctaacgatgaatcctcaggactacgaagtaatctttcgaaacgagggtcagtatccttatagaaggagttttgaggtaatggactactttaaaagggttcaccggcgggaagtattcgatggctatgatgggttgacttcgggaaatggacctgcttggggcaaaatgcgcactgctgtcaatcccattttgttgcaaccacgtaacgccaagctttatatgacgaatttggtacaagtaagcgatgagtttctggagcgcattcgcattattcgagatcctgttacgcaagagatgccagatgactttgccgtggacattcggcatttggtgatcgaatcgatttgctctgttgccctgaacacacatcttggcttattgggagaacagcggaataacaaggatattcaaaagctcgtcttggctctgcaagatgtagttgagctgggctttcagctggacattatgcccgcattttggaaatatttgccaatgcctaatttcaagaagctcatgcgttcattggatacaattacggacttttgctatttccacattgggaacgctttaaaacggatcgaggaggacgccaaggctggaacactgaatgagattggtttggaaactagcctgctggagaagctggcccgcttcgatcgccaaacagcagtgattatagccatggatttgctatttgcaggagcggatcctactcttgtaaccctaggaggaatcttattcagcctgtccaagagtcctgacaagcaggctcgacttctggaggagatcaggggaatattacccaacaaggactcatcgctgaccatagaaaatatgagaaatctgccctatctaagggcctgcatcaaggagggcattcgcatgtatcccattggcccgggaacccttcgccgaatgccccacgatgtggtgctcagtggatatagagttgtggccggaacggatgttggcattgcggccaactaccagatggccaatatggagcagtttgtgcccaaggttcgagaatttatccctgagaggtggctgcgcgatgaatccaactcccatttggtgggtgaaactgccactccttttatgtatcttccctttggttttggaccaagatcttgcgcaggcaagaggattgtggatatgatgctggagatcgccatttcgcggttggtaagaaactttaagatcgggtttgactatcccattgaaaatgcgtttaaggcacagttctttgtgcaaccaaacattccctttaagtttaagtttatagagcgaaacgaataa

SEQ ID NO: 35844 - protein, 505 aa, DROSOPHILA
MLSTQWNANKQISRQIYQLCRGLAQKVRKIYFKYIFILNLEEAKPYADIPGPSKLQLIRAFLPGGNVAGTDLVLTMNPQDYEVIFRNEGQYPYRRSFEVMDYFKRVHRREVFDGYDGLTSGNGPAWGKMRTAVNPILLQPRNAKLYMTNLVQVSDEFLERIRIIRDPVTQEMPDDFAVDIRHLVIESICSVALNTHLGLLGEQRNNKDIQKLVLALQDVVELGFQLDIMPAFWKYLPMPNFKKLMRSLDTITDFCYFHIGNALKRIEEDAKAGTLNEIGLETSLLEKLARFDRQTAVIIAMDLLFAGADPTLVTLGGILFSLSKSPDKQARLLEEIRGILPNKDSSLTIENMRNLPYLRACIKEGIRMYPIGPGTLRRMPHDVVLSGYRVVAGTDVGIAANYQMANMEQFVPKVREFIPERWLRDESNSHLVGETATPFMYLPFGFGPRSCAGKRIVDMMLEIAISRLVRNFKIGFDYPIENAFKAQFFVQPNIPFKFKFIERNE

SEQ ID NO: 35845 - DNA, 5552 bp, DROSOPHILA
ccataatttgacaacaataaattgcattagcagcgaaacaagttcaacacgcagaataacatttaaattcagcagcaacaaacaacgaagtgggtatcgaaaaatagaagaaacacaagagaagacatgaaaaatgacagaaggtgtgcaaaaaagtgtatttaacttggtcgaaaaggcgtcgcggcagaaagacgtttgaagtttgtctatgtttttttttttcatttttttgagggtactgtgcgacagcagacatcgcaataattattgctgacaggcagcaacaacaacataaaggcaacaacagcagtgggtcacaacaaatggctaagagagcgtaggcccaaaaagcaacattggtagcaaaggcaacactaacagtacagacagcaacaacatcaactgctagcaatagcaacatgatgtgcatatcctgcaacaatgtattgcaacaataaaaaaattttagcagtggggcaacataagcttagcagaggcactaactttggtattatagcgttagcaacatcaacgacaacagcggcaacgtcagctgcagcgataacagttaaagcaacagcagcaacatgagcagtcccattagcaacacacttgctggtaagcagtattaaagcgcaatcacatatcgttggattgacactgtcagttgcaaatgcaacaatatcaatgaaacaataaaagcaccttatgttagggaaacagctttgttcaggcttaaagcaacagcagtaacatcaactgcaagtgcacgatagcaacattcgggctaagagcaacagcaacagcaacattggcagcaaaaccagacccaagcagtgctgccggcgtcggctgagagagcgggaggggagcggaagcagatgcggcagcggtgggtccgaaagtttttcaactctttgctgacagccaagatcgctggcgatcagtgcggttttggagttcgttgcgttcggtcgcgagatacctggctaagtggaaccccaaaaaaagatccctggatcggtacaaactcgaattttattcgcgagtgtagttctctctctctctctttttctctaagccatagtcaagcccgagtgtgtgtgtgtaattgctagtgccaggataagtacatcctgccgggaaaaatccgaattaaatcgggggcctgtgcccaaacacccacgctgccatacaaaataaaccccagacatacgcaggcacacttttgcaaccgttagccatgttggcaatgaaggataagccttggctgctgctatttggcctattggccgcattaagctgtaagtaccccgggcaatgatttataagtgccattgtgatgcaaattgagcggatagcgatgcagacacagctgcagatacagatacagctgtagatacagatgctgatattcaaaaactagattagtggcctgtttatatgagccgcacagctcaatgacatgccgaatacgaatccgatgtatatatcatcttttgtgagtgcggtgccagccagttgaatattcatcagcttttatgatcgcgctgaccgttgaaccgctgaccaactccacaattgtcccactggcggactgcattagcatttccaccggagatttgcataaattgctaacatgtttccttgataccattttgaagacctcctagtgagtggaaaagccactgggaaagtaggtctctaggttggctagtccatgcgaaaaaataagagtttattaaatcaatttattaaaatattcatttaactaaaactcttaaattccaattgatactgacctgaaaacaattaaattaattaaagatcgaatatcgataatgtttatttaattgcaaatcgaacatttagaaatacttcgctgaaaatatcctcaagtgaattatgtcgctttgtgtgcgatttcatgcttttgatgcgttgattttgcaattcgcgtggcttcagatgattgccaattgcccccaaccagttcgatgggttagcttggccaatagttgagtgctcgttgtgagcctgcctaatggctccgtctaacttcggcccgatcatcattaataagactacgattgcttttaattacacctttggcattttgcatacgagctcgcaactgccccgtgagctttaaatcattgatggattctgggccagccgggcggaaatcggctgggcagatcggatcggattcgtggccgacaaactggccagattcagaatctggcaaacgagaaagactcgtctgcgtctgcgcaaaatttggagcagccgaagccatggccacggaaaagtgaaccggccagcgggtaaaaacaaataataaaaaaaaaaaccaatcgggttgtgtcaaaaataaaaaataactgcaggccatggcgaccatgtcgccccgacaaaccatttgatggcagtttaaaaaaacagaaacgtgtttatggcccatgcaaaaaacaaagcacaaacaatagcaacaaaaagattgtaataaaacacagataaattgaatttgaacaacaacaccaaccgcagcaacaagagttgaagccaagtttgtgaaggtgaagtgggaatttttcaaagcaaaattcgccagcccacagagcaaacaatattggcccaataaagtcggcttagaaccattcatctcctaatgagaattagttcccattaagacctgttttttttttttgcatttttcatttttccatttttgttttggtgttacacgcctcacgaattttcggattgtattcaaaatttatttgccgtaaatccgtaaatccgaaacttcctgtgctccaagaacaaagactgcgatcgagttttggctttgacacacacagcattcgtagatttctgtttgaatagcttgttttggtttatctgtttgcctggaacccgtcggcatggaaattaaaaacactgataatataaaagataataagcaatataacattgtaacaaataaacaagtccagttatcaatcggccaataattcgttgaacattgtatatggagtaacaaattattttattattttgaaaaaatctattttaaccaatcaatttgtccaatttatttccgccagtgtacgactaattaagtggtcactaagtggctgcaaagatctcgcctgtgtattcattgcccactgactcagctagcgccaagtttgttgcctaagtcttttgtttttcccgcttgcctcaccgattcttttgattgtttttttgtttgcaggcctagccagctttggagatgccgcctacccctattatggcaccaagatcggagccctgacccgcctgcaccacggtgtctccggcgatgtgtacgccgtcgattcccgcaccatcttcatcaagaagttcaattacgacggcgaggcgccagctgcctacttctatgtggggaatactgcacggccaagtaatgaaggtgccgcccggctgagggacgaaaggggcgggaccgcctccctgacccgccgttacaggaacaaggacgtcacactgtcgctgcccgagggcaaaacactgcgcgacatcaaatggttctcggtgtggtgcgatgagttcgcggtgaatttcggtgacgtttccattccgcccaacttggacttcccgcggccacagaagatcagcgctctgaggggcgtccatggtgtctcctccgacaacattgtcatcgtggacgcccaaacgctgctggtgcccaactttagctacgacggagaggcgccaggtgggtaccactccaacatttagattttcaatacttgaagaacttagcatgtcattaaaatacttccgaaagctctggttttttcttgtctaagaatttttattcaccttcagatgaaaagtttggttttgaacacgatcaattagattaactagaaatgatatgtatctttatattaaggttcgcataattaccagaatcatttccagagctcatagaataccgagaattatggtgataataatgaaatgtatttcattatttaattaagcattctttcaattaggggaattcacacagattataatagaaaccaaatatactggatcaataaagtgctttcgtcataagtgagggtaaacaaattaactttaacaaatctgaaatgagtatacttattataatggttttatagaaatttgtattttttttttgataatcagctgatataaaaactcccccaaatatgaaattgcagatgccaaattctgggtgggtcgtggccagcggcccacttccgacggcctgaggattccggacgagaatggcaaggagaacccgctgcgtcgctacgagcgcaagacaatcgtgctgaccctgcccgaggacctgaccatcttcgacattggtcactttggcgtttggtgcgaggccttcaccgtggattttggccacgttcgcctgccggagggcctgaatgtgccgccctccctgaagatgctcggaatcagtcctcaggtaaagaagaacgccagccagatcttaagcgagctgcagcgctgattactactactgatcgctgatcgcagatagctgatcgcggtagatgggtgtaattgtgtgtaactctatttatgcaagcgtatttattgttgtgtatatgcaaaatatttatcaatcggttcgaatcggatccggcatcacgagtcgtgaccggaaattcctagactgtaagctagacggacggcggaggaggagagatccaaaatatatatctatatataacttatatacatacatatgtgcaacacattctataatatatgtgtctatgtaatactcacctgcttgttatttgtgttttgttgtcttgatcagcttttgcttgagctccgggagcgtcttatacaaaatgaaatctgtgtgggactgaatcctaattgttcctccccctcgaaactcacaacacacaaaacaacacaaaacgcacaccacatacacacagacacagaaagcccccacaaacacacacacacatatcattctgatctgatatactaatacccccaagcgaaattaaaaacatttttcattttgtataataaaacaattcgaaaagcagaaatatttcgaatacagcaaaacaaaaatgcaaacatttcgggtatgctcaaaattttgactttggcaaagctttctcctccccctccaaaaaaaaaaaaaaaaagaaaccccaatccacattcacacctacacgcacacacacacccgcaccgcacattcccccagccgattccaactccatatccatctccgtttccgcttccgatccaatcgaaccttcccttaaaccaatctcttccagtcgaagctcaactgcgaggtgctctacgacgatctggcattcgaggttcgctgggcggtggccggcgagagcatcgtggtccaattggtggccaaattgggtaagttctgggttctaaccgctcctaatttgcggaagtttccccttctataagatacgcacatattagtattgtgttaattgaagatgtctaaatac

SEQ ID NO: 35846 - DNA, 1116 bp, DROSOPHILA
aaccccaaaaaaagatccctggatcggtacaaactcgaattttattcgcgagtgtagttctctctctctctctttttctctaagccatagtcaagcccgagtgtgtgtgtgtaattgctagtgccaggataagtacatcctgccgggaaaaatccgaattaaatcgggggcctgtgcccaaacacccacgctgccatacaaaataaaccccagacatacgcaggcacacttttgcaaccgttagccatgttggcaatgaaggataagccttggctgctgctatttggcctattggccgcattaagctgcctagccagctttggagatgccgcctacccctattatggcaccaagatcggagccctgacccgcctgcaccacggtgtctccggcgatgtgtacgccgtcgattcccgcaccatcttcatcaagaagttcaattacgacggcgaggcgccagctgcctacttctatgtggggaatactgcacggccaagtaatgaaggtgccgcccggctgagggacgaaaggggcgggaccgcctccctgacccgccgttacaggaacaaggacgtcacactgtcgctgcccgagggcaaaacactgcgcgacatcaaatggttctcggtgtggtgcgatgagttcgcggtgaatttcggtgacgtttccattccgcccaacttggacttcccgcggccacagaagatcagcgctctgaggggcgtccatggtgtctcctccgacaacattgtcatcgtggacgcccaaacgctgctggtgcccaactttagctacgacggagaggcgccagatgccaaattctgggtgggtcgtggccagcggcccacttccgacggcctgaggattccggacgagaatggcaaggagaacccgctgcgtcgctacgagcgcaagacaatcgtgctgaccctgcccgaggacctgaccatcttcgacattggtcactttggcgtttggtgcgaggccttcaccgtggattttggccacgttcgcctgccggagggcctgaatgtgccgccctccctgaagatgctcggaatcagtcctcaggtaaagaagaacgccagccagatcttaagcgagctgcagcgctga

SEQ ID NO: 35847 - protein, 289 aa, DROSOPHILA
MLAMKDKPWLLLFGLLAALSCLASFGDAAYPYYGTKIGALTRLHHGVSGDVYAVDSRTIFIKKFNYDGEAPAAYFYVGNTARPSNEGAARLRDERGGTASLTRRYRNKDVTLSLPEGKTLRDIKWFSVWCDEFAVNFGDVSIPPNLDFPRPQKISALRGVHGVSSDNIVIVDAQTLLVPNFSYDGEAPDAKFWVGRGQRPTSDGLRIPDENGKENPLRRYERKTIVLTLPEDLTIFDIGHFGVWCEAFTVDFGHVRLPEGLNVPPSLKMLGISPQVKKNASQILSELQR

SEQ ID NO: 35848 - DNA, 6913 bp, DROSOPHILA
ctttaacaaatctgaaatgagtatacttattataatggttttatagaaatttgtattttttttttgataatcagctgatataaaaactcccccaaatatgaaattgcagatgccaaattctgggtgggtcgtggccagcggcccacttccgacggcctgaggattccggacgagaatggcaaggagaacccgctgcgtcgctacgagcgcaagacaatcgtgctgaccctgcccgaggacctgaccatcttcgacattggtcactttggcgtttggtgcgaggccttcaccgtggattttggccacgttcgcctgccggagggcctgaatgtgccgccctccctgaagatgctcggaatcagtcctcaggtaaagaagaacgccagccagatcttaagcgagctgcagcgctgattactactactgatcgctgatcgcagatagctgatcgcggtagatgggtgtaattgtgtgtaactctatttatgcaagcgtatttattgttgtgtatatgcaaaatatttatcaatcggttcgaatcggatccggcatcacgagtcgtgaccggaaattcctagactgtaagctagacggacggcggaggaggagagatccaaaatatatatctatatataacttatatacatacatatgtgcaacacattctataatatatgtgtctatgtaatactcacctgcttgttatttgtgttttgttgtcttgatcagcttttgcttgagctccgggagcgtcttatacaaaatgaaatctgtgtgggactgaatcctaattgttcctccccctcgaaactcacaacacacaaaacaacacaaaacgcacaccacatacacacagacacagaaagcccccacaaacacacacacacatatcattctgatctgatatactaatacccccaagcgaaattaaaaacatttttcattttgtataataaaacaattcgaaaagcagaaatatttcgaatacagcaaaacaaaaatgcaaacatttcgggtatgctcaaaattttgactttggcaaagctttctcctccccctccaaaaaaaaaaaaaaaaagaaaccccaatccacattcacacctacacgcacacacacacccgcaccgcacattcccccagccgattccaactccatatccatctccgtttccgcttccgatccaatcgaaccttcccttaaaccaatctcttccagtcgaagctcaactgcgaggtgctctacgacgatctggcattcgaggttcgctgggcggtggccggcgagagcatcgtggtccaattggtggccaaattgggtaagttctgggttctaaccgctcctaatttgcggaagtttccccttctataagatacgcacatattagtattgtgttaattgaagatgtctaaatacatttattcgccaattgatttctattagaaactcatcttatgcaatcatagttcccaataagttaggaatgccatgaaaaagacaccttttggaatttaagactctctgtggagcttagccctttacctgacctatcccatttggtgacaagcctttagcaagctgcatgatgcatgctgcatctgctggcgatgatttatgatgctttgacattttatcgagtacagttagcggaaaagggggccgagatggcaacaataaaatccagttagcatccaaattgaccgatcagcagtttccatggcagcagcatcggttggcagaataacaagttgcgaattatgacgactggttttattgcgcaactcgactgctcggctgggatggggtggccaaatggatagcaatttgttggttgcatctgcaatcacgatcaccgtgggcataccttgtccatatcgaatcgccactggtcttactccaatctgggcaatttgcaaccgctaagaatgccgccaggaatttcaccgggaaaatgcctgccgaccggttgaccaaggcagaattggggcgatcaactttcgttgattgtggggctcctagcactcaccgtagaatttaactgcactccaagtaggattggcaaatggatttgtcttgagttcattcataagatgaaccgattaataatatacttaatgatttcaaagtcgaatatctaataattttccataagcattgctttcagtgatcatccgaaatctatgaaaacatctcatcacatttatatccccgcagaaccgaaccactacatgtccttcggaatttcgccaaataagaacattagccagatgattggtgcggatgcagtggtggcctgggtggatccccagaccggaaacggatttgcaacggactacttcctggaggggaaggctcagtgctctggtgggcgtggcgcttgtccggacaccaagatctctgagaagaccaactccataaggctacttaacgctgccatggtaaatggctattcaattgtgacctaccaaagatccctagctgccacggatcgcctggatctgccaatctcgattacgggagcggaatcagtggtgtgggcaattggaccacttaacgattaccaggaggtctccttccatacattctacaacaagcatctgcaccagattgagttcggtcgccagcccaagtggaattgtcccttgccagagggtgctcgtggcaatagcaactcatcggaacaggaggactctgctcccgcggcccagagctctactggcggagctggttatccgccagcaggccgacccaacgtggaacccgatgaggagttctacgagaatcgtgcggaggctctgcatcgtcagccaccgcagaggcgccaggaaacagcgatcatcacccaaaggcgtccagtgcccactccaaagccagtgaacagcaatggcgcctgggacatccctgccattcagtgtcacgaaccagaggacggagtgttctatgcccagatgggtcccacgggaggaaaacacggctatccagcaatcacaggtgaaattcttgattatattgttacaaagataccatgtaagtatgttatttattttaggacacgtcggatggggaatttcctggtacatcaacggacttctgatccccgagattcatgtagtgcgaggcaagacctatacatttgtagtggagggtggaaacaatccggatattccggccaagtaccatccgttctacatcagtgacgatcctgtgggaggatacgagcacaaacgcgaggaagagaaaaaggtgaaatcaatttggttaaaaaatccccaactgcaatatcgatttctccgctgtaggccgtgcgcatctacgccggagtacatcgctcccggtccggccaagtcacgcccaccggcgttggccgtctctgcaactggacaccagatgtggaaggtccaccggcggacgactaccagtccttcggcgcctaccagcgcaccctgaccctcaagtgcgacgccggcgagccgggagtgattacctggaagccggaccggaatacgccggacacggtgtactaccattgcttcacacaccgctatctgggatggaagatccacgtgcacgactcatgtgactcggaagcgggtggactcaaaggagccgcctccgaacgccacgaaatccggctgccggcgaaagccaccgtcgcggaaccggcgccagtgcacgaggactacgccggagaggcgtccgtacggcacgaaaccaaggtcagcgccaacgataattttttattgaagcaccaaaccgatttgattaagaaccacaatatgaacggaacaccgcccaaactgagttttgaaataacgaaatcttcggaaataaccaaactgatttcagatggcatccgcgctgctgaggctctcgaggagagcctactgaggaacccgaatctgaaccccaaccatcccaaccagaacccgattccgaatccacaccagaaaccgaacgtgaccccgaccgagatcagctcgcgacccgagattctgctgggcgagacccatgcccacacgctgaacgcatctccatccgcatccgcatacccatccccatcagccactttaccctctgccaacctaaagctacccatactcgcggctggtccccatctcatccatcatcccccgcacttgcatcgcctgcaccaccaaccgcagcatgccccccacccgcatgtccatttgcatcaccacaatctaaccgctaatcttccagcgctcgcacagaaaaccattggactctctgagtttctacgtccgccgcagaacgctccgctctttcatccggttaaactgcccggccgccgacctttccctgctccgatcaagaaggttccggcctcaaggcccatacttccgcagcagcatccgcatttgcatccgcatccgcagcagcatcccgttcttctgcagcaacaaccctccctgattgtaagtcactacaggaagccgataccgggattgctgaaacccttcgtcaaggagaaaccttttccactgcaaccgctggcggcatctgttttactcctgggtcagcccactgagctaggcggcctcaataacaagggagaacgactcaagataaagggtaaaccaaaaattccagtaccatatgtggacctagaaccacaggggtctctgcaaaatacagctatctttaatcaaccaggcggaaagggaaagggggaccagaaacccaaagcctcatctgtgtccatctcaaccacgcccattccgctggtgaaacgtcctacagtaaaggaaccttcccaggaggaaatcgccagtatgcgtcctgccgttaatcagggcttcaagcccgacaccgtgattgttgagagcggatttaaacccatcgttaggaccgatggcactggtgttcaattgcccaaggagatcatcgatcaggtggcccatcgacgagaggatcctgggacagaaatcgatgaggtgatggaaacagataccctgttcctggcagcccagcagggaggcagtgaaacgcagagctttgagcccatgtttataccatcgcccttggacagtactaatgccacaaaagtgttgagggttaacgtgaaggaggttagtcccacggcatcagctttaagattgccgtcggcagccctggagcacgccctgccctccgcttcggagttaataaagcccaccctggacgaactctttgcagaggatctaaacgaagaggagctagaaatggagcctatgccggtggcagatgatgtggagtcactggaagagacaaccaaaaaagatgctgtaaccacaacaataaacattccaagaaacacgaccaagaaaccggatcccgatctgctggaggatctctttgggcccgatgaagaagagttatatgcggatgagctggaactagacatggatgaccgagtggccgctgctgcggaacggatagacacctactacctgccgccggataaccgaaagattcccgataccagggtgccgagtggagccctctacacctttgatggcaagtctgtggtggacagtagcctagtgctgccgcccaaattggatgccccggacaatgccaacgtccaccagcgacatgcccagtacggattgacccccttggagcagctggtccgtaccacacctcagtttggagtctacagaggagagctgccacaggaattccgaggcacagagccccaacccgtctccgagtattcccatccagcgcccttcagtcgtaccactcctgtgttctccagcagcagtggcagcaccatctatccgtattcctcgtcgacaggagcatctacatccaccgtatcatcatcggcctcatcgccattgtcctcatcatcgctgagacccatttccactaagctacagcttctgaagccggagggccgaagagcgtaggatctgcaatagcgaaattataagcaagaactagcatttaaccgttttggggtgtacgactctcataaccacgttacatttactcgtaaacctgtattagcccgtagtttttttttaacacttatgatgctcttaattttaaacgaacgcatgaattttattagctaagctaaccgattctgattaagccgcattttagtcgttgtgaaataaaaccaagaagtaatctgatttgtgtttgatttccggttcaaccggaaataaagatatgtttgatttaaatacaagtaaggtcagaggaaattggttattctttttaagtaactgtcattttaaacgtagtactcttagtacttagtttttactttcttaacactgacaatcataagtcgttcgatataataccacacaacgcacttgtatcgatagctatcacaatgtcaaaaattcaagcttatcgataaataaaatattaagttctgaaacatagatttaaaaagtagagtttggaaagaaaagctggcaaatagctgaccaatatttcgctacagcgtttcataccaaatgggaacacacccttgttaatagtatcgaataactatcgactgctgttccacctccagcaaaaacgtgtgtttttgttgcgctgctatttgtttaatttaatttttaagttgaaacaattatgtcggcgcaatatcaaagattcctgaaagtactagaaaagtggccagcggagaaatcaaaagtcggcaggtaagaataagcatcaaaacaccctggtatcaagaatgttcgttctggcggcgcaacaactttggattatctaacaaataattattgaacggatttaatattatttgtattaaatagttagttttgcacacattgatttgtgaattgcttattagatcactttggcaagtggaatatattatgggaatttacttaagaactatttcacctgccggcccgccaagatttttaggttccacgccaa

SEQ ID NO: 35849 - DNA, 3702 bp, DROSOPHILA
atgcaaacatttcggtcgaagctcaactgcgaggtgctctacgacgatctggcattcgaggttcgctgggcggtggccggcgagagcatcgtggtccaattggtggccaaattggaaccgaaccactacatgtccttcggaatttcgccaaataagaacattagccagatgattggtgcggatgcagtggtggcctgggtggatccccagaccggaaacggatttgcaacggactacttcctggaggggaaggctcagtgctctggtgggcgtggcgcttgtccggacaccaagatctctgagaagaccaactccataaggctacttaacgctgccatggtaaatggctattcaattgtgacctaccaaagatccctagctgccacggatcgcctggatctgccaatctcgattacgggagcggaatcagtggtgtgggcaattggaccacttaacgattaccaggaggtctccttccatacattctacaacaagcatctgcaccagattgagttcggtcgccagcccaagtggaattgtcccttgccagagggtgctcgtggcaatagcaactcatcggaacaggaggactctgctcccgcggcccagagctctactggcggagctggttatccgccagcaggccgacccaacgtggaacccgatgaggagttctacgagaatcgtgcggaggctctgcatcgtcagccaccgcagaggcgccaggaaacagcgatcatcacccaaaggcgtccagtgcccactccaaagccagtgaacagcaatggcgcctgggacatccctgccattcagtgtcacgaaccagaggacggagtgttctatgcccagatgggtcccacgggaggaaaacacggctatccagcaatcacaggacacgtcggatggggaatttcctggtacatcaacggacttctgatccccgagattcatgtagtgcgaggcaagacctatacatttgtagtggagggtggaaacaatccggatattccggccaagtaccatccgttctacatcagtgacgatcctgtgggaggatacgagcacaaacgcgaggaagagaaaaaggccgtgcgcatctacgccggagtacatcgctcccggtccggccaagtcacgcccaccggcgttggccgtctctgcaactggacaccagatgtggaaggtccaccggcggacgactaccagtccttcggcgcctaccagcgcaccctgaccctcaagtgcgacgccggcgagccgggagtgattacctggaagccggaccggaatacgccggacacggtgtactaccattgcttcacacaccgctatctgggatggaagatccacgtgcacgactcatgtgactcggaagcgggtggactcaaaggagccgcctccgaacgccacgaaatccggctgccggcgaaagccaccgtcgcggaaccggcgccagtgcacgaggactacgccggagaggcgtccgtacggcacgaaaccaaggtcagcgccaacgataattttttattgaagcaccaaaccgatttgattaagaaccacaatatgaacggaacaccgcccaaactgagttttgaaataacgaaatcttcggaaataaccaaactgatttcagatggcatccgcgctgctgaggctctcgaggagagcctactgaggaacccgaatctgaaccccaaccatcccaaccagaacccgattccgaatccacaccagaaaccgaacgtgaccccgaccgagatcagctcgcgacccgagattctgctgggcgagacccatgcccacacgctgaacgcatctccatccgcatccgcatacccatccccatcagccactttaccctctgccaacctaaagctacccatactcgcggctggtccccatctcatccatcatcccccgcacttgcatcgcctgcaccaccaaccgcagcatgccccccacccgcatgtccatttgcatcaccacaatctaaccgctaatcttccagcgctcgcacagaaaaccattggactctctgagtttctacgtccgccgcagaacgctccgctctttcatccggttaaactgcccggccgccgacctttccctgctccgatcaagaaggttccggcctcaaggcccatacttccgcagcagcatccgcatttgcatccgcatccgcagcagcatcccgttcttctgcagcaacaaccctccctgattgtaagtcactacaggaagccgataccgggattgctgaaacccttcgtcaaggagaaaccttttccactgcaaccgctggcggcatctgttttactcctgggtcagcccactgagctaggcggcctcaataacaagggagaacgactcaagataaagggtaaaccaaaaattccagtaccatatgtggacctagaaccacaggggtctctgcaaaatacagctatctttaatcaaccaggcggaaagggaaagggggaccagaaacccaaagcctcatctgtgtccatctcaaccacgcccattccgctggtgaaacgtcctacagtaaaggaaccttcccaggaggaaatcgccagtatgcgtcctgccgttaatcagggcttcaagcccgacaccgtgattgttgagagcggatttaaacccatcgttaggaccgatggcactggtgttcaattgcccaaggagatcatcgatcaggtggcccatcgacgagaggatcctgggacagaaatcgatgaggtgatggaaacagataccctgttcctggcagcccagcagggaggcagtgaaacgcagagctttgagcccatgtttataccatcgcccttggacagtactaatgccacaaaagtgttgagggttaacgtgaaggaggttagtcccacggcatcagctttaagattgccgtcggcagccctggagcacgccctgccctccgcttcggagttaataaagcccaccctggacgaactctttgcagaggatctaaacgaagaggagctagaaatggagcctatgccggtggcagatgatgtggagtcactggaagagacaaccaaaaaagatgctgtaaccacaacaataaacattccaagaaacacgaccaagaaaccggatcccgatctgctggaggatctctttgggcccgatgaagaagagttatatgcggatgagctggaactagacatggatgaccgagtggccgctgctgcggaacggatagacacctactacctgccgccggataaccgaaagattcccgataccagggtgccgagtggagccctctacacctttgatggcaagtctgtggtggacagtagcctagtgctgccgcccaaattggatgccccggacaatgccaacgtccaccagcgacatgcccagtacggattgacccccttggagcagctggtccgtaccacacctcagtttggagtctacagaggagagctgccacaggaattccgaggcacagagccccaacccgtctccgagtattcccatccagcgcccttcagtcgtaccactcctgtgttctccagcagcagtggcagcaccatctatccgtattcctcgtcgacaggagcatctacatccaccgtatcatcatcggcctcatcgccattgtcctcatcatcgctgagacccatttccactaagctacagcttctgaagccggagggccgaagagcgtag

SEQ ID NO: 35850 - protein, 1233 aa, DROSOPHILA
MQTFRSKLNCEVLYDDLAFEVRWAVAGESIVVQLVAKLEPNHYMSFGISPNKNISQMIGADAVVAWVDPQTGNGFATDYFLEGKAQCSGGRGACPDTKISEKTNSIRLLNAAMVNGYSIVTYQRSLAATDRLDLPISITGAESVVWAIGPLNDYQEVSFHTFYNKHLHQIEFGRQPKWNCPLPEGARGNSNSSEQEDSAPAAQSSTGGAGYPPAGRPNVEPDEEFYENRAEALHRQPPQRRQETAIITQRRPVPTPKPVNSNGAWDIPAIQCHEPEDGVFYAQMGPTGGKHGYPAITGHVGWGISWYINGLLIPEIHVVRGKTYTFVVEGGNNPDIPAKYHPFYISDDPVGGYEHKREEEKKAVRIYAGVHRSRSGQVTPTGVGRLCNWTPDVEGPPADDYQSFGAYQRTLTLKCDAGEPGVITWKPDRNTPDTVYYHCFTHRYLGWKIHVHDSCDSEAGGLKGAASERHEIRLPAKATVAEPAPVHEDYAGEASVRHETKVSANDNFLLKHQTDLIKNHNMNGTPPKLSFEITKSSEITKLISDGIRAAEALEESLLRNPNLNPNHPNQNPIPNPHQKPNVTPTEISSRPEILLGETHAHTLNASPSASAYPSPSATLPSANLKLPILAAGPHLIHHPPHLHRLHHQPQHAPHPHVHLHHHNLTANLPALAQKTIGLSEFLRPPQNAPLFHPVKLPGRRPFPAPIKKVPASRPILPQQHPHLHPHPQQHPVLLQQQPSLIVSHYRKPIPGLLKPFVKEKPFPLQPLAASVLLLGQPTELGGLNNKGERLKIKGKPKIPVPYVDLEPQGSLQNTAIFNQPGGKGKGDQKPKASSVSISTTPIPLVKRPTVKEPSQEEIASMRPAVNQGFKPDTVIVESGFKPIVRTDGTGVQLPKEIIDQVAHRREDPGTEIDEVMETDTLFLAAQQGGSETQSFEPMFIPSPLDSTNATKVLRVNVKEVSPTASALRLPSAALEHALPSASELIKPTLDELFAEDLNEEELEMEPMPVADDVESLEETTKKDAVTTTINIPRNTTKKPDPDLLEDLFGPDEEELYADELELDMDDRVAAAAERIDTYYLPPDNRKIPDTRVPSGALYTFDGKSVVDSSLVLPPKLDAPDNANVHQRHAQYGLTPLEQLVRTTPQFGVYRGELPQEFRGTEPQPVSEYSHPAPFSRTTPVFSSSSGSTIYPYSSSTGASTSTVSSSASSPLSSSSLRPISTKLQLLKPEGRRA

SEQ ID NO: 35851 - DNA, 4247 bp, DROSOPHILA
cccggacaatgccaacgtccaccagcgacatgcccagtacggattgacccccttggagcagctggtccgtaccacacctcagtttggagtctacagaggagagctgccacaggaattccgaggcacagagccccaacccgtctccgagtattcccatccagcgcccttcagtcgtaccactcctgtgttctccagcagcagtggcagcaccatctatccgtattcctcgtcgacaggagcatctacatccaccgtatcatcatcggcctcatcgccattgtcctcatcatcgctgagacccatttccactaagctacagcttctgaagccggagggccgaagagcgtaggatctgcaatagcgaaattataagcaagaactagcatttaaccgttttggggtgtacgactctcataaccacgttacatttactcgtaaacctgtattagcccgtagtttttttttaacacttatgatgctcttaattttaaacgaacgcatgaattttattagctaagctaaccgattctgattaagccgcattttagtcgttgtgaaataaaaccaagaagtaatctgatttgtgtttgatttccggttcaaccggaaataaagatatgtttgatttaaatacaagtaaggtcagaggaaattggttattctttttaagtaactgtcattttaaacgtagtactcttagtacttagtttttactttcttaacactgacaatcataagtcgttcgatataataccacacaacgcacttgtatcgatagctatcacaatgtcaaaaattcaagcttatcgataaataaaatattaagttctgaaacatagatttaaaaagtagagtttggaaagaaaagctggcaaatagctgaccaatatttcgctacagcgtttcataccaaatgggaacacacccttgttaatagtatcgaataactatcgactgctgttccacctccagcaaaaacgtgtgtttttgttgcgctgctatttgtttaatttaatttttaagttgaaacaattatgtcggcgcaatatcaaagattcctgaaagtactagaaaagtggccagcggagaaatcaaaagtcggcaggtaagaataagcatcaaaacaccctggtatcaagaatgttcgttctggcggcgcaacaactttggattatctaacaaataattattgaacggatttaatattatttgtattaaatagttagttttgcacacattgatttgtgaattgcttattagatcactttggcaagtggaatatattatgggaatttacttaagaactatttcacctgccggcccgccaagatttttaggttccacgccaactgaccgtgtggattgtgggtttcatttagccgattctgagcggctgtggatcgccaatcttagttacttgttttacttggcttaaaaggcttacattgccttaccagttttcagaacatacagacatcaaattatcttaaattgtgtagtggcaaaaaaatggcctctaaattcgcatatcagttggagccggagaaatttattttgagccatggacttaagtaagtttggaaatatcttcttaagcttcgttataaaaactttgactattataaatttcactgtacaaaggttaaataaagcgtgctgataataatatttggataataattgaggaagaagaaaacatgttctattaatttctttaacgtctgttacttttatggccacatttgttagccttttgtcggtttccaattacacaaagtggttttccacctcaaacgcccacttccgcggaaagtgattaaatcttcttctcagctgccccgcatggaacgaacatccgccacagaaaatacacacatgtacactcatttagtgggaactaaactttttcgccttttctcaaacaaaagggatctcggcgagcagattcgcaaacaggtgaccaagcttacaagtctagagggcggagcgacggataaggagctggaccgtcagatcaattctctggagaggctatccaataacgtctacgcaaagaagtatccgcgcactttcgagtccacggccactggactaaccgccgcccagtgcagccaagtgttgagctccgagttcctgcaatatttgaacgaggactcaaaaaaaaagaagtagcacgatgaagcgactcctaaaccctactagactgagactggattggttgagacgaagctctatagatgtgacgactgctccccatgttcctgtgctctgcgacaccgccattgaatacctgcagcccgttccaggaggcacctacttcgacatgactttcggagctggtggccacacgcggcgtcttctggagaagtgtcccgaggcaaaggtatacgccctagatcgagatccattggcccaccaactggcccgcgatatgagcgaatccgaagagttcaagggtaggctgattcccctgcttggaaaattctccgatttaccaaagcttttcaaagaacatggcctggccaagaactcggtggacgggatgctttttgattttggttgcagttccatgcaattcgatgaggcggtcagaggcttctccatctcgagggacggtccactggacatgcgaatggatggtggccacagcggaggggttacagctgccgatgtgttggctaatgttgaagagggcgaccttgtgaagattttaaggatgtatggtgaagagaaagcagccaagaagatagccagaggactggtagacgcgcgcaacgccctctttaaaatcgagaccaccaagcagctggcagatataattgaaaacatcatggatggcgggaccaggaaggataagcttcgacgaccggcacactcagccaccaagaccttccaagccatccgcatatttgtgaacaacgaactaaacgagatcaactacggtatggttttggccaacgaaatcctccgtgtggatggacgcttggtgaccattaccttccactcgctggaggacactatcgtgaagcgtcacatcaacggaaacgtcctggcaggcgccgccaatgctcttcccctcaagtactccagccattatgcaatagacgagccagatatactagaatcactgaccaagaagagctggaaacaactacatcgccatgtcattgtgccagacgccgacgaggtggcgaggaacacacgcagtcgatccgccaagctgagagcagccgtcaaaacaaactaaacgcatgtcaataaattccctcggtctagttcaaaattctctttctcagtctttaattctcccaaactctcgtcatggtatgcatgtttggactgttttggttatctgccaaaccaattggcacctgctgataacgactggtttatctatttaccacagttatttgcggttctcgtgcagagtttttgtttagttggattaggaaattgttgttaattgcccaggtagaatagtagtttagtacagtggtaccgattctccttttcttttgattgaatatttttcagaacataatataaatagggatagaaaatcattggttagtgatgctttccacagtgcacgtatttgatgaactcgttgaactttcgagtacctcttcaagtggttgataacggaggcgggcgaatttgatatggaaattgcgtatgccagcaatttctcggttaaagccatcgtataagcttaccattcgcacttctgcggttgttttgctcccagagattggagcatgttgtggtacttaggtgccttggcatacgtcagccggtgttgttcccggctaccaatcgcaagatgtgacccgcgagaaacccgaaaccgataatctcgaaggcgtctgataagggagcgggattacaaaaaatagagagaggcaccgggcggagcacctatgtgggctatagataggggtgtccgttgagtgctcagctcagttgcatagcgcgagccgagttggcgtggctagtgaggcggtactttcggtcatctggactaaaaaactttacgggcttgcgttttttcagcggagagtggacagcagagccggctatcaagatgagtggggccaagatcatatcgggcacggcggtggccaagtaagtgggcaaaactcttgcatcgtaggattcctatttatcatatccccgcctcccgttagatccattcgcgaagagctgcgtaacgaggtgacggctatgagcaagcaattggcggattt

SEQ ID NO: 35852 - DNA, 1424 bp, DROSOPHILA
atttgtttaatttaatttttaagttgaaacaattatgtcggcgcaatatcaaagattcctgaaagtactagaaaagtggccagcggagaaatcaaaagtcggcagggatctcggcgagcagattcgcaaacaggtgaccaagcttacaagtctagagggcggagcgacggataaggagctggaccgtcagatcaattctctggagaggctatccaataacgtctacgcaaagaagtatccgcgcactttcgagtccacggccactggactaaccgccgcccagtgcagccaagtgttgagctccgagttcctgcaatatttgaacgaggactcaaaaaaaaagaagtagcacgatgaagcgactcctaaaccctactagactgagactggattggttgagacgaagctctatagatgtgacgactgctccccatgttcctgtgctctgcgacaccgccattgaatacctgcagcccgttccaggaggcacctacttcgacatgactttcggagctggtggccacacgcggcgtcttctggagaagtgtcccgaggcaaaggtatacgccctagatcgagatccattggcccaccaactggcccgcgatatgagcgaatccgaagagttcaagggtaggctgattcccctgcttggaaaattctccgatttaccaaagcttttcaaagaacatggcctggccaagaactcggtggacgggatgctttttgattttggttgcagttccatgcaattcgatgaggcggtcagaggcttctccatctcgagggacggtccactggacatgcgaatggatggtggccacagcggaggggttacagctgccgatgtgttggctaatgttgaagagggcgaccttgtgaagattttaaggatgtatggtgaagagaaagcagccaagaagatagccagaggactggtagacgcgcgcaacgccctctttaaaatcgagaccaccaagcagctggcagatataattgaaaacatcatggatggcgggaccaggaaggataagcttcgacgaccggcacactcagccaccaagaccttccaagccatccgcatatttgtgaacaacgaactaaacgagatcaactacggtatggttttggccaacgaaatcctccgtgtggatggacgcttggtgaccattaccttccactcgctggaggacactatcgtgaagcgtcacatcaacggaaacgtcctggcaggcgccgccaatgctcttcccctcaagtactccagccattatgcaatagacgagccagatatactagaatcactgaccaagaagagctggaaacaactacatcgccatgtcattgtgccagacgccgacgaggtggcgaggaacacacgcagtcgatccgccaagctgagagcagccgtcaaaacaaactaa

SEQ ID NO: 35853 - protein, 356 aa, DROSOPHILA
MKRLLNPTRLRLDWLRRSSIDVTTAPHVPVLCDTAIEYLQPVPGGTYFDMTFGAGGHTRRLLEKCPEAKVYALDRDPLAHQLARDMSESEEFKGRLIPLLGKFSDLPKLFKEHGLAKNSVDGMLFDFGCSSMQFDEAVRGFSISRDGPLDMRMDGGHSGGVTAADVLANVEEGDLVKILRMYGEEKAAKKIARGLVDARNALFKIETTKQLADIIENIMDGGTRKDKLRRPAHSATKTFQAIRIFVNNELNEINYGMVLANEILRVDGRLVTITFHSLEDTIVKRHINGNVLAGAANALPLKYSSHYAIDEPDILESLTKKSWKQLHRHVIVPDADEVARNTRSRSAKLRAAVKTN

SEQ ID NO: 35854 - DNA, 2381 bp, DROSOPHILA
ttctgggtgggcggaaacaaagtgctcggagcggaaaaggcgattgatctccatttcgattacgtaatacgcccggcgatgcatacagatccagactatttggatggccactgccagaaaatgctcatggaaaaacttatcgtggattgttgctgaaatgttggaaatcggcttcatgtggtagtacttggacatattatcctcgcccccgatgatgcggcagtagtttcgtgcaacaagcatacgatactggcttaagtataccgaaaaggttcgtttcatatcgttggtctgctcgctctgcacctgacccaggggaccggaaagctcatcccgacgtataagtataaactcgaccagtcgcaaatagtgctcaaagtatataatcagggagtgaagcaacaagtgcgtatcccgctcgtacatgaactcaacgaacttgtaggttagaaattctgaaggcataaggtagagaaccaagtttctaatatctccgaccaccacaacgtcactatagttgcttttcggtagcacatactcctgtcggaagatgagctcctcctcctggtctattgtgcgcaggaacctgtagccattggtcataatatagcgctctcttgcgttttccagatcgttgtgcgcctgaaagtggaggcagtctttctccgagtcccatgaccacttgccgctatagtactttggggcgtagttatccacatgaatgcgcttcattgcgtttggcagtaaataatggtataaatttataaaatcgtattttagtcaaaagcagtgaaaaatcagtgtcgttacattgagagttaaatatttatgttcctcaaaaagactgaaatttagatgctgcagcgactccgattatttaaaagaccaaatacaataatttccaagggcgtgatttttctgtcaatctgtattctcagaatttgtattttccggtaccacgctgatttaggtgaccggtgtttcccggactgtgctaagcatgttccgccgcactaatgccgatccggtcatacggcaatttattctgcgcactgcagtcctcaattatcttggcaagagtctgcgagagcagtataatgaatattgccttttgagaacccagcacgaaaatattaggctgaagactgcgagtgatcaagagcttgaggacctgccgactctttccgagctatttgagatgcaacagttgaagacggctgccacccatcgtctgctgatgcgggagtaccaagaattgcttgcctacatgatggacaagagtgatttgtgggacagtcaggagtacttcaaggccaagtctgcgcttggggcggccatccacaatctacgggtttgtgcacccaccaaaccaatggactaaaaccagtcgagaggaacatttgccagatagaattccattcaatcagtatatatacatacataaatagtgaaacgatccacgagcgacttaactacttgtagaagggtatctccacgcgtccggatttcgtgttaaccgcctcccagcaggtgcacgcaaaggttgagcggtccatgtgatcggtgtatagttttccctccaggtgatccatttcgtgctgcgctatccgggcattccaaccactcagagccagttcgctttggtttcctagttggtcaaggcctgttagctttacaccttcgaaacgctccacttcggcagagtaacctcgcacactcatgcatccttctggatgcttcagcttcgcgtagttggtcaccgtcaggacgggattgatgaaaatctgtaagaagcaaaccattgtattatagggtttgggcttccgaacacagctagttaggaccccagtctcacagtcagtggcaactcggacatttgtcgggcttggtaaacggcctcgggcagctcctttcggatccgtcccttgaactccattgctatgatcctgagcgatactccaatctgaggagccgcaatgccgacgcagtcgaacttccttagcaccttgaccatccgctcgacgatggccttaatctcggggctagccatgtgctccttgggcaccaaagccgcttgttgcctaagaacagggtcaccaatctgggtgaaatggttgtatggcggcaagtttgtgcgctccgtggtccacaggtgctggtaccacttcctgaacgactgattagcgggaggactcgttccaaaggatcgacaatgtcccagaatcgcttggcatacttttatccgtggtttcaggtgcattttgtgaaatgtttagcctcctttaatattccgatcaaaatcgtagggaatatagttacacaacacggtcatactggccagctgaccggctagggatgtgaaagtatgtacctatcgatat

SEQ ID NO: 35855 - DNA, 381 bp, DROSOPHILA
atgttccgccgcactaatgccgatccggtcatacggcaatttattctgcgcactgcagtcctcaattatcttggcaagagtctgcgagagcagtataatgaatattgccttttgagaacccagcacgaaaatattaggctgaagactgcgagtgatcaagagcttgaggacctgccgactctttccgagctatttgagatgcaacagttgaagacggctgccacccatcgtctgctgatgcgggagtaccaagaattgcttgcctacatgatggacaagagtgatttgtgggacagtcaggagtacttcaaggccaagtctgcgcttggggcggccatccacaatctacgggtttgtgcacccaccaaaccaatggactaa

SEQ ID NO: 35856 - protein, 126 aa, DROSOPHILA
MFRRTNADPVIRQFILRTAVLNYLGKSLREQYNEYCLLRTQHENIRLKTASDQELEDLPTLSELFEMQQLKTAATHRLLMREYQELLAYMMDKSDLWDSQEYFKAKSALGAAIHNLRVCAPTKPMD

SEQ ID NO: 35857 - DNA, 6315 bp, DROSOPHILA
ttaatgggtcaattgactcaccttttccgtgcgccgcgggctgtcaggattcaggataagaaagtcaatgagatctaggaagttgaccaagagggagtggttaagcttcttgagctccttgcgccgatcgaaatggatggggatcagtcgcttaatattctgggactccaagctgcggatcatctcgtcgttgttgtactggatgccaaacatgctatagacttcgtgctgcgccggcggcggcggtgggcgtggcgctcggttgcggcggatattctcgtccgtgtaattggcgatgtaccgctccggcggcatcggcaggctggaaacctgggtctcctggttggacattatgagattaacaagtgcggaaatacaaaaataataaatgatttttgttttgaagaagtgatggcacctgagacaggcgaatcactcacgatagtgatgacactatcactcaaattgttttcttaaaaatgagcacactagaggtttgaagctagacaatgcaataataagcagaatttattataatatgttttgagacactgacaaataatttacaattacaaaaattaaattagatattaatcgagctcgaaataataaatgattcaccgtgcctagctatcgataacttaaaggtgaccatgcttgcatgcaccccctacagcattgccatagcaatttttctccgtctcttccctcattcgtcggtagagcacaacaaaataagaaacacatatatatcttgatgtgaatagctaattgttccagcaccgattcgcgccaatattcctgttcctgccaaagaaatgaaaacaaaacgtaaaaccataacataactggacccaactaagagacaagccgtgctgcctccaccattttgatttccccactcagcgtgtgtgcgtgcttgcagtgcttgtgcacgatgccagtaaaatgtgcaaaaccggacataaaacaaacttttcctagtgtcatctagtgagccatggagcggattttgcctgaagaagcggaagcgggtaagcatccagaacttaggtaaccaacgcaggacagccccaggcgtgatcttcgtttcccattgattaagtcagcgctatttccagtataccgcgtgtgttggtgcttctatgcgagtgtgtgtgtgtgtgtatggggagggccgaaataaacaataaagcggatctgcgattgggtgtgtggtttttgcttaagtaaatccaatcggtttctatttaattcacagcctacttgagcgaagcgcgggagcagatattggaaatagccaagaatcggccgggaacccaagtggccaagtgcatccgcgcctacgatgagcaacaggacctggcctcgctagtcgtcctcctcgaagagctctccaaaaacacggactactccacggacctacggatatcactgggatatgtgagtgttgaagaccactattatcaagataagcaaaaccgccgaagagcagaaagatcaaaataaaagtgtgacgcaacgtgcgtgggttttacagtcatgcctcgataactggtattttaactaaaattatataaatgggttttcaagaaaatctattattttatttacagtgaacacaaaagcctgcagatcctcaaatacattgcttatattttcagtatattgaagagctactgcgccactgcttaggacgaaatgatgtctctcgaagatcggccatcgtggccgcaggaagtgccctccagtactgcggcaagatctatggagaccgagtggagtacctgtgccaggtggtggagcaccagatcgaagccctgctcacatcggagttgcagaaggagacccctagcggaagtgctgcgtaagtttaactcagaactgaagagttaagaagatggagaaagacaaggccacgtgctccccacttgtcgccattgctggctcttttcggtccagaattccgcttatcgagcttcactttacgcccccttcggctttgtttgcattaatatcacagaagccggcttgccgttaatggacgatagggcacgttctcgtgcttccaaaaacaaataacaaacagagtatataaagaaatgagaaattaaccagacaagtgaagctaaaaacgtagacagttcattcataaaaataacaagttattcagagatagatcacatcctaaataaatatttttacattataattcacttaaattctttcttatcagccggcattaaagaatttggggagattatttgacctaaatgttgaaagtctaattaattttaaagatagcaccagtattttgattaaacataagatgatttcattataatatttaagttacataataatcagtcctttaaaaaaaagaaatcttatcctcttttaatctgcatttagcgatataataattgttttcctttcatatttacagaccggagaaaaacgagcgcaggcctgaggaaacgcgcaaacgtcaccctaaaaagctaactaacaaggaagttgatccctatttgctcacgttggaaccgaaaaggtttaaaaccatgtcggacgacaagcgcttcaacgcggcgggctttgtaaagtgcacgagaaatcggacgatagaatacctttatcaggatcacacgccgcccaacctgtggaaacacgcgccaattgtggatcctcacaatccctacgaccaggatgagaaaaagcaatacaaaatgtttacgtatcacgtagagcatagatacaatacgcttctgccagatattcccttcgaaaggctgaatctcattaaagaatatgttcacacaaatcaggtgaacaccactgagattcttaatgagcacatgaccacaaaggaatatctggacgagtatattgcgctggagaatcaaatgctagcagcccgctatggagccattgtcacaaggagaagaagattggttgattccgcgagatttatggaggacaatttggatgagggactggcgaaaaaaatgtgcatggacaagaatctgccaatggacacgaacgaaactgttcttattgaccaatctttggtggatgaaaacagcaggtcgttaaccacagccgagtctacgatgggcatcagtcaggcggagaactctactttaaagagtagcgaagtcgaggcgactttaagcgtcagccatatagaaaactccttaagcgatagccaagaagagaatcctccgctgagcagcacattagccattaacgagtctagtgttctcgacagcacgagagtggatcccataaaagatctcactctagatgaactgttgctaatcgattcagggatcagtatggaagagctttccgatattcaaatgcatacaggtaaagcaatggcaatccaacgctcgccaagcgtactaaggataagggtttttttaatcctttattttttgatttcaaatacttacatatttgtttttctttactcttttattttggcacttgtcaaacacttgcatccctgcattgcatttgtcacagcaggccagtcttttgatgatgagggtgttgttctttcagatttagaagatcaacgccagttgtcgcccatgttgcagatggttagcccatcgatggaggcaaaaacgctcaatatcattgagatggatgctgatcttatcatgaatgttccaagggaggtgagctatcctattctgctgaatgttatgggtctccccataaaacgcctgcgtcggaaatgcatctttaaacttccacctgagttcgacttattcaggcaagcagtaagtgttttcagtagttacatcactgttggaaaaaaatcttgaactgcatatgtgttttatttttagcgccttcctattaagcgagagggacaacaaaaatccccaaccactcccagaactgtactgcaaattggaagagaggctccccaaaatgaaagagaacccggctccccctgtagtttagaatttgatgaggacttgagtaagttactttgccacactatgtcacgtcgcgaaactatcttacatatcttaccagattttctgggtttccgccaacgtcgacccacatttgactcgggcttcgatatcgaagagccgcgtgtatcaagttgtgtctccactatcggagaagttaaaactgagcttgaagatgagattgaagccaacaccaataatttaactgacgcgagcgccagcgacgccttgaatgagaatgtgaacgatacaaaggaaagtgggctgggagattcactagcgcaggaattaaacgcttccaccgaacccaatgcggaaaacaataccgcaaattcatcgcaacttgaagtgactgctacagaatcctccggaacgctaagcggactggaaaccacagtggatttaggaatggagagcgcgttagttagttctgtattggatttaagtaccgaaccgagtgcaatggatagtaacattataaatgtcacccaacctgacaattcagacctagagatttcaaccgtgcaggaccaagataccttacatgacgaagcagatgcaaatgatttgtctgctgaaacacccaatccaattgccgactcagcagtcgacgactgctcattggtaaatattggatataaaattataaaaaaaatactaacgttgtccatttagatccgggactggcatagacgattggctcctgctttggaagcagcccatgaacggcagaatttcaatattaaggacttgggcaccgagatcctggacatttgcaaggcgggcaacagaacagccacgttagccgacgtcatggctgacaaggatcctagtatcatgtgtcgctacatgctggcttccctggtactggtaagttaatgcgttcaatcaaaatgctgtccttcgataagcaatcatttttacactcctcatttgcagacgaaccacggaaacgtgtctctggattttgaaaatcgcgataaaagtaagcccatcgacatgtctcagtttcgaatgcatttaaagagtatgaagcgaatggaaattaatcccgaggacgacgtgggcaacataaatgctgcccagagcaaatcgacgccgagaagtaaacagctaaatgattcagctcacaagccacgaacaagcacgacggcatctgcaccaacaaaacgaaagtctgcggaaaattctttatccgaggtgtttgctaaaactgtgcgattgatacagcccatcccaaagatgtggcctactccttctgatgccgactcggggatatcttcgatgggctcatcattggcatcgacagcccgcctgaagtagtagccgtgtttcgtcttaaatgtgcttagtagttctttgtagataagattccttgcgtcctgacccagtagtagagtctagtttgtgtgcccccttattcgaattcaatttttatgtatattattttcaggccgagagatcaatgcgctttcccatgcggtacaacaagatcaagaggctgcattagatatatgttcttgccagattatttacccgcaatcgtgtacaaatgtaagttttagttacgtattattaggaagcttgcaatagaaagaatgctttagcttaagcttatcgatgtatgaatcaatatttctttagagtagtaaaccagtattatctaagctcgattttcctaagcatgaagccgttttttagtttttctttcacttcacttttttaactttttacgacgcttttagttgcttatgaaattttcacatttttattaatttctatttcttttgaacatttttgatttattttactttacctacgaatagatttatttcgtattcttattatttctatgatttcctaaaaatttaacactatacctcctttgatttagaacaaaaatagacaaatgactttttgattgacgaagcgcgtgttttggaaatcctcatgagctgatagtactaaattcaagtacctgatctcgtctgtacaaaagtataaacataagaactcttcggacataagacaaagttcaagataaattaaggataaagtgtatatatacgtatgtatttaccagagtgcaagctagtgtctatttacaatcattttaagatataatgtttttttcgtaagtataacgtgtagttcttaaggaataaaacggaaccatgcaattacttaatgtgttttaatgaaagtaagtcggcgattctcccaatgctactccgagtcgctgctgcctgacttgtgctcctcctctttcttctcttcagtcttgtagtggcgatattctttcttgagctcccacatgttcttg

SEQ ID NO: 35858 - DNA, 2901 bp, DROSOPHILA
atggagcggattttgcctgaagaagcggaagcggcctacttgagcgaagcgcgggagcagatattggaaatagccaagaatcggccgggaacccaagtggccaagtgcatccgcgcctacgatgagcaacaggacctggcctcgctagtcgtcctcctcgaagagctctccaaaaacacggactactccacggacctacggatatcactgggatattatattgaagagctactgcgccactgcttaggacgaaatgatgtctctcgaagatcggccatcgtggccgcaggaagtgccctccagtactgcggcaagatctatggagaccgagtggagtacctgtgccaggtggtggagcaccagatcgaagccctgctcacatcggagttgcagaaggagacccctagcggaagtgctgcaccggagaaaaacgagcgcaggcctgaggaaacgcgcaaacgtcaccctaaaaagctaactaacaaggaagttgatccctatttgctcacgttggaaccgaaaaggtttaaaaccatgtcggacgacaagcgcttcaacgcggcgggctttgtaaagtgcacgagaaatcggacgatagaatacctttatcaggatcacacgccgcccaacctgtggaaacacgcgccaattgtggatcctcacaatccctacgaccaggatgagaaaaagcaatacaaaatgtttacgtatcacgtagagcatagatacaatacgcttctgccagatattcccttcgaaaggctgaatctcattaaagaatatgttcacacaaatcaggtgaacaccactgagattcttaatgagcacatgaccacaaaggaatatctggacgagtatattgcgctggagaatcaaatgctagcagcccgctatggagccattgtcacaaggagaagaagattggttgattccgcgagatttatggaggacaatttggatgagggactggcgaaaaaaatgtgcatggacaagaatctgccaatggacacgaacgaaactgttcttattgaccaatctttggtggatgaaaacagcaggtcgttaaccacagccgagtctacgatgggcatcagtcaggcggagaactctactttaaagagtagcgaagtcgaggcgactttaagcgtcagccatatagaaaactccttaagcgatagccaagaagagaatcctccgctgagcagcacattagccattaacgagtctagtgttctcgacagcacgagagtggatcccataaaagatctcactctagatgaactgttgctaatcgattcagggatcagtatggaagagctttccgatattcaaatgcatacagatttagaagatcaacgccagttgtcgcccatgttgcagatggttagcccatcgatggaggcaaaaacgctcaatatcattgagatggatgctgatcttatcatgaatgttccaagggaggtgagctatcctattctgctgaatgttatgggtctccccataaaacgcctgcgtcggaaatgcatctttaaacttccacctgagttcgacttattcaggcaagcacgccttcctattaagcgagagggacaacaaaaatccccaaccactcccagaactgtactgcaaattggaagagaggctccccaaaatgaaagagaacccggctccccctgtagtttagaatttgatgaggacttgagtaagttactttgccacactatgtcacgtcgcgaaactatcttacatatcttaccagattttctgggtttccgccaacgtcgacccacatttgactcgggcttcgatatcgaagagccgcgtgtatcaagttgtgtctccactatcggagaagttaaaactgagcttgaagatgagattgaagccaacaccaataatttaactgacgcgagcgccagcgacgccttgaatgagaatgtgaacgatacaaaggaaagtgggctgggagattcactagcgcaggaattaaacgcttccaccgaacccaatgcggaaaacaataccgcaaattcatcgcaacttgaagtgactgctacagaatcctccggaacgctaagcggactggaaaccacagtggatttaggaatggagagcgcgttagttagttctgtattggatttaagtaccgaaccgagtgcaatggatagtaacattataaatgtcacccaacctgacaattcagacctagagatttcaaccgtgcaggaccaagataccttacatgacgaagcagatgcaaatgatttgtctgctgaaacacccaatccaattgccgactcagcagtcgacgactgctcattgatccgggactggcatagacgattggctcctgctttggaagcagcccatgaacggcagaatttcaatattaaggacttgggcaccgagatcctggacatttgcaaggcgggcaacagaacagccacgttagccgacgtcatggctgacaaggatcctagtatcatgtgtcgctacatgctggcttccctggtactgacgaaccacggaaacgtgtctctggattttgaaaatcgcgataaaagtaagcccatcgacatgtctcagtttcgaatgcatttaaagagtatgaagcgaatggaaattaatcccgaggacgacgtgggcaacataaatgctgcccagagcaaatcgacgccgagaagtaaacagctaaatgattcagctcacaagccacgaacaagcacgacggcatctgcaccaacaaaacgaaagtctgcggaaaattctttatccgaggtgtttgctaaaactgtgcgattgatacagcccatcccaaagatgtggcctactccttctgatgccgactcggggatatcttcgatgggctcatcattggcatcgacagcccgcctgaagtag

SEQ ID NO: 35859 - protein, 966 aa, DROSOPHILA
MERILPEEAEAAYLSEAREQILEIAKNRPGTQVAKCIRAYDEQQDLASLVVLLEELSKNTDYSTDLRISLGYYIEELLRHCLGRNDVSRRSAIVAAGSALQYCGKIYGDRVEYLCQVVEHQIEALLTSELQKETPSGSAAPEKNERRPEETRKRHPKKLTNKEVDPYLLTLEPKRFKTMSDDKRFNAAGFVKCTRNRTIEYLYQDHTPPNLWKHAPIVDPHNPYDQDEKKQYKMFTYHVEHRYNTLLPDIPFERLNLIKEYVHTNQVNTTEILNEHMTTKEYLDEYIALENQMLAARYGAIVTRRRRLVDSARFMEDNLDEGLAKKMCMDKNLPMDTNETVLIDQSLVDENSRSLTTAESTMGISQAENSTLKSSEVEATLSVSHIENSLSDSQEENPPLSSTLAINESSVLDSTRVDPIKDLTLDELLLIDSGISMEELSDIQMHTDLEDQRQLSPMLQMVSPSMEAKTLNIIEMDADLIMNVPREVSYPILLNVMGLPIKRLRRKCIFKLPPEFDLFRQARLPIKREGQQKSPTTPRTVLQIGREAPQNEREPGSPCSLEFDEDLSKLLCHTMSRRETILHILPDFLGFRQRRPTFDSGFDIEEPRVSSCVSTIGEVKTELEDEIEANTNNLTDASASDALNENVNDTKESGLGDSLAQELNASTEPNAENNTANSSQLEVTATESSGTLSGLETTVDLGMESALVSSVLDLSTEPSAMDSNIINVTQPDNSDLEISTVQDQDTLHDEADANDLSAETPNPIADSAVDDCSLIRDWHRRLAPALEAAHERQNFNIKDLGTEILDICKAGNRTATLADVMADKDPSIMCRYMLASLVLTNHGNVSLDFENRDKSKPIDMSQFRMHLKSMKRMEINPEDDVGNINAAQSKSTPRSKQLNDSAHKPRTSTTASAPTKRKSAENSLSEVFAKTVRLIQPIPKMWPTPSDADSGISSMGSSLASTARLK

SEQ ID NO: 35860 - DNA, 3038 bp, DROSOPHILA
actaattgtccataaaagtattcgtgtctgacataattcattcattattttaatatgaggtgatatatggaggtcattgtctggcgaccctgacgatgttgaatctttagatctgtaagatctttaagagattatttttgaaactatgcatctaaaaaatatgaatgtaaaagaccttattcaaacgaatttagtattaatatttcttgatatgcttatttaatgtttaatattacgataacttacaaaaatttattcagcaatatacgtttagcttataaatatcaatgtaagagcccatatatttaggcccgtttgaatatatatacgatataaaacgagcggcaagatgtcagtgacttaataccagaaatctcttggtcggatgcccctcataatgatgcaagtggcgcaggtgcaaacacttccatgtgtctccgttcccaagtcgcgattttgatccattggagtacatagatatacgacttttggtttcagatgcatggctgctcaatttatccgcccagccagcgtggttgtttgttggcgtcttcgccacttttttttttgtgtctgcgataattttgttaaataattgagtatgcaatgaaaattgcgcattacagcgacataagtacgatgaatggtctttcattgggggggggttgtttactgtgcttgtatggggacataagtgcctatatggttacaaacacctgttcattcgttttgctagaatgcgtttctttcctcactttttcccaaatactcgcataaacggcattcaaatccgcacgctgcttgacattttgtaatttgaacaaattgcttgcatttttaggcaactcctataaatagtggagttgctgctgctggaaatattagtttggagcagagcgaacgacacgttggagccacgagccaaaaaccccaaaggactattactaatttacaaaaaaaaaaaaagaaacccaaaaggataccctcttaaaagagcacaatgaaccgaaattacattgtcatactgcagctgctgggagtgttggttgtgctgacctacgccagtgcaatccccaaatacgaagatagccataagtaagtcaattctagtaccccatatacgatactcatttggaatggcttcaggttctatgcggataaggcgcagcgggataggtcgtactttaatgaaaacaagacccagcctagtgaaccgcagacagcttccacgaaggatagactggaacgactgggctataccactggctacggatccctaaatgtgcgtaaactacatcagaacctccaaaccgtgggctaaactactaacattgatctgtgaacttaaattgtctagggttatcctggcggtactggactatccgcctacaatcccataaaactggacctgggtggcgttgtcttaggaactcttgtgggcataggtgccattatactgattcctaagattctatccgccttccatggtggttatggaggctacggccgcagtgagtgaaatgcttttatggaaattcaaaaataaagttaattttcggtcatttttaggcgaggacagtgacctaacaccactgagcagcatgatcaataagattgacgatgttctgggccagaataatattgactcgacgagttgcatgcaacgtgctgtgtgcggttatgttcgctctacggagtataatatgaagatcggttcctcagaccagatggacgaatttattcatatgctagcggagtgagtagaggcttttaactccaaggtacttagcacacaatatttgcttttgacttacttgtttccagaaatgccctggtggattacctcctcgatggaacggctattaaggaggcattggagcatggaaagcgagccaatgatcgagcctgtgaagaggtgtactccaattgtccgctggacagtaaatcagctacggatattctaatgaagctgatgccaaagaaaaacccacaaggaaaaggaaaatcatctggaatttcccgagaaaagaaggtttagttaatgttgttctatgaaattttaaaaaattgttctccatttgcatacaaccaaatattttcccaacatataaataaactccattgtgttatctttattcaactagtttctgtgcgtttataagcttttccaaaacaattaacaatgccttaggccatttaccatataatttctttggtaagaagttttaaccatagatccaatattttgtaagcatttgtgatttttgagtacgtctattctggggaggcattcttagcctcattgccgcttaaaataatttgcaattgcttttcctgctgttcaatgaggggcaaccactgctccgatggggctataaacttggtcggttgaaaggtgggtattttacctagttttcccaaaaccgacctgcgatgcgcttgattctcaatcatgatgtgttccagtttgtctaccaagtggttggactctttgatcaggtcatcgatggactgcagcagggcgtaccaatctattttctgcgtaccaatcagagcattacccctcaatcgaaagggaaagggaacgaagctgcgccaaggcttaaacgattcgatggtatagggtataaaatgccgctcagattccatttccacggcatcgtcatcgaaatgccaggatgctagagtaggagccaatatagagttactcccacttcccctcgacagattcgattcatcaaagttgagcctccgtatcttggctatctgatcaccaagtctcttctccacatcggagatgccatcactgtcatcctcatcggatttgggtagataggagttgaccaggtccttgttataggccttcggcagtagcgtctgagtttgtcgcgaaacggtaggcacactatcggtcatttgggacatggaataggtaagaacatctgcaagtatttgggttacatttaactaaaccaaatatctaactgaaaacttacacttctcatagccatccttctttttggagtactgtccatcag

SEQ ID NO: 35861 - DNA, 786 bp, DROSOPHILA
atgaaccgaaattacattgtcatactgcagctgctgggagtgttggttgtgctgacctacgccagtgcaatccccaaatacgaagatagccataagttctatgcggataaggcgcagcgggataggtcgtactttaatgaaaacaagacccagcctagtgaaccgcagacagcttccacgaaggatagactggaacgactgggctataccactggctacggatccctaaatggttatcctggcggtactggactatccgcctacaatcccataaaactggacctgggtggcgttgtcttaggaactcttgtgggcataggtgccattatactgattcctaagattctatccgccttccatggtggttatggaggctacggccgcagcgaggacagtgacctaacaccactgagcagcatgatcaataagattgacgatgttctgggccagaataatattgactcgacgagttgcatgcaacgtgctgtgtgcggttatgttcgctctacggagtataatatgaagatcggttcctcagaccagatggacgaatttattcatatgctagcggaaaatgccctggtggattacctcctcgatggaacggctattaaggaggcattggagcatggaaagcgagccaatgatcgagcctgtgaagaggtgtactccaattgtccgctggacagtaaatcagctacggatattctaatgaagctgatgccaaagaaaaacccacaaggaaaaggaaaatcatctggaatttcccgagaaaagaaggtttag

SEQ ID NO: 35862 - protein, 261 aa, DROSOPHILA
MNRNYIVILQLLGVLVVLTYASAIPKYEDSHKFYADKAQRDRSYFNENKTQPSEPQTASTKDRLERLGYTTGYGSLNGYPGGTGLSAYNPIKLDLGGVVLGTLVGIGAIILIPKILSAFHGGYGGYGRSEDSDLTPLSSMINKIDDVLGQNNIDSTSCMQRAVCGYVRSTEYNMKIGSSDQMDEFIHMLAENALVDYLLDGTAIKEALEHGKRANDRACEEVYSNCPLDSKSATDILMKLMPKKNPQGKGKSSGISREKKV

SEQ ID NO: 35863 - DNA, 2417 bp, DROSOPHILA
aaaaaagaacacccaggctatgaaaatagatataatttatttgtgacgataatttccatttaagtcagctacacatttaaacacatagtacatgtatgtatgatgttttctcaatttaataacatagtggtactttgaactttgcatccgaacccagggtcaagataattcaaacatcaaacaataagagattaattgaaattcatattccgatattgatgcacacacgagtgtatgtattttttcaattacctctgcctgtgtcagttcatcgtttccattaacaaagcgttgcaccgatgttcttttcattgcacatggaaatgtagctatggatccatgtgtaccatgtgtataagttcgcttttcacctaaaccaatttactcggttttttttttttgtccatcacccgctacgtaggtccctagacatcgtaaaaaaattgtcaaaaatagtgattcctgcgtgatggattattgtcaacacgagctaagccctaatagtatatattgatatttgagatatatactggatatattacgcaaccgatcacaattattatatgtctgttaattagactgcacacaattgggggcgctggcgaaattagataattgtttccaacacgtttgtatactttgtgaaacagaaattcttgaacgtcatcagcatccgtggattccttcccattctcgcgggagagcaaacggatgggattctggtccgccgggccagaggtgtatatacaaaaggcccatgtaagctatatgtagggaggtgcgagaggaaaatcgctgagtggggcctttgttttgtgaatgaaaatgaaaattctcgccgtacatatgccaagcctacgtccgccgtacgccagtacaattttagatctcgagcgagcgagttcgtccggaacagagagctacaaccgatgaaagccgtatttgttggatagaaacgcggactcagattgccatttttgttgcagtgcaccagaggatcatgtacatttaccccagctcaccggaatcagcatcgtccttgcagtccgaagagagtgcggccattaagattcaggccggatttcgtggctaccgtgtgcgcaaagagatccatcgatccagcaagaatccccatcccaggcggaatcagcgacagcgtccaaagaacaacggcctcatggaaaaccagaacaatacgggaaatccccgtcccagcggcgaggatcagcatacggccaccgagaatggtggtaaatccgtggaggatcgtagtgccaccaagatacaggcgggattccggggattcctggtgcgaaagaagcagaaaatcgccaccgatgccgctgttaaaattcaggctggcttccggggattcaaaacacgcaaagaattgaaacaatgcgagcccattgtgtaatgactttgcgcgctggtcgttccacaactctgatttctactgtacatacaaatatttgtattcaaatcctaccgcttagttcaatacgtgtcgtgtaaatagattaatattaactgatagcttccagatgaataaaatactcttactcaagaaaccgcaatcttgaaagacaccactatccattaacgagatccaaattgtttgtgttttctctaggcctatttttggtataccgtgctgtatgtatatggtatgaatacagtgaataaacattttgttcatcgaacacgtagcacttgatggaaactgacgaaacggaaaacacaatacgatagttgcaaagaatggtttttagggagcacaaagttagaggcgtgtcttatttttttttaatagaacctatttaatagctggctagcgaatgtattctttgggattcagtgcatcgacccaaggtgcacacccagcccataaatctgtcaagtgcgtttaaagtttagagccaaactggcagccatccgctcatccgtagttgaatatgtttaaattgaggaaaattaaatgttatgatttactcccggaaatctttccgcttgtttgataacaataacatttcagattaatacatatattttatttagatataattcagcgtttatacttatacgtcgtataatttattttcttttgttcgcctcggcgcttttgatgcgttttcgcatatgtttggggattactctgaaaacttcgcaatcgatttgcactggcatggaattctgcctcattttcagccacctcaattccatgtcagcgctggacttcgcctcgcctggataattaagttaatttaaatattaaaacttgtttactaacttaaacaatttggaaatgattacttaccaacggtcttgcttctctgggtttttgcatttttgtgtgctttgaccccactgactagcaaactgttttcatcatccggagtggaatcattacgaagtgc

SEQ ID NO: 35864 - DNA, 417 bp, DROSOPHILA
atgtacatttaccccagctcaccggaatcagcatcgtccttgcagtccgaagagagtgcggccattaagattcaggccggatttcgtggctaccgtgtgcgcaaagagatccatcgatccagcaagaatccccatcccaggcggaatcagcgacagcgtccaaagaacaacggcctcatggaaaaccagaacaatacgggaaatccccgtcccagcggcgaggatcagcatacggccaccgagaatggtggtaaatccgtggaggatcgtagtgccaccaagatacaggcgggattccggggattcctggtgcgaaagaagcagaaaatcgccaccgatgccgctgttaaaattcaggctggcttccggggattcaaaacacgcaaagaattgaaacaatgcgagcccattgtgtaa

SEQ ID NO: 35865 - protein, 138 aa, DROSOPHILA
MYIYPSSPESASSLQSEESAAIKIQAGFRGYRVRKEIHRSSKNPHPRRNQRQRPKNNGLMENQNNTGNPRPSGEDQHTATENGGKSVEDRSATKIQAGFRGFLVRKKQKIATDAAVKIQAGFRGFKTRKELKQCEPIV

SEQ ID NO: 35866 - DNA, 3291 bp, DROSOPHILA
ccttccatgtcaaaaccactacgggattctgttcatttgccgggtaatacaccttcattggcagatccatcagatttgcctgtcgtctgagaaattcgacgcatggtgctgtagaggtaagtgtaagtatctttaaaattgtcacttcatttttctaaaatatactatcgttcagatactaaccatagtccggatcgggatggacacttgggatgcgcagatactcgcgaaagtactgtatctcctcatcggattcccacttgctggtggccatttcacttctatatacgatcttttgcggctgacagctggcagcatactgagttgtgttagctagtgtccgagtcgagttccagtgccctactactaatagacttatctctcacgatcgtaacgccaacgcgcgacccgcgaggtggcggacacagataattttatcaaattgtaaacgagaacttcggatggtgaaaaaactcgtttacgtcacagtagcggaggggatcacttgttttaatcaacaacagcaatcagtgattggacatcactgtggaaaactaattcttatatttcatacaaaaaacatttccagcaatataaggcttagcttttatatgtaatatttgacacaataatccaggggacttttttcaactttattgtgtttttactgtatcaatttgaccgtggtctccccttctactctctattatagtttaaatttgattcgtagatttgttataaggtcggtcgttcgccccttgctatctgttcccatcaactgcttgcttactggctcgagcccgaagtactgctttaaattcaaatttccagcactgcttgactactgcttgggaccagtttaaattcagattttaatacagtaggaagtttattctttacatttacaattacatcatacatcttggcgtgtacaacaaaacttaaagagtcactagagtcttatatgcgaaaataccgaataacgatctccaccagacccttaggccttgcgttcgaagaggacagggaatggcttatccttcggcgcctgcagccaattgtcctccgaatacttgacgttgttctcagtctcgatgacgtggaaagtgtaggcgtggcgactcttttgcgagcgattcggctcactcttgtgcaccacatttccgtggattagaatgcaggtgcctggaaaaattaagtagaacatatgttataatgattttagagtatttaaacgttttatggaaaaaccacgaatataactctttagggaaccagaccaaaaatacaactaaattacacttggactgataaaagcagctaacaaaatatttactttgcatcttaaccaccataaagataaattttaaatgggtctaccgaagctgtagtgctctgcagtacttagaaagtgcttcacctactttgaattcatgataaattatcttctatcaacttacccttgctgacttgcattggcgtgaagctggactgcggataaatgggagctgcccgatcgtagaccatcagttcgctggcatccttgtcgggattgcgaaggtagcgcctgtggactccactcttgtgtgatcccttgatgaactgcaggcaaccattctgcagggtgcagtcctcgagggccagccaaaagcccactgccgagttgggatccgtgtgcaggaaccacgagtcctgatggggcgtcacctcgccacccactcccggattcttgtagatgtacatactttgacagacggccggcttattgtagttcaactgccagcagatctcccgaactcggttgctaaaggtgatggcattgaaggcaggatgctccacgtgcagagcatgccccactttgttgagggcgatcatgggatccaccagcagctggccctcatctcccaccgcccccttttcgaagaagtaacgcactttgtctcccgactccatgaagtacagctcctttccctgtgcatcctcctgctttatggtgctgaagatcttcctgttgttctgcggagcatccaggcacagagctcttcccgcctggtacagtgagtccacttcctcggcagtgaggaagtcctcgatgacaatgtagccgttttcattcagctgaaaataggaaagcggatgaaggtttcagtcaattcaaggaataatctttttaagctacatatattgcttatcggctgcgccgtctggtctggcgggtccggcaatctctaaccggactctacggggtctggaggcattatcgcaccaactgaccgattgaccgactgcataatgggcacgcgcttactatttcgaacttacgggtattataccataatcgcagcaaactacatcgcaaaaaattagcaacataaatgggccaatatagaaaactactatttgaaagtatgaaaacaaatataagttttaaatagatcgttaaccatttcattgaaaatacaataagtatttttttaaagactgtccttttcgctcagtgcactagttcactttgttcacctttctaacgttcgctaattaacaaattccggtgcacgtcaaaatgttaattctgcctgacataaacccacgaaccgaaatccgtgctcattcattgaaatcagtcaacgtaaaattgaaaattcacacattctctgctcctagcgcatattttagaaagggtatagtggattggcgatcgagaacgatactcatagtggcatctaaacaaagataaatgattgctttgttgaacaattaatatctcttagatttatgcctgacttttcaggaagagcaatagaatttcgactcgcaacaaacaaatcacttttgttgtgggtgctcttccattctttctcccggttcctagtggcatgagtttggttaaattaaataaatttaaattgctcgagcgagaattttgaaaatgaaaaacgagagtaaaaatagtcgtcgtgactcaaaggcagccgacaaaatcacctgaagtgatcgaaaagacgaaagagatcgggtcagctgtcgatctgacgctaacagaaccgcgaagataaatcatcggaaaagaaaaagaggggcgggaaagtgggcccattttccggatggtgctctatgcacaatttacccgtagatatatgtttgtgtttccattacaaaggcgtgtgcatggaaaattacaccagagggtcagcaatcagccagcagttgcattcatcacgtatgctcaccgtttgtcatataacatgcttagccagctgattttgtaatcgctttgaatttgataatggc

SEQ ID NO: 35867 - DNA, 864 bp, DROSOPHILA
atgcagtcggtcaatcggtcactgaatgaaaacggctacattgtcatcgaggacttcctcactgccgaggaagtggactcactgtaccaggcgggaagagctctgtgcctggatgctccgcagaacaacaggaagatcttcagcaccataaagcaggaggatgcacagggaaaggagctgtacttcatggagtcgggagacaaagtgcgttacttcttcgaaaagggggcggtgggagatgagggccagctgctggtggatcccatgatcgccctcaacaaagtggggcatgctctgcacgtggagcatcctgccttcaatgccatcacctttagcaaccgagttcgggagatctgctggcagttgaactacaataagccggccgtctgtcaaagtatgtacatctacaagaatccgggagtgggtggcgaggtgacgccccatcaggactcgtggttcctgcacacggatcccaactcggcagtgggcttttggctggccctcgaggactgcaccctgcagaatggttgcctgcagttcatcaagggatcacacaagagtggagtccacaggcgctaccttcgcaatcccgacaaggatgccagcgaactgatggtctacgatcgggcagctcccatttatccgcagtccagcttcacgccaatgcaagtcagcaagggcacctgcattctaatccacggaaatgtggtgcacaagagtgagccgaatcgctcgcaaaagagtcgccacgcctacactttccacgtcatcgagactgagaacaacgtcaagtattcggaggacaattggctgcaggcgccgaaggataagccattccctgtcctcttcgaacgcaaggcctaa

SEQ ID NO: 35868 - protein, 287 aa, DROSOPHILA
MQSVNRSLNENGYIVIEDFLTAEEVDSLYQAGRALCLDAPQNNRKIFSTIKQEDAQGKELYFMESGDKVRYFFEKGAVGDEGQLLVDPMIALNKVGHALHVEHPAFNAITFSNRVREICWQLNYNKPAVCQSMYIYKNPGVGGEVTPHQDSWFLHTDPNSAVGFWLALEDCTLQNGCLQFIKGSHKSGVHRRYLRNPDKDASELMVYDRAAPIYPQSSFTPMQVSKGTCILIHGNVVHKSEPNRSQKSRHAYTFHVIETENNVKYSEDNWLQAPKDKPFPVLFERKA

SEQ ID NO: 35869 - DNA, 3464 bp, DROSOPHILA
ccatgtagatagttccattaaggtgatccacctcgtgctgggcgatccgtgcgttccagccctccagttccatttccgacggagtgcccagcttgccgatcccccggatccggaccttatcgtaccgttccacctcagcggaatagcctcgcacactcatgcaaccttcgggatgcttgtttacttggctgctgattatctccagctccggattaatgaagacctgcaagcaaatgatttatgatgagaaatcacgggattgttgctgcacataagcaatatttttgtatgcagaaatttagtttctcaaattcatacgtttataaaactgcatagatttacatatatttttcgaacgcgaaaagaaaagctttacttacggccaagggcagtatggacatcttacgctcctcgtagatttccggcttgaattgctcttgctttccctctcggaattccataacgataatacgcagcggtattccaacttggggcgcagccacgcccacgcaatcgtagtgacgtaacacctttaccatgccgtcaataatctggttgatctccctactatcgatgtcctcgggcggcacctcttctgccctttggcgcagaacaggatccccaatttgggtaaaatgacgatatggcggagcggacatgattctggtcggaagaagatctctactgaaccgtgtctatcgagcaactactgcacagagctgtcgaggtggacagattttgatacgatagccttatctggggatcagctgatctgccatttgaaacactgggaacgataagtctacggttcgcattttaaagcggaaatatataccttaaaaatccaatacaattttttaaaaatactagtaatatcctacaatattagtaacaacaatattgccaagctttcaagatttataagtattttattcacgaataaataattttgaagtatttgaagtctcttgaaaacctaatggatgtgtacgacctcaaatcaatcgaaatagtattcctgtggcgttttcttttggcgcggcgaattgaagcccccgatccgcgaggaggtgatgctaacgttgtccggttcatatggagatcccttgcgcagcctggacttcaccttaaagtaattggatatgacctggtcgaccttggttaccggtaccttttcggccagttccttctcgcaccgggataccacgttggtgagcagcagtcccccggagcgatagaactggacgagcttgtcccgcttgagccacttctgcaggatctgcacgctgtgcggctcgtagatgcgatacaccttgtagaaatgctcgtagttttcattcatcttgcgcgctttcaaggcgtcgatcttgggaatgtccaagtgcggctggcgaatgatgtggtacggatcgtagccaagcgaaaagtttgagtagcgaactgtgggccagtccaggtctaggatggtgttgtacagatccttcggatgtcccagtatgccgtgtgccacatcgatcatacgcagctgtggtcccggcacaatgtactccagctccatctcggcaatgcgcttgtcgttgcctcggtactttcgctcgccaatccacaggatgggcatgtcctcctccgccacgtgctccaactcctggacgagcggcgatatctgggtgcgatagttaacgattttatggttccgaccgtacagtaaactgcgctccgccggcgtaaagctcagatactccggacgtgccataacaaagtgatcggaacgaaacagacggttcatttccatctcaatgacattgtacgcacggcgatgcatgcagatccaaacaatctgggtcatcacggccagaaactgctcgtggaagacgcggtcgcgactggtatccgaaatattgataatctccttcatatggtagtatttggccatatcgccctctcccttcagaatcacactgtagttgcgggccaccaggaggcgatactgactgagatagatcgagaatgtcttcttcatatcgatggtctgatcgctctggatctgatcggccaattcgtcgcgccgcaccagcacaaactccaccatacgcagaaagtattcgaaataaatgatgagcgcatggatcagacggtgaaccgccgggcggtgcatgaactccacgaaccggtaggtcagaaaatcgctgggcatcaggaagaggaccaggtcacggatgtcgttgatcaccaaggtgtcaaagtcataggtgcccgtatcccgcacgtaagcctgccggaagataagctcctcctcctggtcgatgatgcgcaggaacttatagccattggtggtgatgtagcgctccctggcattctccagatcgttgtgcggctcgaattccaggcaatccttttcggcgctccaggaccacttgccactatagtacttcggtgtgtagttgtccacatggactctcttcatgactcagtctttttttgaatatttttaattataattgtgtttttaaaggttttttctgttatgtatttctgtatctgtttctataattagtggtaaagtgtgtacaaagttaactgacagaatttaaaatgaattttgattacagcattcgcaaatatgaaaataagctttcataaagcatggcaaataacttttaaaatgattataatgtattacatactcgaaaatatatttgaatttgtttgaattgatcgacaagtaaatgaatttgcttctttaacgtctttggtaaaataaataccatttgttaaaggaagctaagagtgtggtgcttgaagccataagctttaatttatagtcaacatttgtatagaaacacagaaaaagctttcatgttttttattgtggcacttggggctccggattaactttagctttaagtttaaataaattacttgctgttttcgagcattacaaattaaacaattcactaaatttacaacatattttcgactcttattttattgcttcttaaaatttttaaatgcattttttctattcttagtaacagtgtagtctagttatattcaaagtaaaaatatttttgaagtgttatcataaatgatatttcatttcaaaatttaagctcagatgacagataactttttttcattcacactttttaaaatggccccttattatcacagataattatttagtgaatgcctgtttacgcttttcaagtgacacattaagtggtgctttcaaactaaatgaaaaacaacttggtcttctagatagaaattaatgtttagttctttcatcttaatgaacttaactcgttgcaaacggatgatagaaggggctcaacaaaggagaaaagaaaaggaaccatagttatttgcaccattgttttctttgacatgttgtcaacaattccaggacttgttaaaacgccgctgagcacttaacgcttgaaaggctcacataaaaataggtg

SEQ ID NO: 35870 - DNA, 1365 bp, DROSOPHILA
atgaagagagtccatgtggacaactacacaccgaagtactatagtggcaagtggtcctggagcgccgaaaaggattgcctggaattcgagccgcacaacgatctggagaatgccagggagcgctacatcaccaccaatggctataagttcctgcgcatcatcgaccaggaggaggagcttatcttccggcaggcttacgtgcgggatacgggcacctatgactttgacaccttggtgatcaacgacatccgtgacctggtcctcttcctgatgcccagcgattttctgacctaccggttcgtggagttcatgcaccgcccggcggttcaccgtctgatccatgcgctcatcatttatttcgaatactttctgcgtatggtggagtttgtgctggtgcggcgcgacgaattggccgatcagatccagagcgatcagaccatcgatatgaagaagacattctcgatctatctcagtcagtatcgcctcctggtggcccgcaactacagttttctggccgtgatgacccagattgtttggatctgcatgcatcgccgtgcgtacaatgtcattgagatggaaatgaaccgtctgtttcgttccgatcactttgttatggcacgtccggagtatctgagctttacgccggcggagcgcagtttactgtacggtcggaaccataaaatcgttaactatcgcacccagatatcgccgctcgtccaggagttggagcacgtggcggaggaggacatgcccatcctgtggattggcgagcgaaagtaccgaggcaacgacaagcgcattgccgagatggagctggagtacattgtgccgggaccacagctgcgtatgatcgatgtggcacacggcatactgggacatccgaaggatctgtacaacaccatcctagacctggactggcccacagttcgctactcaaacttttcgcttggctacgatccgtaccacatcattcgccagccgcacttggacattcccaagatcgacgccttgaaagcgcgcaagatgaatgaaaactacgagcatttctacaaggtgtatcgcatctacgagccgcacagcgtgcagatcctgcagaagtggctcaagcgggacaagctcgtccagttctatcgctccgggggactgctgctcaccaacgtggtatcccggtgcgagaaggaactggccgaaaaggtaccggtaaccaaggtcgaccaggtcatatccaattactttaaggtgaagtccaggctgcgcaagggatctccatatgaaccggacaacgttagcatcacctcctcgcggatcgggggcttcaattcgccgcgccaaaagaaaacgccacaggaatactatttcgattga

SEQ ID NO: 35871 - protein, 454 aa, DROSOPHILA
MKRVHVDNYTPKYYSGKWSWSAEKDCLEFEPHNDLENARERYITTNGYKFLRIIDQEEELIFRQAYVRDTGTYDFDTLVINDIRDLVLFLMPSDFLTYRFVEFMHRPAVHRLIHALIIYFEYFLRMVEFVLVRRDELADQIQSDQTIDMKKTFSIYLSQYRLLVARNYSFLAVMTQIVWICMHRRAYNVIEMEMNRLFRSDHFVMARPEYLSFTPAERSLLYGRNHKIVNYRTQISPLVQELEHVAEEDMPILWIGERKYRGNDKRIAEMELEYIVPGPQLRMIDVAHGILGHPKDLYNTILDLDWPTVRYSNFSLGYDPYHIIRQPHLDIPKIDALKARKMNENYEHFYKVYRIYEPHSVQILQKWLKRDKLVQFYRSGGLLLTNVVSRCEKELAEKVPVTKVDQVISNYFKVKSRLRKGSPYEPDNVSITSSRIGGFNSPRQKKTPQEYYFD

SEQ ID NO: 35872 - DNA, 2444 bp, DROSOPHILA
tgaccccattgttcttcccttgtttaactttaacttcgtaatttctccaggatttcaaagcagaaacaaggtgtcactaatggttaaaacgacagtttaaatggggaagacgtttcggccagtttgaccaattggcgggaccacaagaccatcaatcaaatgcgctcgggtgacaaattcacggctatgcgttcccggcaaattatgcacacagaccgcagaaccacggcggtcccgaagttccccgaagcccagtttatttgcctgtcattgttggccagaacatacatacatgcctacacagataactacgaatatgctgcatagccggaaatgggatgtcggatactatgttcgtgctcactgagcattcaacccttgccaatcgacatacatctcaattgtcatgctaatcttgactgccgcatgaaatccgttctgagaattgaattgataagcccgatgatctttcaagccagaatgggtgagttaattgagacgtgatgactagttagatggctcaaactgcggccaatatgaaaacaataaacaaagacaaatatttgtgttctaatttgtagtgttcattattcagatataaattttgttaaatttgctgagatgcttaaaattccgttgacatggttacaagtcctataagacggagaccttgacgccagctttgaagcagctcgttcggactaagaaattcctcttgctaaaaatgaaaacggagataaaatgtcaaaacgttacgctcgacattataatcgaggtcattaatttgccaacttggctaatggctgcaaagttccctcatcccacaaattctttgccaagttggccctggcaacgaataaaacgagatacgagtatacattgtatgtatttgcccgagatacgtgaaccaaagaaatgtatttagctacttgagacgcagctctcaaaaaagttatcgttttgttcgagaaaaaacagagaccatcaattttggagtatttcaaaggctactggtagcctcatcatccactaaaacaggcaaacagcgctgcgaggcctcgtaggcgtgcatcttgatcagcattgtggtgaaaatatccatgggcaaggtgctctggagcaactgcaacagttttgacggctggccgcagacgagtatcgcgttgattagatgctccacgccggcctcaacatcgccgtttgtgatcagggtctcgcccttgtgtatctgggtcatgaagtacacttcgacgtcccgctcgctcatggaaaccgatgccgtggacttcacggatgccaatgagcgttgaatcctgcgctcgtgcaacttcctcttgaaatctggatcactccgacgctgtttgtcgaaatatacgcaatagcccatgaagagtatacccgatatggccgccagcaccttgaaagttcccgagactccaatcattttcgaatttaattctttacgtatttctgtttctccttgttgaaaagtcaaaccctgtgtattgaagaatgtgttcagtagaaactgaaacgataggaaatggcttgatagatatttcgaaactaacacgatctatcaagccaacttaagctacagctactatttcaaaaccagcataatcgtctattcgaatcagctatgatttgggtgcataattttgtatagttttcatatatatatataatattcttctcataaagcttgtaatgggtatcggatagttgagttgttcaactacatcgtcttctttttggtacttatccctctttattagggcaataacagggtgctcttaaacccacgtgtatatgcaaattgatgaccatttaattcgatacgatacttatcaaatgagcgacccaattcgatgtcagaccactctaacttgctgtggctgttgcggtgtgaccgcaggacttagcctcagtctgttgccaaggcaacgatgaaccatatgaacatggatggtaatagaatcttttcaacttttggtttgccttttcaatcgttaaaggcttttttgcggctgccatgacaatgaaaaaggagtctgacaagtggggcaactgcgcaacaaacatcaacttattatgcaaattgttattcagcgaatggggctcacagttcccgtagctccgaaaccatcaaatcctattacgtcgaataaaaaactctggccaccgatttcactgggagttcgctgtgcaacaagcaatttaacgcattagcgcgactttctcctttctctgccaactgccaaatcgtggcaataaaaatgtagctctttgtttgctggtgtctggttttcgggtttgattttgaattcggtttgggttttgggcttgagtttcgtctctatatatcgaatgtcctgcgatgaaactgtttgtgattcaattagatagttgaatctttcccaagagggttttgatggggttag

SEQ ID NO: 35873 - DNA, 444 bp, DROSOPHILA
atgattggagtctcgggaactttcaaggtgctggcggccatatcgggtatactcttcatgggctattgcgtatatttcgacaaacagcgtcggagtgatccagatttcaagaggaagttgcacgagcgcaggattcaacgctcattggcatccgtgaagtccacggcatcggtttccatgagcgagcgggacgtcgaagtgtacttcatgacccagatacacaagggcgagaccctgatcacaaacggcgatgttgaggccggcgtggagcatctaatcaacgcgatactcgtctgcggccagccgtcaaaactgttgcagttgctccagagcaccttgcccatggatattttcaccacaatgctgatcaagatgcacgcctacgaggcctcgcagcgctgtttgcctgttttagtggatgatgaggctaccagtagcctttga

SEQ ID NO: 35874 - protein, 147 aa, DROSOPHILA
MIGVSGTFKVLAAISGILFMGYCVYFDKQRRSDPDFKRKLHERRIQRSLASVKSTASVSMSERDVEVYFMTQIHKGETLITNGDVEAGVEHLINAILVCGQPSKLLQLLQSTLPMDIFTTMLIKMHAYEASQRCLPVLVDDEATSSL

SEQ ID NO: 35875 - DNA, 4165 bp, DROSOPHILA
ccagcagatagtgtgaaaaagatacccgctgcataaatcgaaatcgaaatcgaatcgaaagtgaaacaaatgttgtgtgccgttagttccaaattggaacttccaatgtgtaattaagtgcatagtttcgtagcatacttagatgtgccaatttgaatagtttcatttgactgatattcattggtttcgtgaatattaaaaacatactacacatttttaattaattaaccaaactgatgctgaattggctatgaatttagaatacccttgctgagtaggaaaaacatactatagatgactcaaggcagcaaattgctttcatagtcttctgtgggttggtttgacaccatctataaattgaaccgaaataagtgcagcccgaactaaggacatgtctcaatatgcagaggaaccatatgtgcgatctgggagccatagcaccaacaactggcaagggagacgccccaagtcaacatgtgtcaattaccgcttgacacatgaaataggttagtttccccgagtcgaggaggaaagtgcccggaaataggatattctcgttgccggttcttggtgcgaaatcaagtatacgccgtgtgtgcatcatggggagattcccattgattctgtcgccagtcgatggcaacaaactttagtgctgatttatggttgcggtgcggttagaaaaatatgcaggggaaaagttttcgccagagggcatgtgctggtggaaatccctttggcagccagcgaagcgcgaactgcgagtcagcattgcatatgcaaattaattggtaaccgcaaaaacataattaccggcagatatatatgttttccccaccaatcaaaaggcttcaagaaattaatcagaaccgtctggcatgtgtttgtctgtgattcaaaggtaattaagtaaaattaaccacacagtcgactgtttgttattaattttattaattctcccagaattaatggaaagggatacaattaatcacagccaagattagttaagtgattgctcatcgtcgactttaaggaacagcgaaaacagaaaggcaactgcggtaagggaatagggattatctgataattacttcacctatttaaatgtaatactacgcacttgacatcagtgagcaaagccagagaaacggagccaagcagctgagttgcatgaaaaccggcagtaacatattgccacttacagatccaagtctcccaaaggtcatgatcagcagtaaaaccatcgtcctggcaaataaagaaagatgttaatcttgtttttgttattatgaatatcaaacctcattagggtgggaaatatcaccacagacattccaatgattgtagtggcacaaatgcccatcatggtcaggtaaacggcggaaaccatcatcgttaccagcgaagtcttcacaaagtacaggctgcccaccaggaaaatgcagatgaataggaacacctctgtcaggagctcacataaataaataattcaaatggagatgcaaattcgaattggaaatgtttccaattgacattatgaaacgaacaataaatcaatgttattagcatagtcattgaggtattttataatatttaagactcgcgttgcatcccaagtataagtacagtactcactcagtatgtgattcgagaccacttggaatcgcattaagggaaaaatgatcagaaaaccgaccagaccaattccagctaccgtgatgttattcaagtagctatccggatcatgatgctgaacgatagaatttattaccttagattctggaagcccataacaagcgatctcctacccactagagcgcactccaccctcttctcctcctcatccatggatttcgcatttgcattgtgttccaaaacggcgcacatgctcgtgtcattcgcacccaaagtgtccatggcgttcatcgtggcaaagatctgtggcagccacagacgcacggagttgacactaggataatgtatatacaaaatgcaatcacataagataccaaagatacctaccacataatctggcagaaatgcaggcaataaacctgcagtgaaatggccaagtagggactggagaacataggcttcagctgcttgaatccatcgatgaacttgctctgggcccgactaaatctttcctggagtgttgatggccgaccagtaccatcaagatcatcagaccgatcgggcgtgggatcggtgagatgttttatctgttaaattaataataaattattttgaaaaaaaaaaataggaaaacgtatagaaaaattgttagtaccggatagctctctctgctcttccgcttgttcagcttgtagatgcgctgcaaggagtccaaagcctttttataatttccctgagacataaggaacttggggctctcgggcaggaagatgtgcagaaaaccgctgagcagactgggcgccgagctgaccgccaggaagacctgccaggtgcgaactgctgtcagaaagtaaagttcataattgagggcagatggtgaaggactctcacccacacttcatcgaggagaccgtgaaaaggatgggcaccggtagcagcaaataggagagcaggggcaaaatcatcgatccaatggaaacacacagacccacgaacagcatgatgtaaggccgatgctttttgccatggaactcggccaggtagctgaccacgaccgcaaatggaccgcagatgctagaatggggaagttcatagcataaatgataacattttaattttaatttggaaaaccgcttacattaaaccatcgaagaacttgaaggccatcagttgggcagtgttctggctgagcgaagcgcacaggacgaagaagccatcaagccagccgcccgaaatgaggacgggtcggcgtccaatggtgtctgctataaatccccagggcaccgccgagatgatcatgcccgcataggtcaccgcatgcagcattcccttgtccacgatgctcaggtcaaggtcacactcggcggagggcatcacataggacagcgccgaggccgagaagaccatcgccgtgaggcagggtaccgcgctgcacaggatgaacacgttgaagagcccaaagccacactctgcgattgccgtctcgaagtcagcaggctcatcggtattatcctttgctcgatccgccatctcttacaattaataagaatattttgttttgggggtgggcagtgaaaattttgaaaatgactagaaagactcctggatagttacgaaatggaaagggacttcaaaatattgtggcatatgggattttaaaatttataaattcgtgtacttgatactcaatatgctttctataactaagaaaaattgaatcaaatattataggtaataattatcgctagatcattgttttcagtacattatctcgttatgttcctatttctatgcaatttgagagatacttatgcatttccagaaataaaaggcatgccagcactcataattagcaattttattcaatattttaagattaagaggctaacattgagtgcacatttggtgaaagttcgtgttgtttgggtttcactaatgcactcaatctgataaatagcatccacttaaaggatgctacgataagtcaattcaggcagcactaatttccactttgtttaatgttatctgtagttgatcactcacctgccaatttacctgccaacacagccacccaccaaaacgccaaaccaactgaataccgcctgatacacttaattagtgctaatgagatttgcatgtctccaacttccgccgtcttttgtccttgcccaccagtggagtcctttgagggatccgcagatatgtatttgcccccatctggcttaagcacgtaggaacttgaatggagctctcataacatcgtaatttgtacaacagtaaagatatatttggtttaattacttagggtatgtataaatagttgttcagcgcctatcttatccagttgagtcgttatctctaatttgtaaaactaaacaaaagctaatgtcgcaagatccgattctaaatgggcactcctaggtctagtttttattatcttattatttgtatttcttattttgttctaagaaaacgttgcctttgccggatcaggcagagatattgacaggatgccagatactgcaataaa

SEQ ID NO: 35876 - DNA, 1467 bp, DROSOPHILA
atggcggatcgagcaaaggataataccgatgagcctgctgacttcgagacggcaatcgcagagtgtggctttgggctcttcaacgtgttcatcctgtgcagcgcggtaccctgcctcacggcgatggtcttctcggcctcggcgctgtcctatgtgatgccctccgccgagtgtgaccttgacctgagcatcgtggacaagggaatgctgcatgcggtgacctatgcgggcatgatcatctcggcggtgccctggggatttatagcagacaccattggacgccgacccgtcctcatttcgggcggctggcttgatggcttcttcgtcctgtgcgcttcgctcagccagaacactgcccaactgatggccttcaagttcttcgatggtttaatcatctgcggtccatttgcggtcgtggtcagctacctggccgagttccatggcaaaaagcatcggccttacatcatgctgttcgtgggtctgtgtgtttccattggatcgatgattttgcccctgctctcctatttgctgctaccggtgcccatccttttcacggtctcctcgatgaagtcagttcgcacctggcaggtcttcctggcggtcagctcggcgcccagtctgctcagcggttttctgcacatcttcctgcccgagagccccaagttccttatgtctcagggaaattataaaaaggctttggactccttgcagcgcatctacaagctgaacaagcggaagagcagagagagctatccgataaaacatctcaccgatcccacgcccgatcggtctgatgatcttgatggtactggtcggccatcaacactccaggaaagatttagtcgggcccagagcaagttcatcgatggattcaagcagctgaagcctatgttctccagtccctacttggccatttcactgcaggtttattgcctgcatttctgccagattatgtgtgtcaactccgtgcgtctgtggctgccacagatctttgccacgatgaacgccatggacactttgggtgcgaatgacacgagcatgtgcgccgttttggaacacaatgcaaatgcgaaatccatggatgaggaggagaagagggtggagtgcgctctacatcatgatccggatagctacttgaataacatcacggtagctggaattggtctggtcggttttctgatcatttttcccttaatgcgattccaagtggtctcgaatcacatactgaaggtgttcctattcatctgcattttcctggtgggcagcctgtactttgtgaagacttcgctggtaacgatgatggtttccgccgtttacctgaccatgatgggcatttgtgccactacaatcattggaatgtctgtggacgatggttttactgctgatcatgacctttgggagacttggatctttgcctttctgttttcgctgttccttaaagtcgacgatgagcaatcacttaactaa

SEQ ID NO: 35877 - protein, 488 aa, DROSOPHILA
MADRAKDNTDEPADFETAIAECGFGLFNVFILCSAVPCLTAMVFSASALSYVMPSAECDLDLSIVDKGMLHAVTYAGMIISAVPWGFIADTIGRRPVLISGGWLDGFFVLCASLSQNTAQLMAFKFFDGLIICGPFAVVVSYLAEFHGKKHRPYIMLFVGLCVSIGSMILPLLSYLLLPVPILFTVSSMKSVRTWQVFLAVSSAPSLLSGFLHIFLPESPKFLMSQGNYKKALDSLQRIYKLNKRKSRESYPIKHLTDPTPDRSDDLDGTGRPSTLQERFSRAQSKFIDGFKQLKPMFSSPYLAISLQVYCLHFCQIMCVNSVRLWLPQIFATMNAMDTLGANDTSMCAVLEHNANAKSMDEEEKRVECALHHDPDSYLNNITVAGIGLVGFLIIFPLMRFQVVSNHILKVFLFICIFLVGSLYFVKTSLVTMMVSAVYLTMMGICATTIIGMSVDDGFTADHDLWETWIFAFLFSLFLKVDDEQSLN

SEQ ID NO: 35878 - DNA, 2960 bp, DROSOPHILA
gtgcgaaagaagcagaaaatcgccaccgatgccgctgttaaaattcaggctggcttccggggattcaaaacacgcaaagaattgaaacaatgcgagcccattgtgtaatgactttgcgcgctggtcgttccacaactctgatttctactgtacatacaaatatttgtattcaaatcctaccgcttagttcaatacgtgtcgtgtaaatagattaatattaactgatagcttccagatgaataaaatactcttactcaagaaaccgcaatcttgaaagacaccactatccattaacgagatccaaattgtttgtgttttctctaggcctatttttggtataccgtgctgtatgtatatggtatgaatacagtgaataaacattttgttcatcgaacacgtagcacttgatggaaactgacgaaacggaaaacacaatacgatagttgcaaagaatggtttttagggagcacaaagttagaggcgtgtcttatttttttttaatagaacctatttaatagctggctagcgaatgtattctttgggattcagtgcatcgacccaaggtgcacacccagcccataaatctgtcaagtgcgtttaaagtttagagccaaactggcagccatccgctcatccgtagttgaatatgtttaaattgaggaaaattaaatgttatgatttactcccggaaatctttccgcttgtttgataacaataacatttcagattaatacatatattttatttagatataattcagcgtttatacttatacgtcgtataatttattttcttttgttcgcctcggcgcttttgatgcgttttcgcatatgtttggggattactctgaaaacttcgcaatcgatttgcactggcatggaattctgcctcattttcagccacctcaattccatgtcagcgctggacttcgcctcgcctggataattaagttaatttaaatattaaaacttgtttactaacttaaacaatttggaaatgattacttaccaacggtcttgcttctctgggtttttgcatttttgtgtgctttgaccccactgactagcaaactgttttcatcatccggagtggaatcattacgaagtgcatccccgcgctgcaacttctggcgcctggcggccagattgctctccaagctgatgccttccattttccggctatgaccctttcgctttcgtgtgtgcatccgatatgcggtttgtatcttcttggcggcctcctcctcgatgaatcgttccaaggactcactgatcgcatcgttgccaaaggatgccttggtgtccaaagtggatgacttggtgccagcactggcccgccgcaatcttcgcctggtaaggaagccacgagctccggcctggatcttcgtggccgccgaaacaattgtggattccgtttcagtggatgtccccatggcatccgccatggccgtgtctacgtcaaagtcctcgctgctgacctttttcggatcaaagtaatcggaatccgtttcagacaacgagtaggccatcatcttttttcgaatgttctccgaagtctcgtcgtccaaacaaaaactactcgcacccataccattagctccgttttccatataactcagagcatcatcgatggtcacagatctgaatagtcctcgcggatcatctcctgcgatggtgtagtgtctcatcaaatgcacccttccggactcctcctcattgagcaactccttctcttggttattttcggatactgcatcaccaaagaccacggaatcgctttgagcagagctctctctagtttcatccctctgcagccggttgtatacgatgatatctccatcctcgatgtccaggctggattgctcctgcagagaactaattggccggatcacgggctcatcgaaactgggatctgttgaagaaatcctttcgtaggactttgagtcacgaagctgggacattttttcaattacttcttctggcttggataacttaacagttgccttatctattgtatctgcagatagtgtgtccaggcccgcagtttcagatatagaagaatctgtattctcgactttttgactagcattatccgattctgattcacattcggaaacattaaccagtgaagcggatctttttatacaaggttcctcaataacttcttcaagaagtttcgcacttggaaacggtcctagtctagaagaatattcaatctcattttgcagaaaatcattgagcagttcttgagttgaggcgatgtccagagctaaagaaaatatagtaatctcacttgagcgattgacaaacattaaaatatttttcaaaacctacactgtacgagcccgccaaaatcagattgcgataggagaaggggatcctcaactgaatcgaacagagcttcagaagctttcgctaaacctgctaaaccagaagagattgcattatccttttcggatgcatcgcctagacagtcatcgattatagtaccaggatttaatttagattcaagcgagccatgcgatctatctactgtttcaactgattctacttgcgtgctggtggtgagctcggctttacttgtggttgcaattgtagctggatccggattggtttccacctcaacaggtccttcaacgactccctggcttggtattatgcgagttgaccccacaaaccactcggactttggttggatattagaagtatcttctaaagtatctcctggatctccgatagcttcctgaattaaacttcgtgatggtgttcctgcagttggatagttggcggtctctatggccgttatgcgggaactggtaatggaatcaatggagctatcctcgaaattttcaaactttcttctttccatatattgtctgaacgctctttgtattattagagctgcatttgacttttctacgagatcatcctttaatggatgattgggacttgcctgagata

SEQ ID NO: 35879 - DNA, 960 bp, DROSOPHILA
atgtcccagcttcgtgactcaaagtcctacgaaaggatttcttcaacagatcccagtttcgatgagcccgtgatccggccaattagttctctgcaggagcaatccagcctggacatcgaggatggagatatcatcgtatacaaccggctgcagagggatgaaactagagagagctctgctcaaagcgattccgtggtctttggtgatgcagtatccgaaaataaccaagagaaggagttgctcaatgaggaggagtccggaagggtgcatttgatgagacactacaccatcgcaggagatgatccgcgaggactattcagatctgtgaccatcgatgatgctctgagttatatggaaaacggagctaatggtatgggtgcgagtagtttttgtttggacgacgagacttcggagaacattcgaaaaaagatgatggcctactcgttgtctgaaacggattccgattactttgatccgaaaaaggtcagcagcgaggactttgacgtagacacggccatggcggatgccatggggacatccactgaaacggaatccacaattgtttcggcggccacgaagatccaggccggagctcgtggcttccttaccaggcgaagattgcggcgggccagtgctggcaccaagtcatccactttggacaccaaggcatcctttggcaacgatgcgatcagtgagtccttggaacgattcatcgaggaggaggccgccaagaagatacaaaccgcatatcggatgcacacacgaaagcgaaagggtcatagccggaaaatggaaggcatcagcttggagagcaatctggccgccaggcgccagaagttgcagcgcggggatgcacttcgtaatgattccactccggatgatgaaaacagtttgctagtcagtggggtcaaagcacacaaaaatgcaaaaacccagagaagcaagaccgttggtaagtaa

SEQ ID NO: 35880 - protein, 319 aa, DROSOPHILA
MSQLRDSKSYERISSTDPSFDEPVIRPISSLQEQSSLDIEDGDIIVYNRLQRDETRESSAQSDSVVFGDAVSENNQEKELLNEEESGRVHLMRHYTIAGDDPRGLFRSVTIDDALSYMENGANGMGASSFCLDDETSENIRKKMMAYSLSETDSDYFDPKKVSSEDFDVDTAMADAMGTSTETESTIVSAATKIQAGARGFLTRRRLRRASAGTKSSTLDTKASFGNDAISESLERFIEEEAAKKIQTAYRMHTRKRKGHSRKMEGISLESNLAARRQKLQRGDALRNDSTPDDENSLLVSGVKAHKNAKTQRSKTVGK

SEQ ID NO: 35881 - DNA, 3814 bp, DROSOPHILA
actaatttaaaacagacttttttgttcgcgatctccacggcaaccaaactgaaatttcccgtttgccattcaaagtgaagcgccagcgggacagctgttttaaaatttcccctttgtggcgcgcgtttaaaaacggcatctctggtgaaacggttagggaaatttgtaacggtcatttaaaaaaatttcaaataattataacaaatcggaaaattatataataaaaggtcttagagcccgatactgggtatttcaaaattaattttgatatattatgtcacacaaaaataaataaaacagccatttttttcgtatttatttttttatatttttgttcctattttttcgttgcaaagttaaaatgcaacggcgtacaaagaacactgcagatactaagagaattcaatcgcttaaggccttgtttaaaaaagtggttcgcctgatgagcctaaatgatccctggcgagaaaacgaagatgatccacgaataacttcaaacgtcatgaagaatttatctgccagagtgcgcacaaaatccaaatcgggattcctaactgcagcggtataacataattatttaaaatatatgtaacaaacgaataattacttactttatgacaggataaatctttgattcgaacgccgcacgtgattcgaacaattccggaaagaatgaaattatgtaaactgtttgctaagttgacatgcttggcaggcttcagtccagtgaagtaccttttttgtatgatgtgactagcaactgactttgggtttctttagaaaattcgagctcgactagttcctgtggtccgtttgatgcccgtggatgctggtcgcattatcataaggcaatcggatgctcctataaccgtgttttttgtactaacaggtgaagtacatatgattaaaaacgaaaaaaaccaggtaatggctgaaatggctgacgtgtataattacatgatcctaactcttggcttgatagaagggagaaggagtggtcatgggcttccttggtgctggagatatgatgggtgatgtggagctcttagagggtatcaagcgaactcacaccttcagagcagcaagtgagttattaactgtcttattggatagtagtcatatttaaaaacttttaattatattcttcattctgagagctagcaccagcatagctaacattcttatctcttccaattaaatcacacttaagtatgataagaaagtgaattaggcaaactgcactatttgcggctcatgtcggaataaatgggaaatacatagggccagcacgcgatttgtacgattgtgtttattgggattttgtttggttttgttgcttcatttgcgattgcctgtacccaccaatttaatcagcaataaacaacgttaagtcctaattcgattcaatcaaaatgaataacaaaataccccccgcccgagaccgtcacgaatccgccaggtattcgtattcagtagtataaactattcagtcaaatatataggttggcccaaaacaacacccgccttcctttggcgcattggcttgatttttcggctgttgtgcctgttacacctcgtgctggcaatcttaaaaaaaaaaagaaaataaatacaaaacagctgcacgccaccagcaccagcagtacttggccccagctccatggatttcatgtgccccgattcgatgggagtcgccaattcgccagttcgccagcaactattgaacgattcactttgcagcctactgcgaactgctcgtcctgttcgactatgattttgcaccgattcttggggcctacatgaccaagatttgggaggagaagaagcgggccctcaaggcactggactactttgactttctcgatgacgatcaggtaaaaaatcgtagaagagcttctactctacttttactactctacttcactctacagagttcttagaaacattatgtcacattaccaaccatttcactcattataaggacaaagaatattaagtcctacctataaaccttcaaaaatatgcatttttataaatttcaaagcatttcttgatcaacattcatttcttaacaatcataaaaatatttacaatctaatatcgaaacctccgcatttataaacaatgcatttctgtagatcgtggaagcttgccgatatgggaggctgaagcaattcgatccactggataccatattctgtgaggatataggatccatgaccaatgtccacttcgtgctcagtggagaatgtctgatactccagtgtctgaatataaaggtcagcaaattcgaaaacctttgatttctacttaaaacctttactcctattctaggttactatgaaaaggggtaaaaaggtatatgatcttttgccggcgtcggaaggcgatgtgtccaaaatgtttagaaaagccgtgagatcaacattttcctcgcaaagtaccaacgaagatcagtcaaaaatagatattcttgatcttgtggcaagtacgagttccagttccacgggagatgcgcaaaaaagtgctctcaaccgcaaggtaagctcatttttaaatataagtaactgcaattatttgggtatattctatccgaaacccgctgtgttattgcttgatttgtagtttctttcgttttttatttgatgtaaatattaatttaactaatatacagatgcgaaaaatggatctaagagatatagaaaaaagatgcggcatgatcaaatcgccgccacagaaatcgcgtttcacttggcgccgctcgattcgaaagtcaacgatgtccgtattttctcacagtgaaaataggttgatcagtgaagatgtatttgaggatttttgggaaatgtatgagaatgaaagtgatatcgaatcatactcatcgggctcagactacactgacgtggagtttaagcaatcctttcgttttggtcctgctttgaataatactgcggaattggattacgatgggagttctattttttcgtcatccctatctagtttttcctcgagcagtggttcatgcgtaagttcctttagggaaattagtacatgaaaagtgttccttaaatataaggtgaactctattctgaatatattacaccattctggcattttttttgcagacacccacatttgaaagccatttcatcgatgtgggtaccataacatttggaggcattttcggcttgggcgagaaaatggaaaatcgcgtgataatggcaaggagcacggttcaatgcctgatacttcccagatttttcctgctggaaaagaaacaaaatcccggcaatgtttgggagcgcagactgttgtatgtgggcgtcatggttccatccagggaagccctttttgcccactatcgtaaagcttgcgactggaagaaattcaaaaacgacctaatttccgagaccttgaagccctccgataatgacatcacacacatcgaagacgttcccataatttgcagaattgtagaatcaccagaggatctcaattagttgttgaaaataaattgttgattatggggcggttatgtattttccagttgagtcaaaagtatcagctaattatgacaatttggttcagctgaaaaatataacaacactcgcccgataaattaaactgtatttatataattgcaaataaatggttgcaataaatagttttgagtctattaaatggaccgttccgaatatgaactaagaccaaccgctgaaaattaagttttgccaaaataaaacgaatcaaaatttcgggatcgattttgttgtttattgattaacgttcagcttaagactaaaaatcaaatgaa

SEQ ID NO: 35882 - DNA, 942 bp, DROSOPHILA
atgggcttccttggtgctggagatatgatgggtgatgtggagctcttagagggtatcaagcgaactcacaccttcagagcagcaacctactgcgaactgctcgtcctgttcgactatgattttgcaccgattcttggggcctacatgaccaagatttgggaggagaagaagcgggccctcaaggcactggactactttgactttctcgatgacgatcagatcgtggaagcttgccgatatgggaggctgaagcaattcgatccactggataccatattctgtgaggatataggatccatgaccaatgtccacttcgtgctcagtggagaatgtctgatactccagtgtctgaatataaaggttactatgaaaaggggtaaaaaggtatatgatcttttgccggcgtcggaaggcgatgtgtccaaaatgtttagaaaagccgtgagatcaacattttcctcgcaaagtaccaacgaagatcagtcaaaaatagatattcttgatcttgtggcaagtacgagttccagttccacgggagatgcgcaaaaaagtgctctcaaccgcaagacacccacatttgaaagccatttcatcgatgtgggtaccataacatttggaggcattttcggcttgggcgagaaaatggaaaatcgcgtgataatggcaaggagcacggttcaatgcctgatacttcccagatttttcctgctggaaaagaaacaaaatcccggcaatgtttgggagcgcagactgttgtatgtgggcgtcatggttccatccagggaagccctttttgcccactatcgtaaagcttgcgactggaagaaattcaaaaacgacctaatttccgagaccttgaagccctccgataatgacatcacacacatcgaagacgttcccataatttgcagaattgtagaatcaccagaggatctcaattag

SEQ ID NO: 35883 - protein, 313 aa, DROSOPHILA
MGFLGAGDMMGDVELLEGIKRTHTFRAATYCELLVLFDYDFAPILGAYMTKIWEEKKRALKALDYFDFLDDDQIVEACRYGRLKQFDPLDTIFCEDIGSMTNVHFVLSGECLILQCLNIKVTMKRGKKVYDLLPASEGDVSKMFRKAVRSTFSSQSTNEDQSKIDILDLVASTSSSSTGDAQKSALNRKTPTFESHFIDVGTITFGGIFGLGEKMENRVIMARSTVQCLILPRFFLLEKKQNPGNVWERRLLYVGVMVPSREALFAHYRKACDWKKFKNDLISETLKPSDNDITHIEDVPIICRIVESPEDLN

SEQ ID NO: 35884 - DNA, 3507 bp, DROSOPHILA
ctggaaaattcactggattgagttccgaggcatttagatagtacttaaggtgaaaacacaacacgttacttaaagaaagactggttcctgtgcgtgaactaccataatatggtattcgtgcgatggtcgattgtattcccagaatatttaggtcatctttttattaccaatctgttggcgattcttagtatttagtagaaatttccatttatagagcgcgtgtaatcagtctcaagtgtgcaggaataaagataccgagttttagtatagaataattgtgtgttttattaatattatcttacgattattacgtttaatttatagagcaaagtaatcgaagtaaaaagcaagcgtttaagtttaaatacatattattaatcatgtagtctagatccgaatatgacaacaatcgttatagatttcaattattttgttgatactattacccggaacaatttcttttgcacttttaaagcggctatcgctgattattaacttatcagtgttgatattttgcattaatagattacagaaacattaataaacaagtgtgtaaggctctctgagaaattcagtgcaagatagatccatttaagtgccctgctaatgggctaattagctgctaatggctggtatggccaacttggagtgggaaccgcatcaggcgagagcaagttaatcgcgatcgtgaccatgctgctcgctgtaagcggaaacttcccggatattccattacctcactgctccgctggcctgcaccaaatcggagaacacttggatcgtaaatcgcgaatgggccagcgctgattacaagcgtcgaaggtaaatctctatactcggcactagcctgctaaccccttggaagaatgtgcaattattataatagctggtcgaagctacacgctgccagacatatatctatatgtatgtacatatagtcggtgggatcgctggttggcgttaagatcgcgattagattcaagccgacagccgtaacgggatggagtcgtggctgaagatatcgtgcctgctatgcatattcgggtttctccgggaacttcgaccctcggagccataccacgcggaaatcctgatgggcgagtggtatcacgtcacccaggacgaggtcaaccgatccgtttacccggtgggcacatactcctacctggcgctcctaatcttcgtcttcctcattacggacctgctcaggtatacagcccatgcatgaatgcaatctttattggccagcaataaccctccgtttgcgttgcagatacaagcccgtgatcatcgccaatgccactacaggcatctgcatctggggcacactgatttggacgaccactttgagcggcctgcaggcggtggaggttttctatggcttctaccaggcgggcgaggtggcctactactcgtacatctacgccaaggtggacaaacagtactatcccagggtgacctcgcacaccagggcagccatgttcgtgggcaagctagttgcgggaatcctggctcagatggtcattggaatgaggtggatgaactacaagcaactgttttacatcaccgtcacctgttggttaccagttagcaaagtgattcaatagccagttaaccaatgttcccactttcccacagctcaagttgctgcgctgctctgggcattctttttgccaaaggtggagaagagtttgtactttcacaatcgaagcgaggccatagaaggtggaaccaaatcggatggtggtaacctggagaagggttcagagcaacccagtaacgaggaagcgagccaagaaaagaagataccagcgttgcagctcctttggtcccacttccgtagtgcctacactaatcccttggtgatacaatggagcttgtggtatgccatcagtttggctggatttctgcaaatcaccacctatatgcaggtggtatggaagtccttcgagaacgaaccaacagtgagtgagtttcaataatcaatggctttctcatccttgagatttcccctgaagatagcctggaatggagctgtggacgtggccctgacgcttctaagcgctgtgttcgcccttctcgccggttatttccatgctggacgtctgaacaccaggagcagcctgctctcgatggctctgctgtcggtcctggaaggaggttgtgttttgctttcctgctggaccgatgatatatatctgtcctatcttggctatgtgctgtatggaggcctgtttgccttcaccataacagtggccaggtaagcagttcttgatccttttccaacaggtgaaatttaccaaatctcgtaataccttatagctcggagttggccagcagcttggaggaggatagcttcgctctggtgtttggtttcaacacgttcgtgggactcctcctgcagtgcatcctcacatttgtcgtcgtctcggaaaaggccaatctgaatttgaatgtttttcaacagttttccgtctacgcattctattttatagttattggaatagtctattctattgctgttatattgcaatatatatggtcaatttcgaagaaaccaaaagcaattcaggaggcgaattaacaacatactctaatgatgaaaaagtgttcatttatcaaataaaattgttatacatatttaaagtttgtttaataaaataataattggcttgtattctgaaacattattacttttaagaaatatttcccaagctgttgaaacatcgttgatattatattgttttacactttattaaaatgtatatgtttttttatagttatagtttcaaaaaatgaagatatttaatcctacgccgcgaatctaatcagagtgtaccatgtacattatatggccactacaaacttaataatatgtcaaattaaacaagatcatgaacgtcgttattttcaatacaacattcaagaatcagggtgcgattggaatccacagcttggctagcagaactcggtctgatccccgccgttgcggaggaccgctgagacccgccacgtcatcgactcgtagagcatctcaattttgtccaccatgtcctggtcgctgtgccagacgtcgtacaagacggctcgaaactcgctgacatttttgggcgcctgattctgaatcctcggctggatgatggccatcaattgctcgaggagattgaggtcattgcagacactgccctccggtcccatcagcgagtcaaggaagatctcctttggcggcgttgattcgtcgacgaatttaagatcgtccatgttgaagatgttgcgccagtcgcgcacggtccaatcctgatgggcggtggcccaggccaacctcctttttttcgccccctcactgaggccgaaagtgctgggctccttcggctgtggcgatcctctcggttgccgtatgcctttggagcgaatctcgctgatcctgcgctgcaaggtcctgcggctgacctctatgccgtgtcgggccaactcccgctgcacatcgatggaggtgtagtgcggatt

SEQ ID NO: 35885 - DNA, 1155 bp, DROSOPHILA
atggagtcgtggctgaagatatcgtgcctgctatgcatattcgggtttctccgggaacttcgaccctcggagccataccacgcggaaatcctgatgggcgagtggtatcacgtcacccaggacgaggtcaaccgatccgtttacccggtgggcacatactcctacctggcgctcctaatcttcgtcttcctcattacggacctgctcagatacaagcccgtgatcatcgccaatgccactacaggcatctgcatctggggcacactgatttggacgaccactttgagcggcctgcaggcggtggaggttttctatggcttctaccaggcgggcgaggtggcctactactcgtacatctacgccaaggtggacaaacagtactatcccagggtgacctcgcacaccagggcagccatgttcgtgggcaagctagttgcgggaatcctggctcagatggtcattggaatgaggtggatgaactacaagcaactgttttacatcaccgtcacctctcaagttgctgcgctgctctgggcattctttttgccaaaggtggagaagagtttgtactttcacaatcgaagcgaggccatagaaggtggaaccaaatcggatggtggtaacctggagaagggttcagagcaacccagtaacgaggaagcgagccaagaaaagaagataccagcgttgcagctcctttggtcccacttccgtagtgcctacactaatcccttggtgatacaatggagcttgtggtatgccatcagtttggctggatttctgcaaatcaccacctatatgcaggtggtatggaagtccttcgagaacgaaccaacaatagcctggaatggagctgtggacgtggccctgacgcttctaagcgctgtgttcgcccttctcgccggttatttccatgctggacgtctgaacaccaggagcagcctgctctcgatggctctgctgtcggtcctggaaggaggttgtgttttgctttcctgctggaccgatgatatatatctgtcctatcttggctatgtgctgtatggaggcctgtttgccttcaccataacagtggccagctcggagttggccagcagcttggaggaggatagcttcgctctggtgtttggtttcaacacgttcttattggaatag

SEQ ID NO: 35886 - protein, 384 aa, DROSOPHILA
MESWLKISCLLCIFGFLRELRPSEPYHAEILMGEWYHVTQDEVNRSVYPVGTYSYLALLIFVFLITDLLRYKPVIIANATTGICIWGTLIWTTTLSGLQAVEVFYGFYQAGEVAYYSYIYAKVDKQYYPRVTSHTRAAMFVGKLVAGILAQMVIGMRWMNYKQLFYITVTSQVAALLWAFFLPKVEKSLYFHNRSEAIEGGTKSDGGNLEKGSEQPSNEEASQEKKIPALQLLWSHFRSAYTNPLVIQWSLWYAISLAGFLQITTYMQVVWKSFENEPTIAWNGAVDVALTLLSAVFALLAGYFHAGRLNTRSSLLSMALLSVLEGGCVLLSCWTDDIYLSYLGYVLYGGLFAFTITVASSELASSLEEDSFALVFGFNTFLLE

SEQ ID NO: 35887 - DNA, 2870 bp, DROSOPHILA
cgcctcctcgggcatgctatccaagacgatcgtgtatcccttcgatttgatcaaaaagcgactgcaaatccagggcttcgagtcgaatcgccagaccttcggacagacactgcagtgccacggagtctgggactgtttgcggctgaccgtgcgccaagagggcgttaggggcttgtacaagggcgtggcccccacactccttaagtcaagcatgacgacggccctgtacttcagcatttacgataagctcaagcaggtgcgcttctaggtcggacttggagtcggggttaatggcgtctgaaagcaattgtgcgcccaaacggaatctacactgtattttctatttttatatatatttaccgcagcgcgtaaataatattaagacttaggctaactctgttgattagttttcggttgtgcgtatcttttctgggggttctgtttatcatagaccaattgacttggtcagcgctttagtacacacacgaatagttggcgcaccagttaagttatagattgtatgtgctaggttgtagttcattattcggcagagcacctctattcacagacacattcaaatttttatttatcttttgtttgattcgcaaacgaaacgactgcgctggcagttcatttgatatttaattaatattattacacctaagtattcagggaatttaataaatttgactacatcacaacagtttaataacttttatttttaatgagtattgtccctgcctcctaagatttaattcttcatatttttctcataatctttaagcttaaatgtttcttccaattggaataattagttttatgaacatgttattgagttgcagctgttaaactccaaacataatcaatgttaagaaaagctcgctgctgtgagcttttttggttgtgaaatttaaacggtgatgcatgcagtgtataaaaggaaatgtatctttgggaacaacaatacagttacttcagcgatttcccgtccggagagaaaatggctcttgtgaagacgtacaccatcgacaataactccattccatggattctgtggctaccgccattaacggaagtggataggaaatcgccgggtgggaggttcacatttgatgggccaaaggtggtggcgtttcactttgttaagaaccggcacggagacacgttggacaagtggataagtctgctcgatgagttggcacaggagtacgccggtcgtatattgttcggattgcgtgacatctccaacatcggggagttcaatccgaacctaaatcccgacgactttggcagctaccggaagggattgccaccgcgaatctatggcaaggactgtgagggccgagtgtacgatatgcacaagctggtcaacgccaaatacctgagggagttttgcgaccagttgctggcggatcaactcttccgtgccgtagtcctgggcgccactgcctcactggactccaagccaatgaattactttgagttgcgggaagagagcagcagcgatatgctggtgatgctatatgatcctgcctgctactactggcccattcagaagaggatgctgcgcaagctgatccgcctgctggccagcgaggatctgcccattgtgatcgtagacaaggcgaataactacctgggcgtgggcttcacccgttggctgcagatggtcaactgtcacggctccaccatcttcacatcgccacgtcgcgatggctgggatattaagttgtcggtgcgaatggagagcacacgtggctacctgcgatacatcgcccgaaacaggcagccggagctaattgacttcgatgccgatggggagcccagagcactggagcaggccgtggagtatatacagtatttgttttagatcttggcgcactcgactcgaagtgagtggcaagtcgcataaatattataactataatctataactcactttaaggatgagttggcttttcaagccagccatctcggataagtatccgttaaattaccatttaaaaattaaatgttagaattgagcattgttaccaataccactcctatttactaaatatatttatctgcatgtccacatgtaggtacataagtcagcagccaacctaaatataggcgaaaaatttgaaggcgataacaaaccaagctcggaattgctccaaggctccaaaaataagaactattcggtttatagataagagtgtgtattcagaacttgactttgttgttcgcgtccctcggctggacgtggatcatgaccttgatagcgccaccggtgccgcggcgggaggtctcaaacgcctcagccgtctccgtgatgtcgtagtggtgcgtcactagacgcttcacattcaccttgcccgaagccaccagagccaaagcggcggaataactagagatgcgtagttatcagtaattgatttgacccgccgaatctaccgataacttactcattgcagtagcggaagacaccacgaatgtcgatctcacgtgccaaagcgttgatcaggggcagcttgacctcgggtgcacccatgcccacaaccactactactccgccggagcgagtggcctgaagggaaactggttagtgactgataatccacacatacgcagatccacttacgaagatggccaggcgggcactgctctcggctccacagcagtcgatggacttgtccggcacctcgctcatcgtctggtgaaccaccttgacggtctcctcggcggactgatcccgctgcagaagcagcgtgtgtgtggcgcccagctccttggcaacatccaaacgctgctgcaccagatcggtgataaggatctcggatgcacccatagcttgggcagcctaggtgggagaatgagttcaatct

SEQ ID NO: 35888 - DNA, 870 bp, DROSOPHILA
atggctcttgtgaagacgtacaccatcgacaataactccattccatggattctgtggctaccgccattaacggaagtggataggaaatcgccgggtgggaggttcacatttgatgggccaaaggtggtggcgtttcactttgttaagaaccggcacggagacacgttggacaagtggataagtctgctcgatgagttggcacaggagtacgccggtcgtatattgttcggattgcgtgacatctccaacatcggggagttcaatccgaacctaaatcccgacgactttggcagctaccggaagggattgccaccgcgaatctatggcaaggactgtgagggccgagtgtacgatatgcacaagctggtcaacgccaaatacctgagggagttttgcgaccagttgctggcggatcaactcttccgtgccgtagtcctgggcgccactgcctcactggactccaagccaatgaattactttgagttgcgggaagagagcagcagcgatatgctggtgatgctatatgatcctgcctgctactactggcccattcagaagaggatgctgcgcaagctgatccgcctgctggccagcgaggatctgcccattgtgatcgtagacaaggcgaataactacctgggcgtgggcttcacccgttggctgcagatggtcaactgtcacggctccaccatcttcacatcgccacgtcgcgatggctgggatattaagttgtcggtgcgaatggagagcacacgtggctacctgcgatacatcgcccgaaacaggcagccggagctaattgacttcgatgccgatggggagcccagagcactggagcaggccgtggagtatatacagtatttgttttag

SEQ ID NO: 35889 - protein, 289 aa, DROSOPHILA
MALVKTYTIDNNSIPWILWLPPLTEVDRKSPGGRFTFDGPKVVAFHFVKNRHGDTLDKWISLLDELAQEYAGRILFGLRDISNIGEFNPNLNPDDFGSYRKGLPPRIYGKDCEGRVYDMHKLVNAKYLREFCDQLLADQLFRAVVLGATASLDSKPMNYFELREESSSDMLVMLYDPACYYWPIQKRMLRKLIRLLASEDLPIVIVDKANNYLGVGFTRWLQMVNCHGSTIFTSPRRDGWDIKLSVRMESTRGYLRYIARNRQPELIDFDADGEPRALEQAVEYIQYLF

SEQ ID NO: 35890 - DNA, 4301 bp, DROSOPHILA
taaagtatatgcagaatagtagcaccaccacacgcactcgcctcacgatttacgatttgatgttactacacacaccgcgcggtgagtgggagctttttcgcgctgattgtggccagttcttggggaatctcgatatccatcaattcgcaatggcccacaagtgttggtcgcacaccccgggctaatttaattcgattgctgtcgtccgctggcgggttgaataattaaatttcttataaatttacgagatccgtgagttacgcttttttgttgtagctgcagctctctttcgataaccgtgagagcggcggtccgatagcacgaacagctgttgcgcggtgctgccaccgggcgcctggccagctgaagcggttaattcgcagactttttaatcggtattttcaaatgtgtctaatttaaagtttaagttctaaacagcgtttcttaaatgcactgttttcagttgtaatgcaagagttcagaaatgcttggtagtaatggtctttttttatggtttgatgtttgaaaagagaagaagaaactctctgtttgaatatcgccaataatttaagttgatatatttcactacgaataataattaccaaatattttactgtatagataacaaaacgctcagcttagatgtcagcgatgattgaagcatacatacatattttattaagattaaactttagttggcttagcagcataatgctccatatagtatttcgtgtgcttccccgttctgtccttcgcttcttcttcttgtaacctctcgcgcacaaaagtttgcttctcggttcttcggtctcaccaaagacttttgagaattcagtattaagccagagctgctcgcgttcggagcttgcgagctgagtcgccggaaccctcgaatacatcgaatccctacctcttccaccaactatcaataaaacaaacaaaggaacttgatagcgcgataccacccgacaccgtcgccaaggagccaattctggacaggatgagcagcaaggtgaacttcgtcttcgacagcaatcctttggggctctatcaagccggtcagcttatctccggcacggcggaactgattacggagcgccccaagacgattcgatgtaagtgacaccgacatgcggaagaagacgcactacatacatatgtattctaatggactcgaaaccatgacgtcatccccctccatcaccattcaaattctgaatcccataccgttttaccatccactaataaataaatatccacttaatattgttggtgctttgttatccgctggtttaatgttattgttgccggtagatatgcttgaaagatgtgtattgtatatacaaatgtacatatatgtatgtatacataaagtttatatacaacacacatgtggccgcttggctggctggcggatatctgatagcggcgtaaaaactagttttgttttgaaattgcgtacgctgtttgtattattagatatttgattcagttactggtcagcccgttcgtgccaatacctttaaattgtagtgtataggtagcattttgggtcaattaggcgtaattcatgcagatatacatatatatataaatttatacaaatcccattagcaagctaagtggaccctagccatcggttcaaattcaaataatcaaatatttcctagggtatcaaatagtcgagccttagcagcgctttaatttgatggtgaactttattaggtagcattcgttttttttatgcttctgattaaattattgttagttcattaacaaagacagttgtttgtagctgagcaattttccaatacaattctacatccgaaacacacaaaaggtccaaggtcaatggcaattaaactaaatgcataattgaattacatacccggcagtacagacaaattaatccaattgcagcgatctttataaccataaatggatacggcgagacgcgttggcaggaaagcgaggagcgagtgggagaggatgggaagacgaccaagtccctggtgacccacaccaccaccgaggtctactacagcactgaccagccggtttacggccaggccggtggctcgcagctggagttgcccaccggcaagtacgtctttcccttccgggctaccattccgcccaatgcacccacctcattcaatggtgctcatggtcagattaagcacgaggttaccctaaccatcgatcgcgcggttcgctacaacaacacatttaagcagtgcttcacggtgatcctgccacatgatcttaataggcggctcgagtataaggtatgtagtcttggttgttcttccaaactgaataaccttatgaagcgcacttcccttaggaacccctccaacgcttggagtcgaagagcttctggtggggctccattttcggtgcccacaagccgatgatcatggacgtgagcacctcttattctgcctacgtccccggccagaagattcatttccatctggtgttggacaaccagtcggatgtccaatgtatggacgtgaaggtgcgtctgatcaagaacgtctcatatagagccaactcatcgggcgcaaaggagcagttgaaggtaaccgaatctcgggtggcggacaagcactgcggtgaggtgctgaagcacaacaaggccaagttcgatgagttcctcacggtgccgccaactactccatccacgcaaagcgaaaaggatcccattcgagttagctacacattgcgattcatcgccaagaccttcaagctgcacggtggtggcgacttggtcatggactttccaataaccattggcacagtgccgctgctgggaagtgctgatgacaaggggcccggggcggagaagtcccagcccagtggtgcctctcatccaggtgggttttgcactaaagaaagcataatcgaaagtgttattaatcgacgtttctccggcttaggctcacccaactttcaggaggacgtcagcgatgagcaattcgagtccaacacctttaagccaagatatcccgtctatccatttgatgggaagcctggaaccaatggctcaaacggggcagctaattttcccagtctttatcccaaggcagaggaggcgcatcctgctacgcctgtgaaattcacaccaaatcctgtgtcgccagccgcacaaaaatcgccaccatatacgaccaacacacctgttgcttctccgccaggcggtaattttgaggtgcttggattcagtataccaccagactataaacccacgcctagtgctccagccgcctcttccactggcggcattgggtggaaatagggaccataacttaaccattttgtattctacaccttaaggcatttttaaatatacaagaaagcccgcataagtggcaacgctgtgcatgtgacagctatattaatatcgatagttagtatcattttaatcctaaatggccttttattaactcgagtataaacatagtgatctggtttcaggaattatgcttactattaaaaaatatttatgttcccaattaagaaaaccctaaaactgaattttagcttctagctattttcttactattgttgtcaaccacgatagccgatagttgccatcgctgttcgctaaaagctcatcgccagcggctcgaacagctgattccgtgcacttggcgacgtaatttagtttgttttgttgttgttgcgtagaggtttgaagcagcgcgtcttgaattcggaaaaccagtttgtggaagtgggaagcggccaacttggacagcggcagcaggggattgacacaactgcaacggcatctcaacggcggcgctattacaagtctggcgaaaagaaagttttgacgcaatccacgggccgccgcctgtaatgaagaagcgtcggcgccgcagtcactgctgcactctgcccgcgaacggacgcatctgctccaggtgagctcagattgtagtgcgctgctctggacattcagcaacatcatcatcatcaccatcgagcgtgttgccaatgcctttgtctctttatctgagcagcagcatcggaattttgggaactggacaacggtcgccgagacatcgaacaacaaaagcggaaaaaagtgaaatcgctgataaacccgaataccaaccgagctattgtcaatcaatgaacggccgtttgaacctggagtcaacttgggagctctgcgaattggcgggcaattggccataaccgaccgagataatagtgaagtaatcgcagagacatacgcacgctccgtggagcatgatacttgtaagtctcatcctcagatgaattccact

SEQ ID NO: 35891 - DNA, 1374 bp, DROSOPHILA
atgagcagcaaggtgaacttcgtcttcgacagcaatcctttggggctctatcaagccggtcagcttatctccggcacggcggaactgattacggagcgccccaagacgattcgatcgatctttataaccataaatggatacggcgagacgcgttggcaggaaagcgaggagcgagtgggagaggatgggaagacgaccaagtccctggtgacccacaccaccaccgaggtctactacagcactgaccagccggtttacggccaggccggtggctcgcagctggagttgcccaccggcaagtacgtctttcccttccgggctaccattccgcccaatgcacccacctcattcaatggtgctcatggtcagattaagcacgaggttaccctaaccatcgatcgcgcggttcgctacaacaacacatttaagcagtgcttcacggtgatcctgccacatgatcttaataggcggctcgagtataaggaacccctccaacgcttggagtcgaagagcttctggtggggctccattttcggtgcccacaagccgatgatcatggacgtgagcacctcttattctgcctacgtccccggccagaagattcatttccatctggtgttggacaaccagtcggatgtccaatgtatggacgtgaaggtgcgtctgatcaagaacgtctcatatagagccaactcatcgggcgcaaaggagcagttgaaggtaaccgaatctcgggtggcggacaagcactgcggtgaggtgctgaagcacaacaaggccaagttcgatgagttcctcacggtgccgccaactactccatccacgcaaagcgaaaaggatcccattcgagttagctacacattgcgattcatcgccaagaccttcaagctgcacggtggtggcgacttggtcatggactttccaataaccattggcacagtgccgctgctgggaagtgctgatgacaaggggcccggggcggagaagtcccagcccagtggtgcctctcatccaggctcacccaactttcaggaggacgtcagcgatgagcaattcgagtccaacacctttaagccaagatatcccgtctatccatttgatgggaagcctggaaccaatggctcaaacggggcagctaattttcccagtctttatcccaaggcagaggaggcgcatcctgctacgcctgtgaaattcacaccaaatcctgtgtcgccagccgcacaaaaatcgccaccatatacgaccaacacacctgttgcttctccgccaggcggtaattttgaggtgcttggattcagtataccaccagactataaacccacgcctagtgctccagccgcctcttccactggcggcattgggtggaaatag

SEQ ID NO: 35892 - protein, 457 aa, DROSOPHILA
MSSKVNFVFDSNPLGLYQAGQLISGTAELITERPKTIRSIFITINGYGETRWQESEERVGEDGKTTKSLVTHTTTEVYYSTDQPVYGQAGGSQLELPTGKYVFPFRATIPPNAPTSFNGAHGQIKHEVTLTIDRAVRYNNTFKQCFTVILPHDLNRRLEYKEPLQRLESKSFWWGSIFGAHKPMIMDVSTSYSAYVPGQKIHFHLVLDNQSDVQCMDVKVRLIKNVSYRANSSGAKEQLKVTESRVADKHCGEVLKHNKAKFDEFLTVPPTTPSTQSEKDPIRVSYTLRFIAKTFKLHGGGDLVMDFPITIGTVPLLGSADDKGPGAEKSQPSGASHPGSPNFQEDVSDEQFESNTFKPRYPVYPFDGKPGTNGSNGAANFPSLYPKAEEAHPATPVKFTPNPVSPAAQKSPPYTTNTPVASPPGGNFEVLGFSIPPDYKPTPSAPAASSTGGIGWK

SEQ ID NO: 35893 - DNA, 2527 bp, DROSOPHILA
aaaggcacatttccgaaggtatattcctaaaccagtttgggtcgtcagcgccagtttgttgtgaggcttttgcgctcgaaggacagaaccgcaaatcttctgctcaatttgtgccggattcctgaacttggccctgtcttgagtcaaactttggttaattagtttgcctttttcgagcaatttagcaggccaaagatgcttccattcattttcgccagccggccctttaagcagtccctctgctgttgttgtggccttatgctttggtttttcctgtgccatttcccctttatcacatccacttctgcctttttcagcttttcgtgcttttgttttaaccagcgcttccgctggccacaaaactcagcgtccaactggtagcgtttcctccgccatcatgccaccttttctgtcagtgtactctcgtttccttgctccccgagatgctgtgctgaaaatttgtttactgctccagtttggcgtgcaatatcgacagttgtcaaatggcacaataaattcgccacttgcaactttcaaaagtttcgtggctgtggcaagacagttgagagattttctctggccaaggattagaaaattgaatattccttggcctgcgcaactcagctttcccttgcatttctccttgatgtcgctgaaagttttcgcagcgcaaatttttctttcattcaagacgtcatctcttcgtagttttataaaattatatgaattttgaacgggagaatccaagagggtcttacgcattgcagtggagcccttgacaccttttgtattttcttaggatatattaaaaaacaacaattttagataataattttgttttatcagatattttttttcacaataaattcaaaggcattcgagctatttaacagtgagccatctctttagtttctttgttgattcacccgtttcggttcggttatttttcggcatctgttttctgttcaaccgtccttgttgagcttatttggctgcttgaatggccaaagatggagcttgtaggaaggaacacaaaagggtaaacttttctacttaggatttcagagcctgtgaagaggcgggctaaaacaaagaagacgccgcccagagtttgatgcgattattgattccagctgcagatgcaaacagcagactgcactatagccaactttgattcgatccccgcactcaccgactgtttttcccgttctccgacttgcagataaaccaatttgccggcccgatcaaaagaaaatctatggagtagcgcgaaacgaggccgccgaaatagtgtgcgaagtggatgcctttccgccgccggagaacttcaagtggtccttcaacaacacggcggagaccttcgacatgccgcagagcggtttccggccccattctgcccagggttcgaccctcacctacacccccgtcaaggtaagtttaaaagtgtccgaaaagtcggatggaggttgtggaaaatcgcatgggaaccgacaaatgtcggcgggattgaggtttgcagatgcgtgacccattcgtcatgttaaatgctaaacacgtcagacattcgattcatttctggtaaaagcatgcggctctttgataaatttttcatttcatatttcgctgcgctcgattttaatgtgaaattgttattgacacatttgacattttgtttgctggccatactgggcgaaaaaaaatgtcagaccgaacgataaaaaaaaggcattcaagaatatgaaatgggtattagaaagaaaataatcggcacgacttcattgtatgattttttttaattagacaaaatgatttctaatatcaatgatctaaacattttttgggcatacaatgttctctttttttcagtgctgggtgcctatcattgaactccacaggggctgtctgttattgaatagcaaaaattttaattaataggcgggtcacatggttgttgccatttatttgggcctgtgtgcgtgtcatgttgctagccagcaacagggaaagtaaagtggagcaaagtccttcctgatagagacaacagccaggcattggtggcagtcgagcgattttaattaaaaattctattagcactgctttctaattaaaaatccaatagcagcagtgccaccccaacatcatcatcattatcatccacaacaacaccattgaatgtcaaaggttatagggaaaagcacaaaaaaaaaaaaatcaaaaaaactaaaataaaaagctagcacaaaagagccggaaaattattggaagtaaatgccattgactttaatagttatcatcattggccaaaatgaagaggataaagctgagcaccttccaccctcttggccctgttctctgtcgctttttggcagcatttccgcattaatggccccaatggccaacagcaattgcgattgcagtttttggagctcctccccagcaattggccgagcaaattggccatcaatgagctacactcccatcaatgtccgaatcgttgggatttcggtttttgcatttgatattcccc

SEQ ID NO: 35894 - DNA, 324 bp, DROSOPHILA
atggccaaagatggagcttataaaccaatttgccggcccgatcaaaagaaaatctatggagtagcgcgaaacgaggccgccgaaatagtgtgcgaagtggatgcctttccgccgccggagaacttcaagtggtccttcaacaacacggcggagaccttcgacatgccgcagagcggtttccggccccattctgcccagggttcgaccctcacctacacccccgtcaaggtaagtttaaaagtgtccgaaaagtcggatggaggttgtggaaaatcgcatgggaaccgacaaatgtcggcgggattgaggtttgcagatgcgtga

SEQ ID NO: 35895 - protein, 107 aa, DROSOPHILA
MAKDGAYKPICRPDQKKIYGVARNEAAEIVCEVDAFPPPENFKWSFNNTAETFDMPQSGFRPHSAQGSTLTYTPVKVSLKVSEKSDGGCGKSHGNRQMSAGLRFADA

SEQ ID NO: 35896 - DNA, 2267 bp, DROSOPHILA
aaactaaaaactgatttttttgtaattggtgaaaatcatcttgataacggctctattttatttatagatatcttttctcttaacattcaatttattaaaatgtaattactgtaatggctcaatttcatattcctagggcaataggaaacaatcacaatggtgcacagtgtaatttggagggatgaggtatcaggtattaggtatcacggagtctcaatatttgtgcaagccgctttcaccttatgccacttttatttgctgtcgcttgttaaaatgttcttctccgtggttttctcgttactttgcctagtcgccgtgtatttgcatttctttctggcctccacttagatttcttttctacatttgcttacactaattatgaccccgggtgagttggcctgtcccgcctgacactgcatgtaattagtggttaaattgtcgcccagaggtcagcgaagccaagacatcttggcggttgggtaacagcaatgtagcccttggcgtcaaggtgtcatgcttattatcaagtggtttacattcgcagggggtaaaactcaaagtgcttcgacacgaggccatcctccttagtggccttacttagtggattaatttgcccccttcgtagcgctaattagaatgcgagttgggatcgtctgtcgaacgtttggcaaactgaagatcggacacaattatccggtggcttatatatacaaaatgctgccacagacaaatagaacagatttcgcgtcaaacaaagagaatgccgactgggggcggggaaagggaaatagaatccttatgatgcggattctgcattttaattcataagctgacatttgtctcgctggccaacgttgactgcctgactggctgactgaaatggaaaagatatttcatgctcatttacatgaaattttcattatgcgccgcacgctggaacgctgaaacttatgcaatgccagccagcagacggatttggccagaaacgcgggggaagaagatggcgggactgacggagcggacggaaagacagaaagccagctacaaaatcacgttcgtttatcatcgccggcgacatcgtcccgactatgatgttgatgctgatgttgatgagcgcacagacagccaaggacatgataaagaacaggagcaggaactggaacgggaaagggaacgggaacgggaacgggaacgggaacgggattggtcggatgatgatgccagggagcggacgacaaagcgtgtgacagcattttgcatacgctgatgaatccatcatctttactcaacgtcacatcatcaaatccgcagcgcttagttatactttgtgagcggtgacgatggcagcggcgactgcactcctgcatcctgcatcctgcatcctgcatcctgcggatccacaacatatcctgtcgcaactcaaagtccctggcagccacctgcagatcccacgtatgcaaatatatgcgggcccatggcatttggaactggaagcacgacacatcaaacacttatcgtcagacattgcattcgcattggcagcacgccacagctagctatacacctttgatttaaatacactggagggtgcatctatcctattgtgaaatgtacataaaatgagcagttttatatttcctataggccttggatagattatttcagatctaagttcagttttttgcagtgcactttccaccgatccgagtggtttgtttacgcggcttatacgtaatggccttttttcaagtgcattcttttaattgtttaacgcaaagatcccagacttcagtctgtgttgacaaagtggcccccacgctgcagcccccaacctaaaatagccacgccctcgcccaccgcccactgcacgtacactcgttggcacttaaggggatttgtttaattgaaacgaatgcagggccaaaagcgagggcggcaagcaaaacagaatgaaccatccgaaacgaaacaaagcgaaagaaagaatgaaaatgaaaatgaaaaacgaaagacaaactgctgttggccaaaagcaggggaggtgtgcggatgggaggcttgtgtttgtgacagcagcttagtccaacaaataaacaaaaatgcacttggctttcggtaggtggtgggcggcgaatgggcggatttgttgcgaacaaacgtaacaaacgctgtccaatgccaaaagctgtcactgaagcttctgcaaggcagctgtaacaataaatggccatttggctaattagaaaacgctttcgtcattagatggc

SEQ ID NO: 35897 - DNA, 267 bp, DROSOPHILA
atggcgggactgacggagcggacggaaagacagaaagccagctacaaaatcacgttcgtttatcatcgccggcgacatcgtcccgactatgatgttgatgctgatgttgatgagcgcacagacagccaaggacatgataaagaacaggagcaggaactggaacgggaaagggaacgggaacgggaacgggaacgggaacgggattggtcggatgatgatgccagggagcggacgacaaagcgtgtgacagcattttgcatacgctga

SEQ ID NO: 35898 - protein, 88 aa, DROSOPHILA
MAGLTERTERQKASYKITFVYHRRRHRPDYDVDADVDERTDSQGHDKEQEQELERERERERERERERDWSDDDARERTTKRVTAFCIR

SEQ ID NO: 35899 - DNA, 2222 bp, DROSOPHILA
gatttttatgatagatccttactaagcgaaaaactattcaatataagaacatatttaaatttttataaagatttataaagtaaatttactagaatttcaattattgaaattgggaaaatatttttaaagcaatttaaaaaactaaaaagacctctataaagagtagataaatccaatcaagggttaggaaacacctacacctgtaagtttcccttatttatagccaaagtttaatacttcaaatgcaataatttataccaaagcgaatgagaattgtcgacactttgagccggacactttttcggccaaggccaatggacaaacgcaaatatatttaagctaattgcattttcctttctggaacaggagcatatgatgaccggcgggcaacgaggccacgagattgcgaatctaatatgcgatggcaaatgacagcgcacaaaactaagcgaccatgtgttttgggatgaaatttgcacaaccttgacattttcagccccccaatcaaattgacccaccgcgcttcattggatggaaagcgaacggtcggatggccagtttccaatttgcaattcgatgttgctgaaagcggaacaagcagcaatcgatcaattaaacagattaataatcagcgtttgttcagctgacaaatgtattggaacagctggcgtttccaggaagaattcaaatagtatttcacgatcttcagactttccgatatttaagtacagatcttgtacgccagagtaaaaggttatatcatcatatcattagatcatgaattaaaagtataaagttatacaacaatctttaaaaatttactagatgaacgattattatctaaaagatctttaacatatttttatgattttgtacatttttgggaataacgggcaagcggcgaacggagaaaaagttttgcggtcaagagtgtgtgccaagtagttgccaatcaatttttggcatcgttagggagtggcaggacgacaataccattgccatgttgtacgaccaggatcctttggtagcgagaaaccaccctgagcagcagcagcagcagcagcagcagcaggctcgtcaatggcattgtggccaacaggcacgtcgatttcaattgaatgtggtgcggccaactaccaatgtctcctgtctcctggcgctcgtctcctgtccgctgttccacatccacatccacatcgtcatcccacatcgcccattatgacacgatgccagcaaaccaaacacaatcacaggaggttgcagtgcccaccgtcacactcacttgcagttgacactttggtagccggctcgcatcctggcatccatgcatcccctgtccttctgtttgtcatccgtccagttcgctggcactcttcgtctcgtctgtagttgactgtcacttggcctatgccatcgatggctccaccctccttccatcctcctaaccagtcgcacgcccactgattcacttgcaacatgaaatccgttgaaatgcccactcagctcaccctttggatgccactttgcatctgcaactgttggtgcgcatcaaatacgcacggaacaatgagctaacccaataaatatgagtatacatacgtttgccgaaggtgtggatgctgtttaattaatagctacggtcgaacagtttattcagttgcattttattggaagatgtaattaaattttaagctctgtgttttcaggatggaaggaaaatcgaaagatgttcttgtattttgctacaaagttgaatacaattaagatttcgaatcaaagcaaaccaatttttttactccctagtaaatcacttcgacttcaacaacacgaactgctaaccaataaatcaacaaaatttgtgcaaatacaatacaaacacattcaaatggctcaacgaacacatagatatatatgtttggcgggttccatggtgcgaaactttcacacggcgcgttttccacgatgtgataaagtggcaatgtcaaattttgataccggaattcccttgccctataagaagttgagggaaaacctggattgcatcaagggtcgactgggtggaccgctaaccttgtcggagaaggtgttatattcccatttggatcaaccggattcacaggaaatcgaacgaggcaagtcctatttgcgattgcgaccagatcgcgttgccctgcaggatgcgactgcccagatgacgctactgcagttcatttcgtcgggcc

SEQ ID NO: 35900 - DNA, 222 bp, DROSOPHILA
atgttgtacgaccaggatcctttggtagcgagaaaccaccctgagcagcagcagcagcagcagcagcagcaggctcgtcaatggcattgtggccaacaggcacgtcgatttcaattgaatgtggtgcggccaactaccaatgtctcctgtctcctggcgctcgtctcctgtccgctgttccacatccacatccacatcgtcatcccacatcgcccattatga

SEQ ID NO: 35901 - protein, 73 aa, DROSOPHILA
MLYDQDPLVARNHPEQQQQQQQQQARQWHCGQQARRFQLNVVRPTTNVSCLLALVSCPLFHIHIHIVIPHRPL

SEQ ID NO: 35902 - DNA, 2402 bp, DROSOPHILA
aagaccatgtcgcaggcttcgcgcgtggccagctccaccatggcgcgtccgcgtcgcttgctgttgaccaccagggccaccacgtcgccgtacttcttcagatacttgagcagctcttgctgtgtgtaatcctggccaggttcggccttccacttcatcttgatgcgatgctgggcggaatcaaactggaccggctgttgctgcagtttctgttgctccgcgtgattccgccggaactgctcctgcatggctcgctgctcctcctccagcagacgggagccctcgcgtcgcaaccgctcgatctgctcatgcagcacctcctcgtcgcttttggccaccgtgctgtagggttggctcttcgccagtttgtgcagtgccgcccgttcacgttcctccagttccagcttcagcttctgccgcttcccgtccagttggcgactcctcagctccgccgccttcttggccttcagcactttgtcataagctgcgcgcgcggattcatccgtgaggatctccagagccttggacaactcatggaagcgctcgactgccttcggattgtccggattcttgtcgggatggcactcgagggccttcttgcggtacgccttgcgtatctcattttgatcagactcgagagaaatgcccagaagatcgtaaagattcacgtcactgtactttttgctagccatttagtcttattttactccttattcaacaactggaacatgggtttgttttgcagtttgtcttttttgggcaaaagttagctaaaatatactattttatacgagacttatttcacaactgcagccggcggtccaaaaatgtccaaataaaacatttgcaattgtttactggatcagctgttcgctgcaacgagttggcagccccgcaacacaacgtgcccatttgtttggcgtggattaatctaagttatcgcaaaaaaaactcaaatataatatgacctttaggcgctgaattaagctgaaggtacgtcatgagcatctatcacgacgaggtggagatcgaggacttcgagtacgacgaggaggaggagatgtactactatccctgtccatgcggcgatcgatttcagatctccaaggtaacgagtcgtatacgcaacctttttttttctggactccccatatcacttggtaaatttccactttaggaggagctaatcgagggcgaggaggtggccacctgtcccagctgctccctagtcatcaaggtcatatacgatccggtaagtgactcattcagaaatacacctagaactccccagaaaactcaagcaatctgattttccgaatttcaggagatgttcaaagctgaggaggatgaagaaagtgcgctgaacgagaagctcggcgacctgaagctcgagaagaactaacacacagtttggtgtaattaaatagtttttatttatatatttttatatatatatagacttcattttagtgtaaataatacgatgactagtaaaacaatgatttcaaattatgcaagctcgcaaaaacagtttcgattcgttatggattattcgttttgggtgaattacaaaggatttatacacacattctagaatatctaaaactaaaacactcatattgcaccgagtacactttgttatatatgttttacaagcgcggaggacaacaatatgatgataatcgaacgaaaatttggaaacacaaacaagttaaaggaacgtcagcgtaccagctgtggaaatgtgagtagtacagcgagttacatacaatggaaagcggttggaaaaatatataaataacatacacctaccactctcactttctgcttacggcttaggaattcgacttaaacttagcacgaaaatattgttatggttcgccatgcagtgtttctgtccactgcatcgcatactgaatcatctctgccaccgatcttttcctttttcttttagagagcgtgctcgttcagcaaatgagtggaggtggacgacgtgtcccgatctcctccaatatacgcgcctaagtgcttcgcgagtgaaagggacgaactgcgtctactcgatctactgctccagccaggatccagtgacggcattgggtgacttaagctgcgggccacaagaggagaagtgaaaaagtgaatgtgcgaacgaagtttaatgggagcactctgctcccatgtttccatgctcactcacctttatgttgaactgcttcagagtgctctccagtgccatggcattgcccgagaagtaggcagcgatggcattgtgcagcagaatcaattgcttgtgcatcactttaatctatcgacggataaacggattggatcaatggttagtctcgctaaatgcataggtaagatccatttggcaccacttacgcgattctcgtcgagaa

SEQ ID NO: 35903 - DNA, 261 bp, DROSOPHILA
atgagcatctatcacgacgaggtggagatcgaggacttcgagtacgacgaggaggaggagatgtactactatccctgtccatgcggcgatcgatttcagatctccaaggaggagctaatcgagggcgaggaggtggccacctgtcccagctgctccctagtcatcaaggtcatatacgatccggagatgttcaaagctgaggaggatgaagaaagtgcgctgaacgagaagctcggcgacctgaagctcgagaagaactaa

SEQ ID NO: 35904 - protein, 86 aa, DROSOPHILA
MSIYHDEVEIEDFEYDEEEEMYYYPCPCGDRFQISKEELIEGEEVATCPSCSLVIKVIYDPEMFKAEEDEESALNEKLGDLKLEKN

SEQ ID NO: 35905 - DNA, 3894 bp, DROSOPHILA
tcacccgaaagttgggctcgtttttatcgctaccaaaggtattgattacggtgacattgtgaccccgatgggccagttccttcataaactgctcagcgaaaatgtactgcgatcggccgggaaaaggaaacacggccaatatgcgcgaactttgaaccccttcatcggcatttgcggcgaacagccatatcaggccaattagcagaatgccaagaccagttacagaaaatattccacccatttgcaaggcaaccgcagcgattcgctgacgaacgacaactaatctaacataagaactttttcatatataattatcggggaatgacgattagaagaatcgcccaaaatttactcattgcccacacaaagcaagttcaacgaagcgaaacagggcctattaatttcaaaccaaaacaaattcacagttcgctctctttgtatgttttaatttatgcacttatatatatatatatatatatatatatatatatatatatatatttgcatatatatacatttttggcgtcaccggcttgactcaaacaactttgttgattgtttacacccaatactcagatgttatgtaactaataggagaaacaaatagcactcttttttcaatctggttctcttaagttctcttaagcgctctatcgacttttggttctcaaactctccagttgattttgagtaacttgttggtaaacaaaatgtcttgcgctcagagaacttgcaaaatgtttataatcgtttagtagattctttatctattcaaacatttttagtaattcagttttggctttggctgataaattttaataaaattctctttacatatatgttgaaaattgaatgaaaatatagaaatatattgctgtctaattgtacagaacgtcacagacgtgcactaaatggttccataaaatgagtctaatacttagaaataatcgtaaattaggggctattaagattagataaagctacctaccaatagcgcttatcattcattgtccctcctgtaatcaggctaaaaaacagtcataaaataattacaatccagttgaaaatatttattgtatttattcgtattttctaaaatattaatttgtattcacattttaatttgttatttttacagctacgattttattaataaatcgtatacatgattaataaacgtatatctaaaattaacttctaattagatgtttcgtaggtagaaatgactttgcagatgttgacaaatgatttagccatcttctgctttttgagaggaccagaaaaactaaagccaccaccaaggatagccgcgatccgaccattatgaaattgtccagggaatagtaatcgaacaactttaactgggactgagatattttcatgtgatctgcacccttgtagcgtattatgtactccgtccaataaatggccgcatccaaaggatgaatgggctgatccctaaatctttgggaaatagccaaggcactctctcgatattccggctcatttatcatgctgtgtatagcatccttcaactcttttactgtcaagctattgatgttcaactccagagctactccctcctccttcatgatttccaaattcctgaattgatcgaaaaacgatggaaggcccaatactggcttcgcatagtaggcagcttctataacgctcatcattccgcaatggcttataaagagctttacgtttggatgagccaaaattgcttgctgtggcaaaagtttggagtggtagatatcagtgcccagactcatcgtagattcaccatcgaacttccaaatcacacgctgtggaaccgatttgaaagtctccaccagaatttcctgcgttttccttggcaaatctttactgtcctgttccagacccagagaaaacaagatcactccatgttctgcttcatcgatgaacacttgcagatcgctcggcagctgtggatcctctttgggaatgtgtagaccagctacttcaaccattcccggcacattgggtctggcccgaaacaggctaaagtgttgattgagcagcatcaatgcaaagtcttgccggatctcatggaagctcttctccagatggccaaagaagtggtcgtggataaggcgctgttttggtaaaaataccaagttgatcagcagccactcttcggttgtgtataaccaattgtagatgcgatcccaaacgtttttcacatactttgcacgaaatggcattatgggctctgtcaaagtggatgttgaaaaacccaccaggttatttatattccaatctgctacgcaggtgcaaattccgatcagttgggcgctgaaatgggctgccatgccatagagcacgtcactatatccagcttccaggaccaccgcgtcaaatgttattcttgacttcattaatgctcgaacttccacattattgaggacattaagcgtagcatttgccataagactcgacatagaactaatttcctcccacttattgttcgctgaagcgattccaacggattcctcaaactctgcagtaaatatgagacaaaagcatatatattagagatttctgttctttaatctaaagaatctaagaatctaatctaaaagaaactacacttcgcttgattgattcttattttggcagttgataaaattgcaattagaataaatttacactcttgcgtctgacataagtacatacacactaccttatctgagataatgattcaatgggcaattaagattttgatacttacctaaaaaaacattattattataccatattcgtataaaggtgacatcctcaattttgtgcatgcagtgcttgtatgcatgtatcaccgtcagctggtgaccccgatcttttagagcctggatatagggtgtcacaagcatgcattgcgagtgggattcaaagggggcgatgacgaggatgcgggaactacgtatccaacatatcgagttcgaaatcagccagaacatcgggagaagccatcgccccggaggaaacatatcgattgagcgaccgctttcaaactgactgactgaagagatttccagccgatttcttgtgcattttcgctcattgtatttgttcgctgattagattacaccgaagagaatttattttgaccaaaaccaaaatagtatcatttcgtctatcggcatgtgcggtcgaattacgtgaaatgttcagcggcccgggtattgctggtctactgctcacggttttgctttttggccttttgtgtccgaaactgaccaatgcggaaaatatcttggccgtattctcgtacacctttggctcgtcctacttgctgattactccgttcttaaggaatcttgtccagcggggccaccagctaactttgatatcggccgtaacgattatgccccacatagagggtgtccatcacattcgagtgcccaaattggatatgctgatgaaaagtaatgaacctcaacgcttctatatagctctatacctataaatatgtagaaccgaacaaaagtgccctactgaattattgaaaataatctacgcttatcaaaacggcaccagagaattgttatcgcaatggtttgaataatcaacccaatcattttacactttttgcttgccattaccaaatataaaatttgttagcctagttcagcctaattaagtttgaaaaacgaggtaaggtaatttaatttaggtccactgcggccatgtctccaatagcttagttttaattaaaattttaaaattaagtttagaacaaccttgaaatatgtatttcaattaattttgatttcagttctcttggattttgaatatgacaccgatttaaccaaatggacggaggctcaattcttgtccgagtacttttacaactgttcaaagtttgtcctt

SEQ ID NO: 35906 - DNA, 1395 bp, DROSOPHILA
atgcttgtgacaccctatatccaggctctaaaagatcggggtcaccagctgacggtgatacatgcatacaagcactgcatgcacaaaattgaggatgtcacctttatacgaatatggtataataataatgtttttttagagtttgaggaatccgttggaatcgcttcagcgaacaataagtgggaggaaattagttctatgtcgagtcttatggcaaatgctacgcttaatgtcctcaataatgtggaagttcgagcattaatgaagtcaagaataacatttgacgcggtggtcctggaagctggatatagtgacgtgctctatggcatggcagcccatttcagcgcccaactgatcggaatttgcacctgcgtagcagattggaatataaataacctggtgggtttttcaacatccactttgacagagcccataatgccatttcgtgcaaagtatgtgaaaaacgtttgggatcgcatctacaattggttatacacaaccgaagagtggctgctgatcaacttggtatttttaccaaaacagcgccttatccacgaccacttctttggccatctggagaagagcttccatgagatccggcaagactttgcattgatgctgctcaatcaacactttagcctgtttcgggccagacccaatgtgccgggaatggttgaagtagctggtctacacattcccaaagaggatccacagctgccgagcgatctgcaagtgttcatcgatgaagcagaacatggagtgatcttgttttctctgggtctggaacaggacagtaaagatttgccaaggaaaacgcaggaaattctggtggagactttcaaatcggttccacagcgtgtgatttggaagttcgatggtgaatctacgatgagtctgggcactgatatctaccactccaaacttttgccacagcaagcaattttggctcatccaaacgtaaagctctttataagccattgcggaatgatgagcgttatagaagctgcctactatgcgaagccagtattgggccttccatcgtttttcgatcaattcaggaatttggaaatcatgaaggaggagggagtagctctggagttgaacatcaatagcttgacagtaaaagagttgaaggatgctatacacagcatgataaatgagccggaatatcgagagagtgccttggctatttcccaaagatttagggatcagcccattcatcctttggatgcggccatttattggacggagtacataatacgctacaagggtgcagatcacatgaaaatatctcagtcccagttaaagttgttcgattactattccctggacaatttcataatggtcggatcgcggctatccttggtgcctgattacaggagggacaatgaatga

SEQ ID NO: 35907 - protein, 464 aa, DROSOPHILA
MLVTPYIQALKDRGHQLTVIHAYKHCMHKIEDVTFIRIWYNNNVFLEFEESVGIASANNKWEEISSMSSLMANATLNVLNNVEVRALMKSRITFDAVVLEAGYSDVLYGMAAHFSAQLIGICTCVADWNINNLVGFSTSTLTEPIMPFRAKYVKNVWDRIYNWLYTTEEWLLINLVFLPKQRLIHDHFFGHLEKSFHEIRQDFALMLLNQHFSLFRARPNVPGMVEVAGLHIPKEDPQLPSDLQVFIDEAEHGVILFSLGLEQDSKDLPRKTQEILVETFKSVPQRVIWKFDGESTMSLGTDIYHSKLLPQQAILAHPNVKLFISHCGMMSVIEAAYYAKPVLGLPSFFDQFRNLEIMKEEGVALELNINSLTVKELKDAIHSMINEPEYRESALAISQRFRDQPIHPLDAAIYWTEYIIRYKGADHMKISQSQLKLFDYYSLDNFIMVGSRLSLVPDYRRDNE

SEQ ID NO: 35908 - DNA, 3912 bp, DROSOPHILA
ctactatccctgtccatgcggcgatcgatttcagatctccaaggtaacgagtcgtatacgcaacctttttttttctggactccccatatcacttggtaaatttccactttaggaggagctaatcgagggcgaggaggtggccacctgtcccagctgctccctagtcatcaaggtcatatacgatccggtaagtgactcattcagaaatacacctagaactccccagaaaactcaagcaatctgattttccgaatttcaggagatgttcaaagctgaggaggatgaagaaagtgcgctgaacgagaagctcggcgacctgaagctcgagaagaactaacacacagtttggtgtaattaaatagtttttatttatatatttttatatatatatagacttcattttagtgtaaataatacgatgactagtaaaacaatgatttcaaattatgcaagctcgcaaaaacagtttcgattcgttatggattattcgttttgggtgaattacaaaggatttatacacacattctagaatatctaaaactaaaacactcatattgcaccgagtacactttgttatatatgttttacaagcgcggaggacaacaatatgatgataatcgaacgaaaatttggaaacacaaacaagttaaaggaacgtcagcgtaccagctgtggaaatgtgagtagtacagcgagttacatacaatggaaagcggttggaaaaatatataaataacatacacctaccactctcactttctgcttacggcttaggaattcgacttaaacttagcacgaaaatattgttatggttcgccatgcagtgtttctgtccactgcatcgcatactgaatcatctctgccaccgatcttttcctttttcttttagagagcgtgctcgttcagcaaatgagtggaggtggacgacgtgtcccgatctcctccaatatacgcgcctaagtgcttcgcgagtgaaagggacgaactgcgtctactcgatctactgctccagccaggatccagtgacggcattgggtgacttaagctgcgggccacaagaggagaagtgaaaaagtgaatgtgcgaacgaagtttaatgggagcactctgctcccatgtttccatgctcactcacctttatgttgaactgcttcagagtgctctccagtgccatggcattgcccgagaagtaggcagcgatggcattgtgcagcagaatcaattgcttgtgcatcactttaatctatcgacggataaacggattggatcaatggttagtctcgctaaatgcataggtaagatccatttggcaccacttacgcgattctcgtcgagaaattgcattttgacggccacgtccgagcgcagcttctcatattgctccttgtgctgcgcatagctgcgctgggtctcctcaagagcgacggccgagggcgtcagctccggcttggtgttctccaaatccatgcggtaggcatcgaattcgattctaaaaggcaggaggacattacttctactacatataattctcatgcctttttatgaaacatacgatggctttaggaaataaaaacttattgccattgtagagattatcatggaatgcggttatgactaattgatccaacgtatttaaattttttcaaggaaataatacgataagcaatgtttcaagcttgtatacaaggctagtttaaaatgcatttctgataagagctgtgtggcacaacactttttataaaaagccacacacatgctgagtttaaattaaaatcgaagagatcgatgatgatttttccttcgttgttgcacgacaatgaaaggatatagctttggttacctggccgtttcgtactgtcgtatcgtcagcagcgtatcgtcgatcgtcttgttgcacagtgtgttcaccgacgaaataaagaagttgagcgcattaagcagcagctcgccgttcttggtgagattgcgctgcgtctccgaattgcacgtgaactctttctgcagctcggggttcttctgggccagatcggcgaaggagtcggccagggcgtgctgtgtgacgaccacgtgctggaagtgcgaactaaaggcccgcgttagcctcaagatggacagatacttgcgctgcgtctcgcgcaactgctctatctgggcctccagttccgagtccacggtccgctgcgacttgcccaacttctccagcattatctgtcgcgtacacttgtacgtcgatatactccagttcttgagactgtcgatcttggaggcgctagtgcgtataatgctgccgctcccgctgtccgtggggctcaggatgccgttaccggatggtggactactgggcgacatgggtgtggtgggtgctgcacgaaaagatcgatgctgagtcagttggtcgctaaatcgaggactcgtaaatagttcacctgaatggtttcttagtggcaggctgctgggggcgccaaaggggccgccgacaccaactccaacgttgccgccaccacctcctccgccggcgatgctgtggctgctggcgcttccaaggatcccgctgccgccttcggtgcccgtgtgcaccgctccgcagctgtcgttcagcgagggcgcatccttcagcatttcgtgaatgctgcgctcgcggtccgtcatagctatggccgtcgttaagttaaccgcccgtctcaccgagtaattgccagcggaaaatcctcctgtctgcccgttttgtgtgggggtgtgcccgattaggtgtctgtgtgtgtgtttctcgggcaacggcgctggaggtttcacttcgatttccacgccgaaatcgatggcgcacgctgggcgagtcgagactttagtaacccctgcctggactcgtcaaaattctcaaatccctaaaattccgcataaagttcatcaaactgtgttcacgaactgaaaatcggtgtgactgtgcgcgagtaggtggttaaatgccacacttggactgcttggataccggctgtgcgacacggtattttaaaggcggaacggtggagtttggaacacggggaagtcctgtcctgcaggtcaagtcggtgggacgtggtttggcgggacagtgactgctgcgaggactctcctctgcggcaccagcattaatttttaattcattttcatatatattcttgatcatgatcaataggccagttgatgtggccaagcaattctatttggattttcagtgccgaccagttgcggtcccactaaagtggaaatttgatttaatttttggggatttcatggaaaatctctacttatttctatttccacgttacttaggccaatagccagcggaaaatggtctacgtgaatctaataataggcttgggcctggtgtccgttgccgctttcgcctatttcaattggcataacgaccgcagttcgccttactccaggtgggtgctattaaatgagcgtcgaatcgtgggcaggttggtgccttgcgattcaaagctaaaatgttggcttaaatcccttgtttcattgcaggtcgccgaatggcaggtgcaccttttgccagtatgaactgagtgatgacgaccggcgccgcatgaggtgtggacatgccatgcacaatctctgctacttggtgtttcgctattcccatagaaagtgcctcgagtgcgataaggtggttaatgtcaatatagccggtgacttgtgcacgatttgtttagatcccctaagtgtttacaccatggtgtatctgcgctgcagccacgccttgcatgagaagtgcctccaccagtaccaggctaatggtggccgccactgtccggtctgcagaatgggaattaaggagtaggtatcacctagtgatcatgcagccaggcaaagccatatatcagcataagcgtgcacttaatgcaaggctcaacgaat

SEQ ID NO: 35909 - DNA, 1331 bp, DROSOPHILA
cagtttgatgaactttatgcggaattttagggatttgagaattttgacgagtccaggcaggggttactaaagtctcgactcgcccagcgtgcgccatcgatttcggcgtggaaatcgaagtgaaacctccagcgccgttgcccgagaaacacacacacagacacctaatcgggcacacccccacacaaaacgggcagacaggaggattttccgctggcaattactcggtgagacgggcggttaacttaacgacggccatagctatgacggaccgcgagcgcagcattcacgaaatgctgaaggatgcgccctcgctgaacgacagctgcggagcggtgcacacgggcaccgaaggcggcagcgggatccttggaagcgccagcagccacagcatcgccggcggaggaggtggtggcggcaacgttggagttggtgtcggcggcccctttggcgcccccagcagcctgccactaagaaaccattcagcacccaccacacccatgtcgcccagtagtccaccatccggtaacggcatcctgagccccacggacagcgggagcggcagcattatacgcactagcgcctccaagatcgacagtctcaagaactggagtatatcgacgtacaagtgtacgcgacagataatgctggagaagttgggcaagtcgcagcggaccgtggactcggaactggaggcccagatagagcagttgcgcgagacgcagcgcaagtatctgtccatcttgaggctaacgcgggcctttagttcgcacttccagcacgtggtcgtcacacagcacgccctggccgactccttcgccgatctggcccagaagaaccccgagctgcagaaagagttcacgtgcaattcggagacgcagcgcaatctcaccaagaacggcgagctgctgcttaatgcgctcaacttctttatttcgtcggtgaacacactgtgcaacaagacgatcgacgatacgctgctgacgatacgacagtacgaaacggccagaatcgaattcgatgcctaccgcatggatttggagaacaccaagccggagctgacgccctcggccgtcgctcttgaggagacccagcgcagctatgcgcagcacaaggagcaatatgagaagctgcgctcggacgtggccgtcaaaatgcaatttctcgacgagaatcgcattaaagtgatgcacaagcaattgattctgctgcacaatgccatcgctgcctacttctcgggcaatgccatggcactggagagcactctgaagcagttcaacataaagcttaagtcacccaatgccgtcactggatcctggctggagcagtag

SEQ ID NO: 35910 - protein, 355 aa, DROSOPHILA
MTDRERSIHEMLKDAPSLNDSCGAVHTGTEGGSGILGSASSHSIAGGGGGGGNVGVGVGGPFGAPSSLPLRNHSAPTTPMSPSSPPSGNGILSPTDSGSGSIIRTSASKIDSLKNWSISTYKCTRQIMLEKLGKSQRTVDSELEAQIEQLRETQRKYLSILRLTRAFSSHFQHVVVTQHALADSFADLAQKNPELQKEFTCNSETQRNLTKNGELLLNALNFFISSVNTLCNKTIDDTLLTIRQYETARIEFDAYRMDLENTKPELTPSAVALEETQRSYAQHKEQYEKLRSDVAVKMQFLDENRIKVMHKQLILLHNAIAAYFSGNAMALESTLKQFNIKLKSPNAVTGSWLEQ

SEQ ID NO: 35911 - DNA, 2846 bp, DROSOPHILA
ttccacaatcacattctgctggagactcacaaacagcggtgtctcaggccgccggcgtcccagcatgtgtgccacatatgtggcaagcatctgaccacggcctttaatctgaagaatcacctggttcgccacgcgggcacacgacgccacaaatgcgaccagtgcagcgcatccttttatacagccgccgaactctgttcccatcagaaaacccacacaaccgagcgtccctacatctgtcgctacaactgtggcaaaacctttcgcttttgcagcgcccgcagcatgcatgaaaggtagaatttcagacgaatctccaccgtcacttagcccaccatccccacttacgtgacccttccaatatattccgcagggttcacatggacgccagcaagcgtatctaccagtgcgagtactgccccaagtcgtatgtaacacccagcgagtgcaggacacatcaaaagtatcacaacttgactcgcgatcacgggtacgacttcctcccagttcttaagtatttgcagagaatgcaaattagaaggatttccattattcgcaactaaataacgaatctatcttgcatgtcaaacgtattttttgttttatatgcaaaaaacgattgtgtgcctatatattcctataaaatatcagcagtactctgttgaatatgatatgctgcagttcaatgtaatcaaattacttttttgaagcctcatgctaatgagtaaaacatttttttcacccccaatctcttccagctgcgaaatctgccgcataagcttcaagacagccaaacactacagatcccatctgaagtccaatgcccacaaaactctggaggcgcgtgctaaagctgctgcatcccccaattcccgtggaagaaattgttcaacgaattgaattcattattgccagttgcatgttaattatatataccgaattgatattaataaagcttccgttccgcgttcatgtttaagatcccagcatctactatcacctacatcgtctgtgtgttctcgatgaccttctcgttgtcgtagatctccttggcgtagcacagattggggtagtcgtaggcagctccatatcggttcttgcagccggtggttgccttctctcccggagtgtagacaggctgacccacaatgttcgatgtggcgaagttgcaggtgagtacgaagtggttgtaaaagtcccgggagaagcgcacggccgcacatcccacatgggtgttcttctcggccaccgcgatggtgaacttggtcaccgccttgttgggaagctcctccgggaagctggcgaggatctcgggagatgcattcgagcgctcagcaaaccagttctcgatctgctcctttattatttccgcatcggtgtactctgtctcggctccgctgtactggaacaaggcgttgttctggccggcgtaggcgaatctctcggtgctgcgacatttatctggcagggactcacaggtctttacgttcagcaaggccagatgggagagctcctcgcaccaggacatcttggccatgcgaacagccttgggtagtccttctattttgcctccagccacgttgttgcgcagctcgttgaagagattgaggatgagtttgtgatgcggctcgatcttcacctcacgcacggtccttgggacaattttcactgaaattctgggcgagaatgggtgagcaccagcaggttttggccagctatcactacttactcccttgttgttgcaggctatgtgcttgtccaggcacgtgggcagagcacaatagtccgctgcaaggcttattcccagcagggaagtaagcaaaatcagacacttaatggccatcttcagcgttggttttggactgaggcttagctacccaaagtaccctatttataggatagctgtggcaatcgaaccgcagttgcaacatgttttccagtattttcgcagctgagtttccaagaatgtctggccaggaacaagtggctgagctcagttcgaatgccatataaaagcagacccatctgctgtccaatccagtagccaagaactagcatcatggcgttcaccaaggttctccaattgattctcctagctgtggttgccatttcctctgccgtcgactattgtgctctccccacctgtctggacaagcatgtggcctgtaacaacaagggagtaagttcttatgtaaaccaaattcacaggagttcgtattggtaatgtcctaaatccccatccagaacttcagtgaaaattgtcccaaggacgtgcgtgaggtgaagatcgagccgcatcacaaactcatcctcaatctcttcaacgagctgcgcaacaatgtggctggaggcaaaatagaaggactacccaaggctgttcgcatggccaagatgtcctggtgcgaggagctctcccatctggccttgctgaacgtaaagacctgtgagtccctgccggataagtgccgcagcaccgagagattcgcctacgccggccagaacaacgccttgttccagtacagcggagccgagacggagtacaccgatgcggaaataataaaggaggagatcgagaactggtttgctgagcgctcgaatgcatctcccgagatcctcgccagcttcccggaggagcttcccaacaaagcgggtgaccaagttcaccatcgcggtggccgagaagaacacacatgtgggatgtgccgcggtgcgcttctcccgggacttttacaaccacttcgtactcacctgcaacttcgccacatcgaacattgtgggtcagcctgtctacactccgggagagaaggcaaccaccggctgcaagaaccgatatggagctgcctacg

SEQ ID NO: 35912 - DNA, 793 bp, DROSOPHILA
aagatggccattaagtgtctgattttgcttacttccctgctgggaataagccttgcagcggactattgtgctctgcccacgtgcctggacaagcacatagcctgcaacaacaagggaaatttcagtgaaaattgtcccaaggaccgtgcgtgaggtgaagatcgagccgcatcacaaactcatcctcaatctcttcaacgagctgcgcaacaacgtggctggaggcaaaatagaaggactacccaaggctgttcgcatggccaagatgtcctggtgcgaggagctctcccatctggccttgctgaacgtaaagacctgtgagtccctgccagataaatgtcgcagcaccgagagattcgcctacgccggccagaacaacgccttgttccagtacagcggagccgagacagagtacaccgatgcggaaataataaaggagcagatcgagaactggtttgctgagcgctcgaatgcatctcccgagatcctcgccagcttcccggaggagcttcccaacaaggcggtgaccaagttcaccatcgcggtggccgagaagaacacccatgtgggatgtgcggccgtgcgcttctcccgggacttttacaaccacttcgtactcacctgcaacttcgccacatcgaacattgtgggtcagcctgtctacactccgggagagaaggcaaccaccggctgcaagaaccgatatggagctgcctacgactaccccaatctgtgctacgccaaggagatctacgacaacgagaaggtcatcgagaacacacagacgatgtag

SEQ ID NO: 35913 - protein, 178 aa, DROSOPHILA
MAKMSWCEELSHLALLNVKTCESLPDKCRSTERFAYAGQNNALFQYSGAETEYTDAEIIKEQIENWFAERSNASPEILASFPEELPNKAVTKFTIAVAEKNTHVGCAAVRFSRDFYNHFVLTCNFATSNIVGQPVYTPGEKATTGCKNRYGAAYDYPNLCYAKEIYDNEKVIENTQTM

SEQ ID NO: 35914 - DNA, 3656 bp, DROSOPHILA
tgtggcctgtaacaacaagggagtaagttcttatgtaaaccaaattcacaggagttcgtattggtaatgtcctaaatccccatccagaacttcagtgaaaattgtcccaaggacgtgcgtgaggtgaagatcgagccgcatcacaaactcatcctcaatctcttcaacgagctgcgcaacaatgtggctggaggcaaaatagaaggactacccaaggctgttcgcatggccaagatgtcctggtgcgaggagctctcccatctggccttgctgaacgtaaagacctgtgagtccctgccggataagtgccgcagcaccgagagattcgcctacgccggccagaacaacgccttgttccagtacagcggagccgagacggagtacaccgatgcggaaataataaaggaggagatcgagaactggtttgctgagcgctcgaatgcatctcccgagatcctcgccagcttcccggaggagcttcccaacaaagcgggtgaccaagttcaccatcgcggtggccgagaagaacacacatgtgggatgtgccgcggtgcgcttctcccgggacttttacaaccacttcgtactcacctgcaacttcgccacatcgaacattgtgggtcagcctgtctacactccgggagagaaggcaaccaccggctgcaagaaccgatatggagctgcctacgattaccccaatctgtgctacgccaaggagatctacgacaacgagaaggtcatcgagaacacacagacgatgtaaatgctttttcgattcttagtccataattaagttggcaaataaaagctaaaagagcttatcatttgaaatctcggccgttgattttatagttttaggatgggtttaaaaatgttggcccggatagtaaaaaaaacgtatgggtggtttcttttagtctaaattgatttatttaagtatatcatatcatgcgagaggtatttatcatcttgtcgtctgcttcgacagctttcgtttggatgttcaacttgtacattaaaacacacaatatcacaatcttacgcaggtttacaaaactgtatctaatgttgtgggcttgaacgctcgggaatacttgcgagagtcctgccctccagtgattctatccaagtggatcggtatgaaccatgatgatgcaataaatagagggtctgattgcttatgtgtaagtgatctagccgatgtcatcttgtgatttttagagagggacgccgagcaatcagatggtctttagttagtcaatgactttgtgctaaaattaagagtaaatcaaataggggaaataaataaatcaaaacgtatgaaaactaaatagacagtcatgaatatgggaatatgcgtttcagtgaatgttaatagacatgtggaaaccgaaagcatttggaaatagacataaatatgaaacaattgtattggggattcaattgggattgggattcaggattctttctgtacgcggttaaaacaacttaagctacagctagtattaactaagtaggaactgtccattacttttccttgggcgccttgtcgaacaggtactccttggccatgctgtaggccagtccgagggtcagacatccgacgacggttccctgggcggcgactcgcagctgcatcaggaagacgctggtgctcatcgttccgcggttccggtacttgtacgctccaatcaatccggcggccacgaatccggtaatacctgtgagtgaaggtgcgaatcaccgattagtttctattgtccatgcggcggattgcttgttgttgctagctgactgcgcgaaacagctgataaaagccagacgttgcgcaaataaaatcatacaagtaaatactaattatgtgaatctagtgctgccaaaaatgaagctagaatttagataatattatagaatcacataatgtaacattttatattctaactaaaatataaagctctttaggaaactgtttatttcaagcaatatccatatcttcggaaactattcgaaaatttttaaagcggcgcattttactgtaatctttttaatagctaaaacgatgaaatctctcaaatagtcagcacttgtcagcgtcagctgttaattgtcgcatacgcagacaagagagctgaacattcgaacacgcgcaaagatcagatggctacgtgacgtcacggatgtgataatctcatttgccttgcgatttgcgtgaatttcgaaatactcctgttacatcattcgctctccagaacgagttacggatcatactgcattcaccgttatgtcacacagtgacatcaaaaagtgaccccaaattgacgttaaactcatggccaaggtcaagattagccgacttccccgccgcacacgcaatgtacattcgtaaatgtgtgtagatatgtgcgtatctagctggctgctgagccaaaagtttccatgtgacgtcacggcggcaaaactttcgctgtccggaaattggcaaaactcacccacaagcatgaagggcgattcctttgctttcctggataatttgttggcctgagcggcatcctcctcgctgtcgaaaagggacttggaactcattttcacgaatattatattatgtacgcgggcggttcggatcggtttaatcgcttggcaacgttcgcgaaactttctgcaatggacagcagttcgagcaatgtgtgaccagagcaaaaacttatcgctcacagaaaggtttcccagagtaagctatatttaaatagtctataaagttctaaagttctgctaatctgtaaaaatattaagaccacttaactactcaggttattgctaaacattagattgcatttattttgattatacacaattaaaacttatcaagggcatcgatagtttggctgctgttctggccgcacttcaagataaaaataccgaaagccgctatcagctgtttgcaagctttgcgcgcttttccgccaggtgacgcttttgccgtttctgtcatgacataagaaattggtatttttttaaagggaaaggggcggactgcagaaatcgacgttgctttgccttggccgctaactctgttttaaattcgagtgctttgacataaattgaaagtagaacaaccgtcgaacagaatttcgcggaccagagtcgcagcaatgacgggaataatttcgatcgtaacgagacggctgccccaaactttgggaatgcgagccctgcggagtaatgaggtaaaaattgtggacgggctggggattgccgggtggagggggcccgtcaggtgtgtgatatatgctccggcgatatatatgtacatatcaatttttatcccatattcactgcccgcctggcgctcgccgattatgtaattgtatgggtgtgtgtgcgtgcgccgctgaaaaatgggaaaaacttttgtttgggacgcccgctgcacgtgacccgtcagccgacgttgcctcctggttgtgcaatcactaatatttgcttctttccgccaggtaaagcgctgcatccgccaatattctcggttagttgcctgcgccgcccagcagcagcaactgcttcgccaggatggctcgaatcgctgccaggaggccaccaggtaagtccttcactatccacaagagtcccttcatccagagttgtttattcctaggctt

SEQ ID NO: 35915 - DNA, 628 bp, DROSOPHILA
aaagtttcgcgaacgttgccaagcgattaaaccgatccgaaccgcccgcgtacataatataatattcgtgaaaatgagttccaagtcccttttcgacagcgaggaggatgccgctcaggccaacaaattatccaggaaagcaaaggaatcgcccttcatgcttgtgggtattaccggattcgtggccgccggattgattggagcgtacaagtaccggaaccgcggaacgatgagcaccagcgtcttcctgatgcagctgcgagtcgccgcccagggaaccgtcgtcggatgtctgaccctcggactggcctacagcatggccaaggagtacctgttcgacaaggcgcccaaggaaaacacaaagtcattgactaactaaagaccatctgattgctcggcgtccctctctaaaaatcacaagatgacatcggctagatcacttacacataagcaatcagaccctctatttattgcatcatcatggttcataccgatccacttggatagaatcactggagggcaggactctcgcaagtattcccgagcgttcaagcccacaacattagatacagttttgtaaacctgcgtaagattgtgatattgtgtgttttaatgtacaagttgaaca

SEQ ID NO: 35916 - protein, 101 aa, DROSOPHILA
MSSKSLFDSEEDAAQANKLSRKAKESPFMLVGITGFVAAGLIGAYKYRNRGTMSTSVFLMQLRVAAQGTVVGCLTLGLAYSMAKEYLFDKAPKENTKSLTN

SEQ ID NO: 35917 - DNA, 2213 bp, DROSOPHILA
tcggatcaataaatgatgatattatgctaccgcagggacacattcagctgccacactcgcacaaagacatttacaccgagaaaaaatactaccactaaaaaactaagagattggcttaagaattaagggagatttaaataaatatattattatatggtatttcactttaaataaatgtcaatatatgcttttgaagaagtaaaatgtaaatatattttctgtgaaactttgtattgtcgtatacttttctgagttccctttaatcatttcccacatcatttttccaggtgcaggggatcccgagactgctgccaagttgtaggtggcaacacattaagataaagtgacaacgcctccatggagcacagtggacgtcgaggatgcgcgacgatgccccagtggatgcagaaaaggggtagctaagggcgaggggcggatcgagatgagggtggagatggtgatggaggtgcctgttgggggatgggtgctgctccgctgtgctgaaggacaaacagaaatcaggcggcaaacatcaagagtagcggcaatggctggggtacacaaatgaattgtatacatgtcccgcttcgcgatgaagcgcaagtgtgtgagtgcgagtgtgtaagtgtgtgcgtgtgcatgtgtgagtgaggcggataagcttttattttcgcttggcattttatgcgcatcacgcatacgcactgttacacacagtcgaacgtactgagatgccagcagatagcagaagatagcatagatgtgtgctgcgaaaacacagcgacatgcacaaacgcaaacagttcctcgcttcgcatcaaaggacgtgggagtgggggcgggggcaagggttctggctataatgacatttagcttttgaaacaatgtaaacagcagcagcggcgaaaacaacgtcgaagttcaaagttggctcttgctgtaggccgccgaaagttgccctaagtaccaaggcacacacacatgctcgcaaaacgagaagatgcaggatgcgggggaggatgtggagtcggagtcggaggcggtggaagcttctatggactcatccatgacaaaggaccctgagttgtgtgccctggaattttgcatgagccgccagtcaccgcaaatagtgaagggatacacacgcacccaccatcaccaccatcttcaccatctcaacctgcccaactgcccaggtaaactgtcaacttaagcccggtgagaggccataaattgcctccggaggtggagttggaactagtgaaaccgacaagacgctgacattaactaggccagatattgagacagctccgaaacggatatgaggcgcccaaaccacgaggccattcctcacgcaatcggacaaccacctgcaaagtgaacccagatccctgcaccaagcttccagctaccagagcgggtcaagttccattgctggctttgattaagtgcggcgataccaaggagaaatcgttatcccggtaaaaggccggctatgatgcggcgcactcgggggcactgggccggagttattgttgggcaaattgatgctttcacgtgcagatggatggccgtagccgaggcctttatgtatacttatagggctatatagctggcactctccattgttcgcgtcgagtattcaaatgacatattatataacattgtgaaaacatttacgctcgcttgtaaatatttcaatttatttaatgccacccagaaccaccgagtgggtatcttttatgtgcatctagtctagctggcctgcacaccgcatggaataaagaaggcataaagaatggcccgccataatcatatgccaataaaaagtcggttaacagggactcagtttcggtcttagcacggtttttagggtttctggtccaggttggggattgggcatggggattgctactgcgactgggaatgggacacgttatcattatgcgctacatcgcttacacatgcggccatgccagagtaaatggatgggccaaggcggcgatgtgagggtttggggctttataatacattcaattcatggccagaacaaatgatgtggaaatgtaaaatagatgcccgtccacgcaagatgccgcacaaacacactcacggccagacaaactggcgcagcatgtggccagcactacacaggagaaaaaaaccaataaagtttttagtacgaaataaatatgcttatttcgaaatgcaac

SEQ ID NO: 35918 - DNA, 213 bp, DROSOPHILA
atgcaggatgcgggggaggatgtggagtcggagtcggaggcggtggaagcttctatggactcatccatgacaaaggaccctgagttgtgtgccctggaattttgcatgagccgccagtcaccgcaaatagtgaagggatacacacgcacccaccatcaccaccatcttcaccatctcaacctgcccaactgcccaggtaaactgtcaacttaa

SEQ ID NO: 35919 - protein, 70 aa, DROSOPHILA
MQDAGEDVESESEAVEASMDSSMTKDPELCALEFCMSRQSPQIVKGYTRTHHHHHLHHLNLPNCPGKLST

SEQ ID NO: 35920 - DNA, 6166 bp, DROSOPHILA
cactttgcgcctctttcggctcaatgcacaacacccactaaaatttaataaataaaaaatgatatttatattgctttatagccttgtttttcccactgttcgttccttcgttgtgctcgtcccttgtctgtgtgcgctttgtggtttttgtttgggcgaaacattttgatgaaatattttttacacattcatttcaagtatataaattcccatattcctcccatacgagtgtgtgccttctgcatacagacactagaatatcgtatattttcctgcgtttttataaatgagcagacagcgatggttgtgagcgacaggttacagacattgatggcagcgtgaagctgtattggccgttggaaattaaatcttacaatggaaatggatatcttgaccaaactagtttcatattttttgcttaaatgcccactggttttaattgttgtgttttttatggcggaagcattagcacgatagctatcctttttaaaaggcatctcacattcaggaaataactgaatattgcagtgcgtcggctttcatggcgtatgagtaatttttgttaaaatgcattaaacggaatatatattgaaagcaatcacaatcttttgtgtaattacaaaagcacgttttttaaaacaaataaatatatataaaataaatattatataataaaatattactcatacgccccgtacaacccctaaatgtttgttcaatcgttaagcttataaaaaatatttaccaaaaatatcttaactgtgacacatctaatcttttaaaaatattctcacgttcccatcccaaatgcgaatttttttttgcacatatcgctcatccgccatggtgacgcattatttgttttgtttgctgctcccctagtggtggccttgccttttggccagggccgacgaaaatcggagaggcagaaagcgtaaaaatataaaatacatatccccacagccgcccgcaacgtaaattaaacatttctggttagaaattagacattaaagaagcaggggcaaaaatttacagcgcttgttgagtcgatccattcgcagaggttaatcgggttaatccagtcgggcatcgggttaggttccatcactggagctggctccggatcggatcgatttggatcggacaacttaccgctcttgatgctcggctcgcgctttatggacgctttgcgtagggtcttggtcgtgaactcgggctttggctcctctttcggctccttgaggagctcatcgatcttgggtaccttcttgagcacgggccggattttggccaggtcgtcggtgctcttgctgggcaaaggcttctcctcgcgcttgacatgccgcagcttgggcttctctaatttgaaacgtcgccgccggtcgcgctcctcctccgtttcgccctcctcggcctcgtcgtcgtcttcggtggccatctttttcaaggacttatcccgcttgaccaccacgctgcgtaatttgggtttctccatggtaaaacgttgggtcaactcactttccggttccggcttcttgttcacggtggtgggtcgcaattgggccgccttcttcacgtgctcgggcaccttctcgtccacggtggtgtcctcttcctcgctctcctcctcttcggactcgctttcctcttcgctttcctcctcctcagactcggtttcctcttcggtctcttcctcctcctcgctttcttcttcctcggaggaggattcgggtggtggtgtcggctccttcttctttttgagcgctgaagtggtggctactggcttcttgggccccacggtgggcgccactttcttgattggctccggtgctttcttggtatttacgggttctggtgtcttcttggccgccgttgtgcttgtggccagtgaagatttctttacaggctctatcgtcttcttagccggttcaggggtcgaagtcttcctcgcggctgcagtcgtggtagcagttgcttttggtttggccacagtcggcttttctccattttcctttgttgccggagaggcggtcgtcgtcgtcgctgttttctttgcccacggagtggcagtgggctttgtggtactgctggtgccactggtgccgccgtcgtccttcacccatggcggacggaacgtggtgcgtccgccgggcgcactgcttgcactgcttgtccccgcacggggcgtcacaaacggcatttcgtagtcgctcgaactgcttgcggtcctccggactattctagactattccctctggtggtttatatttttttccagtcttattggtgttaaattctccagggcccgatgtcgtcgcccgtctgttcgcacactctttttaaataatttgccgtgaattctttgcttgtttttcccgcttctcttggcgttgctgctgatgaaaacacaaaactttgcacattagcaccgtcgggggaagttgtccgaaaaagttctttcattcagattttccgtaatttttttcgtttatttttctatttgttttttgattttttttgtgtatgtgcctcgccttgataattctattttacgcgtatttcttttctaatagatttttatgtatttttttcgtcgcgaatttgttgctgggaattttattcgtggtccgttgccgacgatgagcaacagctgtttgagatactttcaatccgattcaattcatttcatttcgtgtatatttgggtatgtttcattttgaattttatttttaactgaatgcgctcattagctttgctggctgtttttcttgtttctgtcgctgtttctactaagagacagaatgtaggcctttgtgtcatagtcatggacagggacattcacagatgccgaatgtgatggaaataggaatgtagagaggatatggggatgatggcggtcggcaatggggaccgggacaaatgcatcaacaaatcccaactgagtggaatgcttttgcaggctctcacaaaaacgcctacagttgcagccaaatgtttaaattccaggatatttatagcaatcgataaaatcgagatcatcctatccgtcaagataacaaggttttcttataaactttcaacttgtcaaataatttaaataatttgaacgaaaacgatgaaatgaaaatgctttgggaatgtttacttttcagaaaagtattatatgccgaactattcaacaaacatattgtgccatttgctggtgatttccaatatttctttcatacgaaaaccaattacgatagaacgaaaaatgtttacatataaaatgaattttaaatcaattactcatggtcgagaaaagttatagcttgacttaatgctgataaagtaaagtgcagaagatggaaactattcgctcttgctgagttttctttggctcgcgattttcctctgccgtttttctatgtatttttaatgacctcattcctgggcagattgtaaacaacaatttgcaacttttcctgctctaattgggcaaaaggatagcgaaacattcctctcgcttgcaactgcaactttctgtgaccactattatgttggccgccactgtgctgtgaatgtgaatgtccagctaaacgcctgcgtatgtgtgtgtgtccgtccgtccgtccgtacatatgcactccaataaacagcacaaacaaaaagaacaacagcaacaacagcgtcggtgtatgggaatagagcaacaaaaacaataacagaaacgatttgctctgccactggctgcgatatgtaaaaggcgaaaatatttaattttaggttctttgtgcccgccgctgagagtggaaaaagtggaaaaaagtgaaagacactggcggtgaagagaagcacccaattgggagagacaaaacggaaccaaatcgaaagaataaaaggaaacatacatatctctggcgctttcgtctttcgcctttttttccattcactttgttttgtttttattcaactggctcgtttcacaaagtagacagaaaaacgtacacaaaactggttgtacggacggaaaaaaaaggccaaaaatttgtgatagaaggggcgctctcgggggtcagaatgaaatccgaattcgtttcattccattgccattccatggcctggtccaaaaccatccaacccccttcgtcgaagcccatccctcccccacattcaccatattcatttccattccactcgttttggggcgattgcaaatttttttttggccggagcgacgaacactttctcggtctttcctgcatggaggcgttaattaaacatgacatgcaaataaaaattatacttagaaatacagtcaaacttccattgcaagaataaccgacgaaagtatcttttccgacgtctatttggttgcctatctgtcagttccaatttgctttgaatgcattctaagctgtttccactcccagcttaagcgatgcttatcgattactaattaatggttggcaattgaatcagattcgtaaattagatccattgaccatttgacagcacacgaagcaagggaagttatatcgaagtacgactgtatttcgaacattgcagaggattccagaagatagttaaggcgaggacgaaacaaaaatgcaatttcaattaaaattgttaatgagactggctaatttgacgcaaaagtttcgcggatctgtgctcagaatggcaactaacagctaattcccggccatatttcatcctaagattgcctgtcaacaaaagtgcttaaaaaaaaaacaaatatatcggacgggatattttgggaactggccattcataacgcccctccagagagatttattagatcgattggccagtgacaagagctgcgcatattgccgcccaaatgtacacgaatctgtgtctgtggctatatgctatatttttggatatttcacggatttttcagatttttattatgtgtattaattggttcattcgcgctcgctgcagttttcgtagcacgttcgcgtcgttgtactatatattgcacagatatatattcatatatatatatatatgttgtatatctctttgaattgtacgtgtgtgctggttgggtcagacacccgcacatcaccacaaccgcaggcacacacacacccgcacacacacagccacgaactctggtagtgaattttcagcagcgaaggcaacagcagcgcctatgacggcgtttcaaaaactaaattcatacattttccaacgccacggcgatgggtgaaaaatttgaaaattttcccgctcgctctacgaattcctctctcgtgggatttcgctcattatctcttcgtcgtatttcggtgagcacaaaatgaagtgaaatgaaaattttgttgaccgacagaggcatatttttagcatcttttttgatatgtgggcacggtctgtgggggtttggggggatatggggcggatccgcggcggatccaattgaccttatggcaggtgcagttcaatggaattattaatagccggctattggctatgtggcccgtgtgccccaaggatacaaccccctcgatatccgctcatcattaggggcctcttatcaggcgcctcgcattcaatggaccacaattacgcaagtttctcgggcggcgtgggcgtcgcagctaatttcagggggagtgggtggtttggtggatgggtggttggtgcgtcttaccctgtgatagaaaccactcgtctagaaagtccaaacccattagtgcttctgttcgatggtcagttctgtcccaatgcgttcgttctctccgaatcgctttcaatatttacattgtctaccaagtggttgcttccccgtttcactcgcgtgtgctccacatttcggtggagcggtgcaatcgatcgatcgatcgtttgatcagtgcgtatctgtatgctggggacccctttatcgattgaactattgctagactaattgattggtgatgatactaatgaactggtaatataagctgaatcagtgagtaagcctcttatcaccttatcaacgtaacataatgtatgccatttgcatatcgagtttccacaggagtgttcgattgaactaatttaattttgatagcattttcgaatcgttttcgataaaaagagttactgagttacttgctgccgccgaaatcaatccaatagctgcaacagagcgaaaacaaatgattaaagt

SEQ ID NO: 35921 - DNA, 1463 bp, DROSOPHILA
ataggcgctgctgttgccttcgctgctgaaaattcactaccagagttcgtggctgtgtgtgtgcgggcagcaacgccaagagaagcgggaaaaacaagcaaagaattcacggcaaattatttaaaaagagtgtgcgaacagacgggcgacgacatcgggccctggagaatttaacaccaataagactggaaaaaaatataaaccaccagagggaatagtctagaatagtccggaggaccgcaagcagttcgagcgactacgaaatgccgtttgtgacgccccgtgcggggacaagcagtgcaagcagtgcgcccggcggacgcaccacgttccgtccgccatgggtgaaggacgacggcggcaccagtggcaccagcagtaccacaaagcccactgccactccgtgggcaaagaaaacagcgacgacgacgaccgcctctccggcaacaaaggaaaatggagaaaagccgactgtggccaaaccaaaagcaactgctaccacgactgcagccgcgaggaagacttcgacccctgaaccggctaagaagacgatagagcctgtaaagaaatcttcactggccacaagcacaacggcggccaagaagacaccagaacccgtaaataccaagaaagcaccggagccaatcaagaaagtggcgcccaccgtggggcccaagaagccagtagccaccacttcagcgctcaaaaagaagaaggagccgacaccaccacccgaatcctcctccgaggaagaagaaagcgaggaggaggaagagaccgaagaggaaaccgagtctgaggaggaggaaagcgaagaggaaagcgagtccgaagaggaggagagcgaggaagaggacaccaccgtggacgagaaggtgcccgagcacgtgaagaaggcggcccaattgcgacccaccaccgtgaacaagaagccggaaccggaaagtgagttgacccaacgttttaccatggagaaacccaaattacgcagcgtggtggtcaagcgggataagtccttgaaaaagatggccaccgaagacgacgacgaggccgaggagggcgaaacggaggaggagcgcgaccggcggcgacgtttcaaattagagaagcccaagctgcggcatgtcaagcgcgaggagaagcctttgcccagcaagagcaccgacgacctggccaaaatccggcccgtgctcaagaaggtacccaagatcgatgagctcctcaaggagccgaaagaggagccaaagcccgagttcacgaccaagaccctacgcaaagcgtccataaagcgcgagccgagcatcaagagcggtaagttgtccgatccaaatcgatccgatccggagccagctccagtgatggaacctaacccgatgcccgactggattaacccgattaacctctgcgaatggatcgactcaacaagcgctgtaaatttttgcccctgcttctttaatgtctaa

SEQ ID NO: 35922 - protein, 399 aa, DROSOPHILA
MPFVTPRAGTSSASSAPGGRTTFRPPWVKDDGGTSGTSSTTKPTATPWAKKTATTTTASPATKENGEKPTVAKPKATATTTAAARKTSTPEPAKKTIEPVKKSSLATSTTAAKKTPEPVNTKKAPEPIKKVAPTVGPKKPVATTSALKKKKEPTPPPESSSEEEESEEEEETEEETESEEEESEEESESEEEESEEEDTTVDEKVPEHVKKAAQLRPTTVNKKPEPESELTQRFTMEKPKLRSVVVKRDKSLKKMATEDDDEAEEGETEEERDRRRRFKLEKPKLRHVKREEKPLPSKSTDDLAKIRPVLKKVPKIDELLKEPKEEPKPEFTTKTLRKASIKREPSIKSGKLSDPNRSDPEPAPVMEPNPMPDWINPINLCEWIDSTSAVNFCPCFFNV

SEQ ID NO: 35923 - DNA, 3322 bp, DROSOPHILA
tcgattgaactaatttaattttgatagcattttcgaatcgttttcgataaaaagagttactgagttacttgctgccgccgaaatcaatccaatagctgcaacagagcgaaaacaaatgattaaagtctatgccactgccgcaaatatttatttaacgtgcaatgtaggttatcaatggcatgttttcaaatatttcgtttttttatacacatctgcgcgaaagcacgccactaattgttttgccttgtcagcatcagccgaaaagtatgccaaattgaacggcaaacattcccgcgcacacaaaatagccgagaaatttccgcttaaacgggccattgctattcttttttttttttttgctgtccgtccgtccgtctatctaacagcatttcggcaatattaattatatatttattcatttggcaaaatacagcgcatatgtattggggggctttaaaaataggcttaaaggcaattgcgctgtgggttggaatgccaatatgatgcgacttcccccggggtcttattaattcatcagtcccaaaatgctcccagaatggtttcgtccgcatgtgaggattggcgggtacttttggaccccaaaaccactacgcatcacctcgcatggcgagccaatgtcaaatggctggaaaaacctttcgatgcgccggggtcgccgacattttcagcgccgcgtgtcgtccaaaaacttctgccatcgaaatcgaatttgacacaaattaattgctatttgatttgacaagtgcgaacgcgggcggggggcgatggggcggtgggtcgattgtgcggacacaaagagcaacagcgggggttatgtttaagtgttatcatctagaaattgctttatttgtgaaatgttagaagagacatctaatgaatactgaatgaactccttggcgttgtgcgtggagccgagctcgttgtggcttctcttaaactcgtaagctttgcgaggacgatgagggccctccaatccagcctagaccttgggcgcagctggcggggattggtgcggcttttgtggtgctgccgcctgtggatggacgtggggcacgacgggcgccgtggtgctgctgacgccttcggtgtcgtttatgtgggtaaagtgcggccagctggagatctcggcgaacaggcggccgccaggacactcggtatcccgcacctgtcggtggcccagcagcttgtaggcagggtcaatgtagcccttgaaaacgccaaaggcgatcaggttcttggccgcatccagcatctgcttgggcggcagttcggctaaagggaaaataaggaaaagtaattagtacggagtttaagaagaaaatgaagagaaggaagaaggctcattaacaacctaatgagtttccatgactctttaaacggtattaaaaagaaatctatcctcttaaagttaggagttaacttacttctccaatctccgatcagcacaatgcccacgctcttgtcattgtacttgggtgcatgagctccgatgacattgaatcccctgccggtgtaaatcatgccatcgccgccgatgccaaagctataaccaatatcgttccatccgcgctccagctgatggaagtcctgcatgtcccgcatgctcttcatgcagtccggagtggagtagcacacggccggcatgtacgagtgatggatgatgacgtagggcgcgggaccctggaagtgctccacggacttgggcagccgggcaccccagtcggatcgggacagcaggcgggcggtggccacaccgtcgcccagattcgcctgctgcatgtgctgactatagcctgaaaacaaagatgcagtcatcttggattagttgggttctcactccatggttgtttgttacacaaaaactataatttatttggcaaaaacacacagtcactcggtcgattcactgtaattttgaggagtgtgctcgggtacatcccacatggaaaatttggtttttaaattgtattttgcgtgcgagctgtttgtttacatttattttcgtgaattccttagcgtggcgcaaacaagttcaattttaacttttgccatactttatatctggcccccaaaaactcttgccacttccaagacagtcagcatttgttggccctaattgcaaaagggggggcgtgtgtactgcggaggggcgggaagtcgtgtggtctgcggctctgctaccgtgtacatcgctcacattccattgataaatgatagtcgaactgggatgcggattcggtttccccacggagcgcagctgtctgcggatttcagcggcggcggtggctgcggttccgacgacccacgattttcaactgacgctcggccggctccacaaactccccaacgccgctgaaaacccccgttatgggctgaaaaacaagtcgccgatcggatcggctccgattgccaatagcgatcgtcatcagatgacgctgagcgcgaaccaaatatgctaaattgctgttgtgataggtgatttttatttgatatgtatatttgcttgacattccctggtaaaagttgggcatatccgttttaagtggaacaaaaaccaataaatatatacattggctgtcaaaatagttgatattttacctgtttaaaaataaatactgtcggaaaagcgtacatattattaaaaaaaaaaaattgtggtaaatatattccaacgctttggtagcaaaagtaaatatttacattgactgtacgctgctgtgtttgcttacaaacgcgctgatgatatgcagatatatgaatgtgtccatttgaccgtagggcaaactcgattcgttctggccggtggccgcatcaccgtgactcagcttaaagcgctcaatgcgaaatgtttaaaagccaaatggcagaggaagtggccaagtcgccgaatcgcaacaggtgctacaggtctacgggtatcatctatcaatggcgtgagcttttggccgttgacactgcggaatggagctggggttccgtttggccctggttcccctcccgatttgtcgtgagtcataaatgcaaattcagactccaatccgaaaactattttcattcaagtttaaactgcttgcatgtatgtctgtgtgctgactgagctggcaaacatggggattgcaaaggggagcaaggttcgagtgctgccatgtttgcggcgtctgccgaaacttctccggccacgcccacagcggccatacgcccacggcatttatatgcatacggaaaacttggcgaagaaagtgggcgagtgggtgtgggctacccgttggaaaacggcggaaaagcgaaggcgacggaaaca

SEQ ID NO: 35924 - DNA, 970 bp, DROSOPHILA
tcgtcggaaccgcagccaccgccgccgctgaaatccgcagacagctgcgctccgtggggaaaccgaatccgcatcccagttcgactatcatttatcaatggaatgtgagcgatgtacacggtagcagagccgcagaccacacgacttcccgcccctccgcagtacacacgcccccccttttgcaattagggccaacaaatgctgactgtcttggaagtggcaagagtttttgggggccagatataaagtatggcaaaagttaaaattgaacttgtttgcgccacgctaaggaattcacgaaaataaatgctatagtcagcacatgcagcaggcgaatctgggcgacggtgtggccaccgcccgcctgctgtcccgatccgactggggtgcccggctgcccaagtccgtggagcacttccagggtcccgcgccctacgtcatcatccatcactcgtacatgccggccgtgtgctactccactccggactgcatgaagagcatgcgggacatgcaggacttccatcagctggagcgcggatggaacgatattggttatagctttggcatcggcggcgatggcatgatttacaccggcaggggattcaatgtcatcggagctcatgcacccaagtacaatgacaagagcgtgggcattgtgctgatcggagattggagaaccgaactgccgcccaagcagatgctggatgcggccaagaacctgatcgcctttggcgttttcaagggctacattgaccctgcctacaagctgctgggccaccgacaggtgcgggataccgagtgtcctggcggccgcctgttcgccgagatctccagctggccgcactttacccacataaacgacaccgaaggcgtcagcagcaccacggcgcccgtcgtgccccacgtccatccacaggcggcagcaccacaaaagccgcaccaatccccgccagctgcgcccaaggtctag

SEQ ID NO: 35925 - protein, 215 aa, DROSOPHILA
MQQANLGDGVATARLLSRSDWGARLPKSVEHFQGPAPYVIIHHSYMPAVCYSTPDCMKSMRDMQDFHQLERGWNDIGYSFGIGGDGMIYTGRGFNVIGAHAPKYNDKSVGIVLIGDWRTELPPKQMLDAAKNLIAFGVFKGYIDPAYKLLGHRQVRDTECPGGRLFAEISSWPHFTHINDTEGVSSTTAPVVPHVHPQAAAPQKPHQSPPAAPKV

SEQ ID NO: 35926 - DNA, 2150 bp, DROSOPHILA
catgaatctgaaaaaataaatgcagttgcaagtttaatatccgtctggggctctcgactttttttgtactataacttttgctactttttataaaccttttgaaatcgctcgacttgaaaagtgttttatataaaaaggtactcatcgtgagtctttagtaccatcaggtggactcaaactttgcacttttcttttcggtgcacttgcaaatttatctgagtccgtccgcagggactccttatatctccggcatttcccccagcccgcttcccgctttccgctcaccacttcccgccatgccccttgccctcgggctcttgttctgtggttacatttcagcggaagtcccacgcaacgccaccggcaacagctgcactctcactttgcccctgccacccaccacccgccacgtccaccatcaccattacattaatacccggtagtcgtggaatgcaggggagtatgtgtgcatgccaatgaagaatatggaatatatattcctggataacagctgaataaattcctggatttcaaagtctggacaagcaataaaatgctgaacaaaattacttgactatctagcacttgaaagatgtttaaagcattttcgcttacaagctgaacacctgaaataaaaacctattgatagtaaacaggaataagtagtaagtaaatacatagattcatatttcatatactaaaagcttgaatatgagtgcaacagttgcttcaaatgaatgtagtcagtatgccctcataagtaggcagctctttttgaaagttagaaaactgcgcactaagtagctgcaagtcggtaaacaaggctttcgtccttctgtttgtggcctgctggtgtcatattctctacgtacgacaatatcggtacataacacgacccgcgtgcaggatcctgccactcctgctgcactgcatctccttttgccattcccgtccactggctaccgatttcactcgcaactgcaactcgctggctgcaagtatgcatgtggatgtgaatctggatgagtatgtggatgtggctgtgtacgtgaatgtggatgtggatgtggatgagaatgtggatgtggatgtggccccgaaacgtggccccgtcatgctgcgcctgcattgtgttaatgctttttgttaagcaacaagaagcagcggcaacaatgtgcgatgggcgggaagggcggaaagggcggaaagggcgactggagcggtggggggatggatggagctttattgtgcagttttgcagcgtgtgtcgctttttgcaaatgtttgccgcacacaaacacatacaaacggcgcacacatatacacacaaaatcagcagcagcaacaacaacagctacaacaacgacattagcgacagtcaagcgaaggggcagcgtgaaaggggcgtggctgtagggacagcacttgaaggatactttaaaattaggagcagcgtaaacgaaaatgctgcagcctatgcatgcatttgtccccttttctacttttatttcgtcctgtgtcctgtgccacacgaaggtgaatgaagtgaatgaactctgaataaacgaaaccgcaaatggaccacttccactgggcaaaccgccgaaaattgcaccactttgcatgatcgctcaaccactgcaggcgattcaagtccacttgctcttcaagaaattaaaaaccctcgaatacgcaatgaaacacaatatatgcgagtcagctaagccgcgactcttcattaagtattttaaataaaagatatccattacggaagagggaatttatttttgaagcaattaaaaataaacgaaaaaagctccaacaagcttcatatttatttttctcattttacagcttaatgataatttttatttgggatatatacaatattttaaatgcaagaaaaatgaacgaaaatcactcagttgtggaaaaaatatggccaacagttaaaatgggcaaaaaacgcaggtgaatgttaaggataacaaactaaatggcaacttaaaaatcaatgcatcaatcggattgtcgattccgtttagcaagaataaatcaatgacatacttaatatcttttggcaaaacaaagtacataaatgcccgtaggcctaataaaatttctaattaatattatcaagcttctttgag

SEQ ID NO: 35927 - DNA, 150 bp, DROSOPHILA
atgcatgtggatgtgaatctggatgagtatgtggatgtggctgtgtacgtgaatgtggatgtggatgtggatgagaatgtggatgtggatgtggccccgaaacgtggccccgtcatgctgcgcctgcattgtgttaatgctttttgttaa

SEQ ID NO: 35928 - protein, 49 aa, DROSOPHILA
MHVDVNLDEYVDVAVYVNVDVDVDENVDVDVAPKRGPVMLRLHCVNAFC

SEQ ID NO: 35929 - DNA, 2219 bp, DROSOPHILA
gatttggggctgaaattgagatattatcccccaaaaagttttatgcttaattcatttgtaatttctctggggaagggattgggattatctgattgtgcttgattcgcttaatccgttgctaactgctgtggcaactttcggaacttttggttgcatcctgtgcgttctttccatgcaattggctgcagcaatttcacttggcttttattcccccccttatagggtccctccgaccagcacccctccccaacccctttaaatgccatttccgacacttcggtctcattcccgccgccgccgctgcctcgctcgcacacaaacacacacaaacacacacacatccgattagcaatttccatgcacttgagagatttcattagccactgtcgttgttgtttgtgccgttgttgctgtcgctttccatttgccatgacgtgcctggctggttttccttctttgattttcccaacttacacagcacagggaaaaatcaaatttttcaacaatttaattccatcatttttcatcgcatttctggtgcttttgtttggcaaatatagttcaggggttgaaaagtgttcggattagacttaaccaaaagaagtgttatggtaagctaaaattgttaagactcttacttggtatttagaaaatgtaacttttaataattgaagttataaaaaataaataaatgtatagatcacgtgataaaatagagatatattatcttatgtattcactagatacttttgacagcctctcagctatgatagctctggtttttttttttttgtgtggtgttcctgaggtttttcactacgcactctagcttcctatcgcacttgagcactttccatgcattttaacaatttccctggtatactccaatttctattttacaaatgttttttcatcgcccaccgcccgctgcgtcttcaatgcgtttgttgttgtcaaaaatgttgatgaaaatttcataaatttatttgctgtttttctcctagttccttttgctgttgccccatttgttgttgttgtcgttgtcgttgttattgttgttgttgttgccctgcattcgttcgtgctcttctgagccattaactacgccactcgttcgcttttgagccaagagcaccccgaatcgctccaaagtggttgtggaggcggatgcggagacggatgctgtgggtaggggatgggagctagtcaagttgcacatatcgtaaaatatttaacgcttttaagggtccttcgcaactggccaggtaagttgctacgttgctcccggtgcgtaagtcattttcatccgcttagcagacggctggccatttgtctacgtctttccacttgctgcctgcatttcatattgaatttttcactgaacccactctactctacacgtagacaaaaattgtggtggctattatggctattacttccgattggagtcatttcaaggtttcacttgattgcttataacctataactataagtggctaacattcaagtagagcggggacaagatgataacttaaacaaggtcgacactttattggaagtgaaaagaaattataaacgggtaattaataacttttaaattaggttttaactatgctgtgcaaagaatctataagtgtgattaggggatatggatatggccctacagctaaatattaagcaatatattattggttattaccaatatttgcaggattgatattccaaataagatttatatgccataaatcagtttctgaatttccaacactttttctccgcatgcaatccccctcccttctcccccgtgcagactataacatcaggtggggtatctgaaaatatcgatgtatgaattttccgacctttctccaataaattctcgtggcaacggaacgcaacgcatcgaatcggacgtgattttagcttcacgcacgcacgccgcacctaaacaggggagttagtttcatttagaggggtggatcaaaaagggggcgtggccgagggattggttacgatgtcccaaagaccccacacacacacacacacctcccccccccccccctgccttcatgtatggcccctttggcattgctgttttctatgtcatggcacgtattttggatttctgctacatttgaacttaatattttccccgtctactctctgcaagtgtgtgtgtgtgtgagtgtgggtatgtgtgtgttcgctggaaatttgct

SEQ ID NO: 35930 - DNA, 219 bp, DROSOPHILA
atgtgcaacttgactagctcccatcccctacccacagcatccgtctccgcatccgcctccacaaccactttggagcgattcggggtgctcttggctcaaaagcgaacgagtggcgtagttaatggctcagaagagcacgaacgaatgcagggcaacaacaacaacaataacaacgacaacgacaacaacaacaaatggggcaacagcaaaaggaactag

SEQ ID NO: 35931 - protein, 72 aa, DROSOPHILA
MCNLTSSHPLPTASVSASASTTTLERFGVLLAQKRTSGVVNGSEEHERMQGNNNNNNNDNDNNNKWGNSKRN

SEQ ID NO: 35932 - DNA, 3728 bp, DROSOPHILA
ttcatttattatggagaaacattgttcgtttatttttgcattgtttaaacagaaaaacatacttgactccgcttaggctagcttcattaccatttttcgttagttttaataatttctgtaagtttttcctttttttcgctatttggttttgggttgaaacgcgatcgaatcgatccgttcgcacttactgcttaaaagtcttatcaagaccgcttaaaaccgacctctaaatgtacaattatcaattatgaatattttacacagtaactagatgatggactacgtagaacaattttgcggttgacaaccagataaaaacttatccatatacactgaataaccatctatatatatatatatatatatgtatatataaatatagagggggctaacctccccatctattcacttcattcatttcagttcccaacgtgcagggtgtttgatttcggtatgaataaataaacaatcgagggcctaaattatttatgtttgtgtattgtatatatacaatcggacatttctgcttcaataaacccaaatgatactgtaaaccgaaaggttctctataattgctgacttttggccggttttgcggtgattatagccctgtgtgcaaaagcgaaatgaatttcaaatgatatacaatgaaaacactgatttttgggttgaacagcagctgctgcgattttgttacgttatactttctcattaatttttccaactatgagtatgaatagtgcatgtggcctggactctttctgttgactgtggttgattaaaactccttgcgtaatactgcctgcctgcctgccagcctacctgtcttatagataatactcgttgaaggacacactgtatatgtacactagttcgtaagacttcgctccaccgccgctctcattaaatgcacctggcgaggagtggttcagtcccaacttggccgggactgttgctcagcgttttcgatcttcgactgtcaatgcaactgccttccggatcagctccagctccagatgcccactagaccggcggccaggttgctccaattccatttagggttccagtgccagcgccagtcggggctccagttccagttgatgttgaggttagagttccaggcgacagacgccaccgtcatcgacatccaggtggcaaggacgaaaggcacggacgtggatgaaagggggcgcaggcaggtggcgctgctgttgccgtgctgcatggcggccggatgttccccgttgatgacgtgcaccaccacggaggcagaatctgcaacgaatggaagtggcgggacgtgaatgtggcggtcacaaagtcatattaattgccccggtggcacactcgccaaattcagtgctcgaatcctttgaaaagtgaggaatttatatatgacaaattccaaaagaaacgtataaaattactgcattgatgtgcgggttaaaagttaagttacttttaatcgaattttagcaaggaacagaacacgcttttggcttttgacacgaaataatttatgagttttattaagaggctctataataacctgatacttgcccaagcaaacacctgtgtttaaagtacgtgtaattattagattattacaataatagaatgcaaactttgcacagaaatagaagacctaaaggttaatagctaggcatgacaataaatttcacccattaggaaatccaacgcagacagcgagttatttataaaaggtatcaataacattatacgcccacccggaaaagctcagcctaatgaacaatcactcatgttttccatttcacttccgagtggctcaaaaagttcagaagactttcgtgaacagattgttgctatttttggagtactcgtaagtaatgccttgccttttaaattaagaattgaacgagttgctaagacttttacaactttgcttaaattaaagattaatccccactgaaactactcgaagtagctttcagttacctgtcttctttgcacattgtttttttttttttttttttggcaattaaattttgcgagtgtgggtggcagcttggaatgtggagctggacgtggaactgggactcacctgagctgctcggggagcacgtgtagttgcccgaatccgccggcgtggccttggctatgagcagcttgctggtccgtgtggaacgctccgtgatgacgttgatgccaccgcgctgcgagtaattcatgacccgcttgcccttgtaccagtagatgaacgatggcggcaccggcgactgcatcgccaggcaggtgagattgatgtcgctgccgctcttgatgaagagctccgcgttgcccaggatcttggcccgtgacactgccgttgagaggtaataaaaagccacacggggcaggccattaattagcacaccgcccacttaatggccagcgaacatcacttcccccatctcccatcggcccatctccaccggcttcgatactcacccacaacgttgaggcgaaatccttggctgatcttcggctccgtggacacctggcactcgtaggtgcccgaatcccgcggctgcggcgatgagatgcgcagcgtccactcgtcggatccctcggagtgcagcgactggaagcgctggtcgtttgtgtacgttagtattcccaccgtcaggatgtgcaggtcgcgcttccttatccaggacacctggcggagaaggaagtggccattaagttcataatgcgttgagcccataagccattagctatggcattttttagagcataaagcctattttattaaaattcctacactgaaaaacattttcttttctcaaagaaaaatgcattatatgcaagaatattatcgcttttggtatttccccttatcaaaaaaaaaaacagaagtggccatctcgttatttttatacaccactgccactgcctcagtatttttcaattgtacaactgtgctggttttcgtaaacaaaaaattaattcaatctaacttttgttgccacttggcaccagcaaaaagttgacctacatacacacttgaaaacgtgtatataaatttaataaaagcctttttcggctgcctttcttgcacgaaaaaaatgcatgcagctgtcaaagttgcagatgaaaaattatttcgtgctcaaaaggggagtggctcactttcgtaaaacattataatatgtttctatattcgtgctgtgatgttttatatatgatacaccaaattggatgcatataattgcatactgctgatgccacttaaatatcgacataaacaagattatctactctaaactgctaaagtgaaactaaatcgacttgccatctaatatttgcatcaaaatgttttcaacccatttttttcgatttttttcaaagcgaaaattgctctatttgtgttacggactgaactttatgacatctctctggcaatagagaaataagccaaaagttttgtcgacgaaataaaaagttttcacttaatattcagtggggcaagtcgcaaatcgtttcacatggctaatccccaaaataataacagaattgctcttttatatgttcgtataattagcaggatttttctcggccaacaaaagtgtgtggcacggcttaaaaggattcctgccactcgttctttgtgctccttgccagaaattgtggcacctgaaggatgccttagctccgaagcaccgaagcaccaaagctccgaagcaaattgagcaactttaaatggt

SEQ ID NO: 35933 - DNA, 792 bp, DROSOPHILA
atgggctcaacgcattatgaacttaatggccacttccttctccgccaggtgtcctggataaggaagcgcgacctgcacatcctgacggtgggaatactaacgtacacaaacgaccagcgcttccagtcgctgcactccgagggatccgacgagtggacgctgcgcatctcatcgccgcagccgcgggattcgggcacctacgagtgccaggtgtccacggagccgaagatcagccaaggatttcgcctcaacgttgtggtgtcacgggccaagatcctgggcaacgcggagctcttcatcaagagcggcagcgacatcaatctcacctgcctggcgatgcagtcgccggtgccgccatcgttcatctactggtacaagggcaagcgggtcatgaattactcgcagcgcggtggcatcaacgtcatcacggagcgttccacacggaccagcaagctgctcatagccaaggccacgccggcggattcgggcaactacacgtgctccccgagcagctcagattctgcctccgtggtggtgcacgtcatcaacggggaacatccggccgccatgcagcacggcaacagcagcgccacctgcctgcgccccctttcatccacgtccgtgcctttcgtccttgccacctggatgtcgatgacggtggcgtctgtcgcctggaactctaacctcaacatcaactggaactggagccccgactggcgctggcactggaaccctaaatggaattggagcaacctggccgccggtctagtgggcatctggagctggagctga

SEQ ID NO: 35934 - protein, 263 aa, DROSOPHILA
MGSTHYELNGHFLLRQVSWIRKRDLHILTVGILTYTNDQRFQSLHSEGSDEWTLRISSPQPRDSGTYECQVSTEPKISQGFRLNVVVSRAKILGNAELFIKSGSDINLTCLAMQSPVPPSFIYWYKGKRVMNYSQRGGINVITERSTRTSKLLIAKATPADSGNYTCSPSSSDSASVVVHVINGEHPAAMQHGNSSATCLRPLSSTSVPFVLATWMSMTVASVAWNSNLNINWNWSPDWRWHWNPKWNWSNLAAGLVGIWSWS

SEQ ID NO: 35935 - DNA, 2186 bp, DROSOPHILA
ttttgactctgcccccgcaccccgccgaagtatgcaacgaaatgcgaaaaattccatttagaggcaaattttcatgtcgtgcatatattgcgacaatcaattagcacgaaagttggacgaggagcacgttgaatgactggagaatgaatccctacgactcgggattcgtgcagcatgcagcatggagcatagagcagcgagaatgttgaatgcaacgtgctggagacaacgccaattagccgcatataaggggagacaatggctcggctggaggattagggacaccgagctgagttcagagctgggctccgcatgttggatcctccccagctccaagcccggcgttaattactcaattcaactgacttgctgaaagttgggcgggcgaacgagcgttgctgacatcgttgtcgcttcctggcggcgaatcggggtctacggggtctacggcgtctacggttggatctccgggggatacggggcaagacacggacaacgtaaaatttattacaccgcataattgcacagccacagagcgcttgcttgggacaaaaggttgagcaggcagttaggtggtggtagggcggggctggcttatgggtcaggggtcaaagggcagagagctgagggctgagggctgagggcggttcggggcccagtgttgttgcattgctaacaaatcgctcgtagcggaagcgaagccgtgttacaaatgtgcaaaccagagcgagccaaacacaaagtgctattgggcgttgggatggggcgcgtggagcgcatgaagcgcattcaacccacagacattcgggtatgggtgtagccaccaccaccacaatggtgggtctgtcgggtccaaccgccaactttatggcgtaatcttttaaaagtaatctacaaatctgccacacgaccgccgcaggtcttttgttttgctgtatgccttatgccttatgcaaatataatgctggggaaacctttggggcgcatggcgcattaattgctagctgctccgcagccgttcctgacccccaacacttaccgctcgatcgcccagattccggacgcggcagtgcagcagggccgcctggccgacggttgcggtgacctcacgcctcgaggagttgtcgaagtacggctgcgagtacggggtttcccagtaatgcggcggcacctcgccaccgaccatgccgcaatctgtgaatgaacaaacagtggatgcagacccattaatacctatccatgtgtatgtgtatttaaatggggcggaggggtgtaagaatatcacttaaattgcccatcaattatgcacgtttgctggcggaagaaggtcgtttttcatttttgaaacaaataaaagctctccaacgaaacgtattctatttggggccttaaattacctaggcgagatttatgcgagatgcgattaagaggctgctgaaagcgtcttttggcttaaatcaagcctatcatatcggttcttgtcatcagtgtcaatgggcttaattaaaatagatgtgcaatcgaccattgacacattgacaaattcgaatgatcttgaatgcttaaatagcatatttaactttaatttccgcttgctgatataaactactttagttgttaataaacttataggaacatagtaatacctcttttattacaaaatgaataggacagtgaagagcacttaaaagcctgtacatttttaaactaactacattcactctcagcgatttatgaggctataaaccgtctgcggctttgatcctttttccttttgcattgcctattactgaacagattacacctacattttttcgccgtgcaatttcatggaggaatacccaccgaggaagaggagcagccacagcggcaccaagcaaatcgctttcaacgctctcgggcagtccgttgtccacatgttttatgctctccactcggactgctactacggctgctagctacttcgatgagggcgatgaggaatcctccgctcctgccggctgttgtatttgctccgtttacggtttaaggtttaataatctgcaaaggaggaaatattattaccagggctcttttttatggtaccagtggcgaaggacacgcctggaaaataactgggggaatggcaaagtaatttgccgggcaaatgatgaaagccagatatatatccggaatatgatgggggg

SEQ ID NO: 35936 - DNA, 186 bp, DROSOPHILA
atggtcggtggcgaggtgccgccgcattactgggaaaccccgtactcgcagccgtacttcgacaactcctcgaggcgtgaggtcaccgcaaccgtcggccaggcggccctgctgcactgccgcgtccggaatctgggcgatcgagcggtaagtgttgggggtcaggaacggctgcggagcagctag

SEQ ID NO: 35937 - protein, 61 aa, DROSOPHILA
MVGGEVPPHYWETPYSQPYFDNSSRREVTATVGQAALLHCRVRNLGDRAVSVGGQERLRSS

SEQ ID NO: 35938 - DNA, 2618 bp, DROSOPHILA
gtaatataaacataaataattaattatgttttcttatgcaccataataatgtgccacggaaaacgctgcttagaaactaggcaactaaatttcaaggaaaatttcttagcaagttttgacaatatatttcacttttacactcgtttcgagtataaatttcttgcggttgataaacagatttaattaagtttctatgtagttattaagacaatttcccaactatctgtcacttgaaagagcaacttttagcaatagaaccgcaagtatgagcatctatagattcgattcaatgttttcgactttcaattaagaaagttgaagtgacgaaagttgcgattgctattcggttgaccgcacctgtgggcacagtatgtgtgtaagtatgtgttgctgtgagcttggcgtataaaagaaagcacgttattgccaatttaacttacattgtgcatgtgtctttaaacaaagatttatgtacccacttgcatgcacgccgttgcccagaactcgttgctccagacccgcgattcctgtgtagcatatatttgggggcgcgattttcgggggctgagctcctttcgctgtgttggtgaggtcaggtgctcgggcaataactcgctatggatgggtatatgtgggtttgggtttgggtgtggggtgcccacttaaatcagcataatgatatgcacttattattgtggcaaatttgttgcggaagtgctgcgaaaaccgcacaggatgggccccagtttcaggagtttcctagttcccaagccaagatcctcccaacaggacatgcttttcataaattaaaatctagtcagcctatgtttaactttcgcactcaaataattcgtctcagtagcctctgactttgatctcggcgcattagtcacaaatcagaagttgacaaagtcggagctgaaaaagaaaaaaaaccaaatataatcctttactatagtacagttaaatatatagtgcagtatagcagcatatcactaaaatggccgagcagcattataatgcaaatgatttggcttccgatccaaattcgcgtaaattgaagtttgccggcatttgcaaactaaataataacgagctgtcgagtctctacaatatcgacaagttgaccgacgaggagctggcgtccgtgaatctggataggagctccctgatcgatgactatcgtctactgcacgaggtgtcgcagatgaagcaaatagagaatgaagcaaataatatccctgctgctgctccagcaggacaaccaaaatccaaggagttgcatgagcaattcgtaaaagagatggagaagtaccttaccaataagaagtacacatttccgatgctcaaccatttgatcaagttaatgagttgggaagtggagccggagaccattttcaacgaaaaggcgtttcagattgatgtcaattaccatgaggacgaggaggtaatgcagctggagcccaatgagcgtctgtttcgtcgcctcaagtccatctacgatcatctggaggacatgttcatcaacggcaatcgcagaacggcctccgacctggtcttcaccgcaattatccgtttggtcgaccgctctaatgtggcaaaatataaaatcatataatacagcaatgctataagaatgctgaagtttcttacagctaataaaaaaaatatgtaattatccaacagatgttcgttaagggttatgattttcacgataaacgtggccaaaagaggtggcaggttcaacttctcctcaaccgcatgtcgatgtcgatttcttcatttgcctaatacgagtcgacgccatcattaatctaaaatatggctcacatacacgaacccactcccacgcacacgcacacacacacacacaccaaggcgagcatggcgtgcatgtaattatgctggaaacagtggcgtggaaaggggttttcaagggtggaagagggggctaggttgtccggaattcgagtgagaggaagcagtcacattgccaccacagagacacacatttgcgtaagccttgttaatcgtgacaaaagcttattgcgggttatttggactacttgtttcgcatccggcgctggcacaacgaaaatcaacattgccacatgtaaatacatacatacgcacactcacacacacacacgcacacacacatatgactgcgcacagagagacaaaacacccagtatttcgtacgcaaagcggttacacgcagtcaggatttgatttcatgttcgcatgattaaggattttacgtcggcccagcagaatgtttgaaataaagggcttatgaatttgcaaagtggtttccagcataatatgctaattacaaaaattcggttttatgtcatgatctgcagcaggccttgaaatttgttgacgacatggtagtattcaataaagatgttgctgaaagtccacataattcactatactaatggcttaactgtactttaatacttatccctaattataaggaaattaacgaaatatttgttttgtatatttaaagttaatttattattgactatatatagtgtgacaagtttctttgcagtattaattatgatcttaaggttggattgtacttgaatgtgcacgttgctcatttt

SEQ ID NO: 35939 - DNA, 618 bp, DROSOPHILA
atggccgagcagcattataatgcaaatgatttggcttccgatccaaattcgcgtaaattgaagtttgccggcatttgcaaactaaataataacgagctgtcgagtctctacaatatcgacaagttgaccgacgaggagctggcgtccgtgaatctggataggagctccctgatcgatgactatcgtctactgcacgaggtgtcgcagatgaagcaaatagagaatgaagcaaataatatccctgctgctgctccagcaggacaaccaaaatccaaggagttgcatgagcaattcgtaaaagagatggagaagtaccttaccaataagaagtacacatttccgatgctcaaccatttgatcaagttaatgagttgggaagtggagccggagaccattttcaacgaaaaggcgtttcagattgatgtcaattaccatgaggacgaggaggtaatgcagctggagcccaatgagcgtctgtttcgtcgcctcaagtccatctacgatcatctggaggacatgttcatcaacggcaatcgcagaacggcctccgacctggtcttcaccgcaattatccgtttggtcgaccgctctaatgtggcaaaatataaaatcatataa

SEQ ID NO: 35940 - protein, 205 aa, DROSOPHILA
MAEQHYNANDLASDPNSRKLKFAGICKLNNNELSSLYNIDKLTDEELASVNLDRSSLIDDYRLLHEVSQMKQIENEANNIPAAAPAGQPKSKELHEQFVKEMEKYLTNKKYTFPMLNHLIKLMSWEVEPETIFNEKAFQIDVNYHEDEEVMQLEPNERLFRRLKSIYDHLEDMFINGNRRTASDLVFTAIIRLVDRSNVAKYKII

SEQ ID NO: 35941 - DNA, 8496 bp, DROSOPHILA
aatttggatttgtaatggaatggacaaataatgagaccgtgcaacagctgttgcgtttgtaaaactttagatacaacatctattatctgatcctaactttataactacaaagtccaaagagtcaacagctttatcggacatgttagaataatgtttgccagcaccataaaagtgtcgtatcattgttacacgttggttactactgcaaagtgtcgcgcaaaacgaggaaaatataagttaacctgcttatcactagtctcactaaagactaaacaaataacccacaaacaaaagagatcgagaatagtgctatgaaagagcgatataaagagagtggcaaagagtctagtgtaatggagagcccaccaagagcattggagagcacccacaaagagcgctgatcttaacctggcacaacacctacccagagagtgacatgtatttaaggtggagcccgagagcggatcgggtcagaacgagtcggaccttcggagcgagcagatagtcgtgggtagagtagcgcgcagtgccatgtgtacttcgatacgttcgcgataagtaagatgtgctatgaactaaatcacatacgaaatacaaggcaatctatgacgaaatacgcctgcaacagatagaaataccgaatatctccgcgtgaagtgatcttttttggaaccgtgatctcgcagcagcacttcttccaatccgaatgccacgcaatattgaagtctgcattgtgccagtggaaaagtttacttcccgcaaacgtgaatagaaatcgaattcgtagatcggaatctgaaatcgctcgcatttccatctggtttctcctcggctaatgccaaactaattatattaaaatagagcgcgtgtcccctttcgtatcgaaaagtgctaatcaaccgccgtcgtccaaaggcaatcccggtgaccgagcaagtcccctgtacttgtaatgctacactctatatagtgcaatttagctccaatcagtgcaatcagcatgcagtcgatgaaagccgatgaactgccggagaatccacgggagcgatccagtcccctctcgtcacttatgttctggtgagcgtagaaattatatctttctgggcatttcgagactaaatttttatttctttttaattaaatggtttgtccaaccatctcattgcaaaaagaatagaatatatatatgtatatgtatgtgggttataaacttaatagctctaatagaaaccagtttacaagtctattaatacacatattcaaagatcatggcattgttagtaaactaaaatcgaacattttttttcggcgcgatgataagaaaaaagcacccattgatgactagtttaggtgttatttattcatgtgctttgttgtgtgtgtgtgtgtgggggggggggatttggggagcatataacgtgacaacactgacaagttgattatttcattcaatggttcgcttaattcgcgtgaccgaggcgacaaaatcattttgcatttcacgggagctcggattcccattcaattggttaccaattgagggcgacacttagctaagatccattttcaaaattattccagaggaaatctaacagcgctaggtacagaactagatatccaaaggggaaaaactgctgacaaatgttatgaatcattgcgatagaacacataaacttaaaacgcaacaaactaattttgatgtacagcttctgataagattcctttttgacataacagaatttgtttatcttcggctaacgtatagagcttttattttttgtttatgtaatgtaattatttaataacatataagataaggaactctgaactgttcttttgtgtccgcgtatcgtaagatatagattcatttgcgtcagcaaatatggatgctgtgaaaatgtacatacatgtactcttttattaataaaacattcggttttactgagataagtacggtagttattaaaattgaactttgtatgggttttgcgcagttgcatagaagtttaattattatttctgtagtctgtgaaatttgagctttgaggaaaaaacatcattcgcttctaacaattttgaccgtgacatactcgctttacaacgctgcattggatagcaactgttgtcagttgttgtcaattgtctgttcgttcgttttttactttatcagtatcattgcctgataacagacagtctttcgctaattatgtttttattgtacacccaataaaaactacctacgtaatgctgttgccgatccaacgtgaagttttgccctacccgttctgtttaaaggccgcaagaagacgctggaacaaaaggatctatatagagccctcaaagagcacaaatcgggtgagttctttgattaatttccattcgcagctatattaatgggtatcatctttaatatatagattccctgggagatcggttgtgcgcagcctgggatgagcaggtggcgaaaaatgaaactccacgtttgggtcgcgccctgacgaaagtgtttggctttcatttgttcattacgggagtattcctgcttgcccaggagtttttgaccaagtaagtgggttctgaaccatagaatctgaaataatacttaccaatccacttatccaactacagagtcacccagcccatttgcctgattggagtgatggcatactttgccgggaatgatccggatcgctccaaggcccagttatgggcagcgggtcttatagctggttccgtgtttagtgtgtgtatcggtcatccctatatgctgggtctacttcatctgggcatgaagatgcgcattggtaagtgctgattatctcagctaatccagatgttaatcctctccaaattgcagcacttagcagtctaatctatcgcaaggccctgcggctgagtagaaccgctttgggtgacaccacagtgggtcaggtggtcaatctgctgtccaacgatgtgggtcgatttgacttggtactgatcaacgttcactacctgtggatagctccgttggaactgattgcagttacctacctgatgtatctcgaggtacgtaggtggtcagaaaatcaaatagaaattttctagtcgaaagctcaaatgcttaaacctgttccgaatcggctcttttaagttttttttgagcacggcaagctttcaatgtcaccgaaaatttggtggaaagttttttatattttgttatactttatcataataatatttatgaatggacacttattttcaatgttaattaaatatttttctaatatatcttcgatcaatcttttcctgttatggcaccaattgatagtacgtttcctaaatatatatatgtaactatcgaaaaatgtttttgtcatgaatacaaatattgtggtattcctattaattgcttatcgtgtgcggccaattaaggaagtcaagtacatccattattaatatcgaaatgaagttataccccgctgaaactgaatacagcacatttagcaatatatttttctgatattttagattggcatatcatccatgtttggcgttgctataatgcttctgttcctgccattccaatcctacctcggcaagcggaccagcgttctacgcctgcgtaccgctttgcgaacggacgaacgtgtccgcatgatgaacgagattatctcaggcatccaggtcatcaagatgtacgcctgggagaagccattcggcaaggtggtggagatgacccgcttcaatgagatgctgtgcatcaagcaagtgaactacatccgcggcatcctcatctcgtttgcgatgttcctgtcccgcatatttacctcctccagtctgattgccttcgtcctgttgggaaacattctcaatgccgagaaggctttcttcgtcactgcctactacaatatcctacgccgatcggtgacaatgtttttcccgcagggcatctccgagtttgccgagctattggtttccgttaggcgattggaggcgttcatgcatcgtccggagacaaaagtcagggataagtcaaaggtcaaaaatgccaaccagaaagcagaatccccaaatggagacagtcctaaaggcaatggaatcccagagaatttgatcgagttcagccaatttcaggctcgctgggagagccattcgctggagcccactctggaggacatcaacctgcagctgggtcgtcgaaagttggtagccgtcatcggacccgtgggcgctggcaagtcgagtttaatacaagcaatacttggcgaactaccgggggaaagtggtacactcaggatcaatggcagttactcctatgcagcccaggagccctggctttttacgggaactgttcgccaaaacatcttgttcggcttggattgggacaagcatcgttatcgcaccgtagtgaagaagtgcgccttggaaagagactttgaactattgcccttcggggacaagaccatagtcggtgagcgaggagcatccctctccggcggccagaaggccaggataagtttggcacgagcagtttaccgacgagcagatatttatctacttgacgatccactcagcgctgtggatacccacgttgggcgccacttgttcgatcagtgtatgcgcggttacttgaggagtgagctcgtcatactggtcactcaccagttgcagttcctggagcaggctgatctgatagttatcatggataagggtcggataagcgcaatggggacgtactcgtctatgaagcgcagtggattggactttgcccaactgctgacggcacccaataaagatgctgaagatttggacgagatcgatggtgcaggtggtgatggtctagaccttctaaatgtaccctcgctgagcagaaggggcagcaagaacagtaagccgagtacgcgaaacaatagcttcacttcgttgagctccatggcggagtcaatggcccaggaggcatccttgcagatgcaggagacgcgagtggagggaaagatcggtctggggctgtacaaggagtatttgacctcgggaagcagctggttcatgatcttcttcatggtcttcctatgcctggctactcagattctatgctcggcagcggactacttcttatcgtactggtaggcaacaattccgcaatttcccctttataggatagaaatatttttttaccttttctttcaacagggtggacaagaacgtggacggtcaaacagatattaacacggatccgcaggatatgtattactttgccgcgctcaatgtagctgttgtggtgtttaccattgtacggaccatgctcttctacaaaatggccatgcgcagttccacgcagctgcacaatgctatgtaccagggcattacgagggctgccatgtatttcttcaacacgaatccatcgggacgcatcctcaatcgattctcaaaggatctcggccagctggacgaagtactgccaagcgttatgctggatgtggtgcaactctttctcacgctacttggcatcattgttgtgatttgcataacaaatccgtactacctcattttaaccttggcattggccataatattctactatatcagggaattttatctgaagacatcgagggatgtgaaaagattggaggctgtagctagatcacctatatactcccatctaagtgccacaattaccggattgccaacgatacgtgccttaggagctcagaaggaacttattgctgagttcgacaatttgcaagacctgcacagctccggatattataccttcttggcgacgaatcgcgcctttggttattatctggactgcttttgcacgttgtatattgtgatcatcatcctgaactactttataaacccgccgcaaagtcctggagaagtgggtctggccattacccaggcaatgggtatgaccggaatggtgcagtgggcaatgcgacagtcggccgaactggagaacacaatgaccgcagtggaacgagttgtggagtacgacgagatcgaaccagaaggcgaattcgattcacgcgagggcaaaaaaccctcgcctagttggcctgaaaagggtgagattatcgcggaggatctgtgccttcgttacttcccggatccgcaggccaagtacgtcctaaaggcgctcaatttccgtatccgtccatgcgaaaaggtgggcatagtgggccgcactggagctggcaaatcctcgctgattaacgcactcttccgactttcctacaacgagggcatcattaccatcgatgaaagggatacggctgacatgggactctttgatctacgcagcaagatatccataataccgcaggaacctgtgctcttctctggctccatgcggtacaatctggatccctttgaggagtataacgatgcaaagctgtgggatgcactggaggaggtgaaactgaaacctttgatttccgaacttccaaacggactgcagagcaagatatccgagggtggcagtaatttcagtgtgggccaacggcagctagtgtgcctggccagggctattctccgagagaatcgcgttctggttatggatgaggcaacggccaatgtggatccgcaaacagatgcgctgatccaagcaacaataaggagcaaattccgggactgtacagtgcttacgatagcccatcgtttaaacacgataatggattcggatcgtgttctggtcatggatgctggtcatcttgtagagtttggatctccgtacgaacttctcacctccagcgaatcgaagatcttccatggaatggtaatggaaactggacaaaacacattcgacagccttcttaaagttgccgaaaaggtaagttgctactatactttcgtttattttgttgttaatatatgtatatcataacactttcaggctcatttggaatcaatgaaaccgaaatcggagtagattaagcatctggttattggttactaaactgggagccaacaaggtctcatttcctggctgtaagcgtcttcaaagttgtacctaatccagtcagctgcatttaagctagttttctacttaaagtattatgccttcgaaccgtacatacttgtataactcaatccttatagatatactataatgtaatgaatcaacccaacgaacggttaaatatacagtctcaaaaatgtagaagtgaaagttttataaagttctaaatatatagaccataaatttgttttacattataatttcttagcactttgattagacaattagacagcagttgtggtaatcggggggtagctggattcaaattcatccgcttcttgtctccagtctgaacatctgttcatgttaagtctacgaaagaagatggtcactatggattcgcaagccaagatcaggatgacagtcaattgggccagaagtgcatgaactacggatggatgtgccattggccaataggcgttatgcggaacaaacacaacgaagaacaaaacgacggcgttgcaaatgagcatcaaactggagaatatcgtgcggatctgctgacgtccaaagctgctcagtgccaccacgctggccataatcactattgagggaattagcaaatggatgagcactagcagcggcactagtccgctgctggaatccggaaggaataatcgggcagagttggctaagtaggtgaagccacctacccagtggccagttccaaatagggatgcatagaagtaaagtaggatggatacagcgaagcgatagcacatctgtagatgctttgaggaagttagtatcttaacatcttcatctgcttccttgaacttctcgtgcacttcgagtcccatttgatactcgataatcaagccctgggcgaagagggatacatatgaatcactcaatagtacatgaagcgtaagcaagttgaagcgaatcaactctaggcgagattggggagtggtcctcgaactgcagggcaccgatgcgaacgcatagataagatacgcccagttggcagcaaataggtataagggaaccggcttgcccatctccttgaggaagattccgatggcggcaacaaacagtattcctccgttgattacccacaccttccacttgtgattctcgttgaggacgcagggacgcacaattaccaccagcatgctgatcgcctgcagaacgacacgatagttggtggtcattaggatctgcattcccttctgggaccaaaggaatccgcccagtagaaggacgagagccaaccaggccaggaactttggcgaaggatgcaaccagccacgtcgattgtagaagccaacacagaggatataggccaagctcaaaggacagttgcagtaaatcgacgcaatcattaccgcagctggtcctacaatccatcttaggtgtttcaatggctcgaagatccagccaccattctggggtaatgcggccaaggtcatacaccagacgccaaagggtaccaccaaacagatgaccgtcatgaacggagcccattgcaaaaagaccatttcgccgagcaa

SEQ ID NO: 35942 - DNA, 4507 bp, DROSOPHILA
atgcagtcgatgaaagccgatgaactgccggagaatccacgggagcgatccagtcccctctcgtcacttatgttctgttttgccctacccgttctgtttaaaggccgcaagaagacgctggaacaaaaggatctatatagagccctcaaagagcacaaatcggcctgggatgagcaggtggcgaaaaatgaaactccacgtttgggtcgcgccctgacgaaagtgtttggctttcatttgttcattacgggagtattcctgcttgcccaggagtttttgaccaaagtcacccagcccatttgcctgattggagtgatggcatactttgccgggaatgatccggatcgctccaaggcccagttatgggcagcgggtcttatagctggttccgtgtttagtgtgtgtatcggtcatccctatatgctgggtctacttcatctgggcatgaagatgcgcattgcacttagcagtctaatctatcgcaaggccctgcggctgagtagaaccgctttgggtgacaccacagtgggtcaggtggtcaatctgctgtccaacgatgtgggtcgatttgacttggtactgatcaacgttcactacctgtggatagctccgttggaactgattgcagttacctacctgatgtatctcgagattggcatatcatccatgtttggcgttgctataatgcttctgttcctgccattccaatcctacctcggcaagcggaccagcgttctacgcctgcgtaccgctttgcgaacggacgaacgtgtccgcatgatgaacgagattatctcaggcatccaggtcatcaagatgtacgcctgggagaagccattcggcaaggtggtggagatgacccgcttcaatgagatgctgtgcatcaagcaagtgaactacatccgcggcatcctcatctcgtttgcgatgttcctgtcccgcatatttacctcctccagtctgattgccttcgtcctgttgggaaacattctcaatgccgagaaggctttcttcgtcactgcctactacaatatcctacgccgatcggtgacaatgtttttcccgcagggcatctccgagtttgccgagctattggtttccgttaggcgattggaggcgttcatgcatcgtccggagacaaaagtcagggataagtcaaaggtcaaaaatgccaaccagaaagcagaatccccaaatggagacagtcctaaaggcaatggaatcccagagaatttgatcgagttcagccaatttcaggctcgctgggagagccattcgctggagcccactctggaggacatcaacctgcagctgggtcgtcgaaagttggtagccgtcatcggacccgtgggcgctggcaagtcgagtttaatacaagcaatacttggcgaactaccgggggaaagtggtacactcaggatcaatggcagttactcctatgcagcccaggagccctggctttttacgggaactgttcgccaaaacatcttgttcggcttggattgggacaagcatcgttatcgcaccgtagtgaagaagtgcgccttggaaagagactttgaactattgcccttcggggacaagaccatagtcggtgagcgaggagcatccctctccggcggccagaaggccaggataagtttggcacgagcagtttaccgacgagcagatatttatctacttgacgatccactcagcgctgtggatacccacgttgggcgccacttgttcgatcagtgtatgcgcggttacttgaggagtgagctcgtcatactggtcactcaccagttgcagttcctggagcaggctgatctgatagttatcatggataagggtcggataagcgcaatggggacgtactcgtctatgaagcgcagtggattggactttgcccaactgctgacggcacccaataaagatgctgaagatttggacgagatcgatggtgcaggtggtgatggtctagaccttctaaatgtaccctcgctgagcagaaggggcagcaagaacagtaagccgagtacgcgaaacaatagcttcacttcgttgagctccatggcggagtcaatggcccaggaggcatccttgcagatgcaggagacgcgagtggagggaaagatcggtctggggctgtacaaggagtatttgacctcgggaagcagctggttcatgatcttcttcatggtcttcctatgcctggctactcagattctatgctcggcagcggactacttcttatcgtactgggtggacaagaacgtggacggtcaaacagatattaacacggatccgcaggatatgtattactttgccgcgctcaatgtagctgttgtggtgtttaccattgtacggaccatgctcttctacaaaatggccatgcgcagttccacgcagctgcacaatgctatgtaccagggcattacgagggctgccatgtatttcttcaacacgaatccatcgggacgcatcctcaatcgattctcaaaggatctcggccagctggacgaagtactgccaagcgttatgctggatgtggtgcaactctttctcacgctacttggcatcattgttgtgatttgcataacaaatccgtactacctcattttaaccttggcattggccataatattctactatatcagggaattttatctgaagacatcgagggatgtgaaaagattggaggctgtagctagatcacctatatactcccatctaagtgccacaattaccggattgccaacgatacgtgccttaggagctcagaaggaacttattgctgagttcgacaatttgcaagacctgcacagctccggatattataccttcttggcgacgaatcgcgcctttggttattatctggactgcttttgcacgttgtatattgtgatcatcatcctgaactactttataaacccgccgcaaagtcctggagaagtgggtctggccattacccaggcaatgggtatgaccggaatggtgcagtgggcaatgcgacagtcggccgaactggagaacacaatgaccgcagtggaacgagttgtggagtacgacgagatcgaaccagaaggcgaattcgattcacgcgagggcaaaaaaccctcgcctagttggcctgaaaagggtgagattatcgcggaggatctgtgccttcgttacttcccggatccgcaggccaagtacgtcctaaaggcgctcaatttccgtatccgtccatgcgaaaaggtgggcatagtgggccgcactggagctggcaaatcctcgctgattaacgcactcttccgactttcctacaacgagggcatcattaccatcgatgaaagggatacggctgacatgggactctttgatctacgcagcaagatatccataataccgcaggaacctgtgctcttctctggctccatgcggtacaatctggatccctttgaggagtataacgatgcaaagctgtgggatgcactggaggaggtgaaactgaaacctttgatttccgaacttccaaacggactgcagagcaagatatccgagggtggcagtaatttcagtgtgggccaacggcagctagtgtgcctggccagggctattctccgagagaatcgcgttctggttatggatgaggcaacggccaatgtggatccgcaaacagatgcgctgatccaagcaacaataaggagcaaattccgggactgtacagtgcttacgatagcccatcgtttaaacacgataatggattcggatcgtgttctggtcatggatgctggtcatcttgtagagtttggatctccgtacgaacttctcacctccagcgaatcgaagatcttccatggaatggtaatggaaactggacaaaacacattcgacagccttcttaaagttgccgaaaaggctcatttggaatcaatgaaaccgaaatcggagtagattaagcatctggttattggttactaaactgggagccaacaaggtctcatttcctggctgtaagcgtcttcaaagttgtacctaatccagtcagctgcatttaagctagttttctacttaaagtattatgccttcgaaccgtacatacttgtataactcaatccttatagatatactataatgtaatgaatcaacccaacgaacggttaaatatacagtctcaaaaatgtagaagtgaaagttttataaagttctaaatatatagaccataaatttgttttacattataatttcttagcactttgattagacaattagacagcagttgtggtaatcggggggtagctggattcaaattcatccgcttcttgtctccagtctgaacatctgttcatgttaagtctacgaaagaagatggtcactatggattcgcaagccaagatcaggatgacagtcaattgggccagaagtgcatgaactacggatggatgtgccattggccaataggcgttatgcggaacaaacacaacgaagaacaaaacgacggcgttgcaaatgagcatcaaactggagaatatcgtgc

SEQ ID NO: 35943 - protein, 1307 aa, DROSOPHILA
MQSMKADELPENPRERSSPLSSLMFCFALPVLFKGRKKTLEQKDLYRALKEHKSAWDEQVAKNETPRLGRALTKVFGFHLFITGVFLLAQEFLTKVTQPICLIGVMAYFAGNDPDRSKAQLWAAGLIAGSVFSVCIGHPYMLGLLHLGMKMRIALSSLIYRKALRLSRTALGDTTVGQVVNLLSNDVGRFDLVLINVHYLWIAPLELIAVTYLMYLEIGISSMFGVAIMLLFLPFQSYLGKRTSVLRLRTALRTDERVRMMNEIISGIQVIKMYAWEKPFGKVVEMTRFNEMLCIKQVNYIRGILISFAMFLSRIFTSSSLIAFVLLGNILNAEKAFFVTAYYNILRRSVTMFFPQGISEFAELLVSVRRLEAFMHRPETKVRDKSKVKNANQKAESPNGDSPKGNGIPENLIEFSQFQARWESHSLEPTLEDINLQLGRRKLVAVIGPVGAGKSSLIQAILGELPGESGTLRINGSYSYAAQEPWLFTGTVRQNILFGLDWDKHRYRTVVKKCALERDFELLPFGDKTIVGERGASLSGGQKARISLARAVYRRADIYLLDDPLSAVDTHVGRHLFDQCMRGYLRSELVILVTHQLQFLEQADLIVIMDKGRISAMGTYSSMKRSGLDFAQLLTAPNKDAEDLDEIDGAGGDGLDLLNVPSLSRRGSKNSKPSTRNNSFTSLSSMAESMAQEASLQMQETRVEGKIGLGLYKEYLTSGSSWFMIFFMVFLCLATQILCSAADYFLSYWVDKNVDGQTDINTDPQDMYYFAALNVAVVVFTIVRTMLFYKMAMRSSTQLHNAMYQGITRAAMYFFNTNPSGRILNRFSKDLGQLDEVLPSVMLDVVQLFLTLLGIIVVICITNPYYLILTLALAIIFYYIREFYLKTSRDVKRLEAVARSPIYSHLSATITGLPTIRALGAQKELIAEFDNLQDLHSSGYYTFLATNRAFGYYLDCFCTLYIVIIILNYFINPPQSPGEVGLAITQAMGMTGMVQWAMRQSAELENTMTAVERVVEYDEIEPEGEFDSREGKKPSPSWPEKGEIIAEDLCLRYFPDPQAKYVLKALNFRIRPCEKVGIVGRTGAGKSSLINALFRLSYNEGIITIDERDTADMGLFDLRSKISIIPQEPVLFSGSMRYNLDPFEEYNDAKLWDALEEVKLKPLISELPNGLQSKISEGGSNFSVGQRQLVCLARAILRENRVLVMDEATANVDPQTDALIQATIRSKFRDCTVLTIAHRLNTIMDSDRVLVMDAGHLVEFGSPYELLTSSESKIFHGMVMETGQNTFDSLLKVAEKAHLESMKPKSE

SEQ ID NO: 35944 - DNA, 3429 bp, DROSOPHILA
tggtcattttcccggttgcagctgtgagaagtgaggtcctatattgacagcgggggttgcctacggagcacacatatcaaatatcggttgttaagggcgttttctaacgagtccataacagacgggaaatggagttccgaaatcgaataggaatcgtcatcacaatccttgccgatccaaaacgaacagttcacctaactgttaatccaataaaagatcaatacacgcattgggcgaatagagctgcgaaagcgcaaaaggagaaggaattcggaacggaagtaggaagagaatccgcggtggaagcacataataaaaccaacggaacgttaaaaaaaaaaggaagaagcaaagaacggcactcggtgttgtttttgcaaatctgcaaatcccaaccaataccatcgtgtacacccacacgcacacatgcacacgcgtagattatttttcaaatatgccggcaactgctcttggttttgatttgatgtacttacttgctgctggcctgattatcggtgcaatcaaagttagagatcattttgccgctgtagccgcttattggacgatcggtaacgattaaatggaaaactggcacacacgtaacaaagtgaaacacacaaaatgcaagtggaaatgcacagaaaattgcagatgccgcggcacgttcgttcagttcgaaaggcgaattaagtgtggctgccgccgagccgctaaatcacgccgtcggctcgaaaatgaaaggcactaaataataccacagatgcagtggcggcgctataaatagtttgaaggggcttcagtattttttttttagctttttcgtagctgatagctagtttaggcttaatggtaactttaaactgaaatgtatttaaaacacttgtaggtatttttttcatggcaaatgcggtcacacagcgcaggtctaaaattgtttaaaactcatttaattgaaattagccttaatttccagcccccttgcaaaaaaacgctagccaggatggccagcttgccagtgattctgcaatgcaggatctgcttgggcgatttcgaagagagccaaatgatctgcctgtttggggataaaggcgaaagtgacctcaggaaaaagttggagctgtgctgtaggattagggtaaatggagctgaccagatgggttatatgtatcatttcattactccaactcccccaggttcgccaatccccgcagctgcccgagaaggcctgcaacagctgttgcgaattcgtccaaatgtggttcaactttcgccagatgtgcctgaactcgcaggtctactgggaaacaagttcctcggagagaccagaggctcttgcccaggcaagcgatgccgagtatatgttgtatctgtacgagaacctacatctgaaactaggcacagagaatcaggagaaggaagagatcaccgcaatagaggagggggatgaacagcaggaggatcagtcccaggaagttctcgattttaacggatttatcataaacgaatcgattgaggaggacgaagagcctaatacggaaagtcctgagcagattctgatttcccacatggactcctacgttgatgatcaacaaatggaagaactcattgatgataagggtgagcttgtcgaggaattatccaatgcaaacacgttttatgaggttgagtacggggacgaggaacttctcatgtcaagcgctccttcgccacatcccagcttcaaaatggacaaacaaaagccgggaaggcctcgcaaaccggacgccgaactgaaattcaaacgcaaggatatcaacgccaaggaaagggggaaccagccaaagtgcaaggaagaggagaagttcatgtgcatcctgtgcggaaacgtcttttacaagaaatctgttttcacggcccacatgatgacccattcagagtacaagccccaccaatgcgagtaagtgatattaaggtttaggaaggaacaaatttatcctacaaaaatgttattgctttcagaatatgcaataaatcttttcgacaaatgggcgaattgcgagcacacatccgtcgtcatacgggcgaccgtccatacaagtgtatgtactgcgaccgccacttctacgatcgcagcgaacgggtccgccatgaacgggtccacaccaacacgcgtccttatgcctgccaggagtgcgggaaaacttttacgcacacagccatcctcaaaaatcacatcctttcgcactccgcccaaaagaattacaagtaagggagagtaatcctttctagtgatttgcactttttattaataatttgaacttttcagctgtggtatctgttgcaagtcattcactctgctgcaccagctgaaagctcacctgcaaacgctaacccaccgcaacaaaatggagcaaaccattcccagctctccggaaatgttagagagctaatatagtaaattaattgaggaactagggttatctattataagtagtataaagccacttttccagaatagaccagctatttttattaactattctaccacgtcgctgtactccttagctatcagacggtgcgcaagagacttctcgtgcgctgtaagttggtgcttaagccgaaattcttttttacacataagacacttgtgagacttttcagacgaatgcaggtagtagtgagcgttacgagaggaggacagagagaatgtttttccacatatgttgcaagcatagggtctttcattcgtgtgcaaactgaaatgaagaaattcaacattggaacttaaatgctgtacacaatatatatagtttttgtccattctaccgttcgtgcttgcgatgagtgctgttgtcggcaaaacggcgcgaacagtagcaacattggtaaggtttctcgcccgtgtgcgtccgcatgtgtgttttcaggttgcaggcggctctgaatgtcttttggcaaaccctgaatcatacattttatatatgaaatattatgttaagatatatcacggatacttactcgcactggtggtccttttccttgcggtgcacctgcgagtgtgcatttagctgagataagcagcggtatgtattgctgcagatcttgcatctgtacttgtccggctcgcaggccactcctagatctatcacgtagtcggcacttggctctagattatggtaatcctcgcttgtctcttgaatactgtccgtagcagcgctgctttcttgcgaatacgtttcggagtaattttgatcggagatctccctgtccaaatccatatcactgatggtatagtcctcctggtgtatgtctttctcgttttccgcattcacgttgagatcgaacacgaaatcgcttgaaaatttatttatgggtaagatttcatcatctttggtcgtttccaatgcattctcttgagtcttaaagttaataggattctcttcgatgagt

SEQ ID NO: 35945 - DNA, 1248 bp, DROSOPHILA
atggccagcttgccagtgattctgcaatgcaggatctgcttgggcgatttcgaagagagccaaatgatctgcctgtttggggataaaggcgaaagtgacctcaggaaaaagttggagctgtgctgtaggattagggttcgccaatccccgcagctgcccgagaaggcctgcaacagctgttgcgaattcgtccaaatgtggttcaactttcgccagatgtgcctgaactcgcaggtctactgggaaacaagttcctcggagagaccagaggctcttgcccaggcaagcgatgccgagtatatgttgtatctgtacgagaacctacatctgaaactaggcacagagaatcaggagaaggaagagatcaccgcaatagaggagggggatgaacagcaggaggatcagtcccaggaagttctcgattttaacggatttatcataaacgaatcgattgaggaggacgaagagcctaatacggaaagtcctgagcagattctgatttcccacatggactcctacgttgatgatcaacaaatggaagaactcattgatgataagggtgagcttgtcgaggaattatccaatgcaaacacgttttatgaggttgagtacggggacgaggaacttctcatgtcaagcgctccttcgccacatcccagcttcaaaatggacaaacaaaagccgggaaggcctcgcaaaccggacgccgaactgaaattcaaacgcaaggatatcaacgccaaggaaagggggaaccagccaaagtgcaaggaagaggagaagttcatgtgcatcctgtgcggaaacgtcttttacaagaaatctgttttcacggcccacatgatgacccattcagagtacaagccccaccaatgcgaaatatgcaataaatcttttcgacaaatgggcgaattgcgagcacacatccgtcgtcatacgggcgaccgtccatacaagtgtatgtactgcgaccgccacttctacgatcgcagcgaacgggtccgccatgaacgggtccacaccaacacgcgtccttatgcctgccaggagtgcgggaaaacttttacgcacacagccatcctcaaaaatcacatcctttcgcactccgcccaaaagaattacaactgtggtatctgttgcaagtcattcactctgctgcaccagctgaaagctcacctgcaaacgctaacccaccgcaacaaaatggagcaaaccattcccagctctccggaaatgttagagagctaa

SEQ ID NO: 35946 - protein, 415 aa, DROSOPHILA
MASLPVILQCRICLGDFEESQMICLFGDKGESDLRKKLELCCRIRVRQSPQLPEKACNSCCEFVQMWFNFRQMCLNSQVYWETSSSERPEALAQASDAEYMLYLYENLHLKLGTENQEKEEITAIEEGDEQQEDQSQEVLDFNGFIINESIEEDEEPNTESPEQILISHMDSYVDDQQMEELIDDKGELVEELSNANTFYEVEYGDEELLMSSAPSPHPSFKMDKQKPGRPRKPDAELKFKRKDINAKERGNQPKCKEEEKFMCILCGNVFYKKSVFTAHMMTHSEYKPHQCEICNKSFRQMGELRAHIRRHTGDRPYKCMYCDRHFYDRSERVRHERVHTNTRPYACQECGKTFTHTAILKNHILSHSAQKNYNCGICCKSFTLLHQLKAHLQTLTHRNKMEQTIPSSPEMLES

SEQ ID NO: 35947 - DNA, 3425 bp, DROSOPHILA
tcttgcgaatacgtttcggagtaattttgatcggagatctccctgtccaaatccatatcactgatggtatagtcctcctggtgtatgtctttctcgttttccgcattcacgttgagatcgaacacgaaatcgcttgaaaatttatttatgggtaagatttcatcatctttggtcgtttccaatgcattctcttgagtcttaaagttaataggattctcttcgatgagtctccccgaaatgttctgcttcctggcgcgttttttctgttcaagctggtccttatcctccagcgtctcaaatgccgatgcggaggacagagtttgacgaacgaggcttctcaggtgcgcgtcggattgtttgcacgcgctaagaaatctgtccacctcctccagttgcatcaagcagactgtgcaaatttgatccggcagtccatcatccggtttcacctaggagagaggatttgtaactggtaaactggaagccaaacagaaatcgagtactcacagatgtgccggcatacgagatcaacagcttgtgggcattggactcgaagagcgactgcagcgtggattgcgttccttttttgcggcaagtgcggcacatgctccatttaatgctgatttccatcgttatttccgcaggaagtccctctttcgcgtcaaatgccgattcaaatgccagagcagtgaattaaaagtaaaagggttgtcaggtacgcggaattagtaacagttttcaactatcattccaaatttttttgcatttagttctaaaactgtatttttattgcgtgactcaagcttaaatatttaatagggcccacctgttagtttaaaaaaaaaaattaagatttaattattatcaattattcaatcgatatgccgatagcaagttcgatagccatttatcgttttgcgtacatgacaaccctgggaaaagttccaagacgcttgtttatttcagaattgcaagcatacgtacgtccaggacgtgcaagataatgcccgagtacatgttgtgccgaatctgcttgacagaggacatcaactcggaggcgatggcgcccctgttcgatgacaacgacgcccagtgccgggagctggtgcgcaagattgaagaagtgggcagcataaaggtacatgtggatgcaaatgtaaaatcctgcgacttaacccactctgtgctttcagctggtgccgctgcagaacatccccagtatgttgtgctacagctgcgtggagcgactgaccagtgcccacaagttccgggagctttgccaggagagcgagcgcacatttgccaccaatgtagtcaaggtacgtatagagttgatgggccacatataaacatcccacttgacccggtaccatgtcaggccgagatgaagtcggagccaacggacgaggtgccgcacgtagtggctgacaacattgagtacatctacgaatcggccaacgacttcatcgacggtgtcgaggatgacatcggaatggagaacatcatggaggagcccctggaggatggtgtcggggaaacgtcgcaggcctacgagactagcactgtagtggacgacctggacgaggatgacttgctggtgccgaatagcaccgatagcgactaccagcccatcgagcgctgccgcaaagctaaggtgcgtaaaacgcggatgactaaacgtggacgtggccgacctcgcggtgctagctccggacacccacgcagttttagcgaggagcgtccgcctgttcaagctagcttcaaatcatctcccgaagtatcctccacgaacattatgtgcgaaatctgcggcaatatctactccaagcgagccgctctcaacattcatatgcgtcgtcatatggccgagaaaccatttaaatgcgagtgagtatctgaaattatcatctgaaccattttatattatgtaaatcttattccgcttacagaatatgcagcaaatccttcgcgggtccatccgagctaaatcgccatatccgcgttcacacgggcgagaaaccattcttgtgtaaatattgcaaccgctcgtttgcggatcgcagctccaatattcgtcatgaaaggtgaagatgcaattcctcatagtaatcttcatataaactatacttgttccttttgcagaacacacacaaacgagcgacctttcacttgctccacatgcggcaaggcattctcctactctaacgtgctaaaaaaccatatgctcacccacacgggcgagaagccttttctgtaggtccattgactgctttaatcatgtataaccctaaattccctttaatttttcagctgtcgagtctgcaataagaccttttcccgcaagcaccagttggatcagcatttgggcaccatgacccaccaacagactgtaatacaccacaaaaacgaacggacggggcgctattagtcgaaaacaatgcaatacaatttctgttagataattcattaatgtacatttaattatatataaaaattgtaaaataaaaaagagtacaaatggtcagaccggatgtgtaaaataatcggatttgatttattactatttggttaaagaacttgttcaaaaacacaaatattttttgtaatgttttttattacgtccatatattcgagaaaaaaattggaacacgattacaatctttgattttgtgcgtttatttggtagttttaacatcattttggccattaaatgagtgtgcgttttttattgtttcttttctttgtgctctgtcgaagactttgttaccgtttgtggaagctacaacatggaataataatcgaatggcacaggattaattaaatcttctttttttggacaagtaaatatgttttgtttttttaggtttataacttgtaacgttttacatcaaaatctaaaaacgtttggaagtcgggagggatgcggctcttcttctattccttagggaaacaaaaagtaaaaccaaatatgctagatattcgcataaaatggatttatgcgaatacctgtacttaaatgtacgtctaccttgttaaagaaaaggacgcggaattttagaattcttaccgatagctaattagtgtaatggctagataggcagcttcattgttcaatggctagctccgtgagtttctcttctttgcgtttatgaatattgctggacaggtgggtcatcaaatgggagattcgtttgaagtgcttctgacatacgtagcagctgtaaaatcaaagtgtgttgaaacgtgtaatacaaataatgtgcagagttggcagaaatcgaaatgcccactagtgattccgcgcatccacatggatcatcttgtgcttcctgagacatccggagcttacaaaactctttttgcacgtgtcgcactcgtagcggcgttcgttccgatggcggcgatggtgctcctggcgagcgcctgaa

SEQ ID NO: 35948 - DNA, 1134 bp, DROSOPHILA
atgcccgagtacatgttgtgccgaatctgcttgacagaggacatcaactcggaggcgatggcgcccctgttcgatgacaacgacgcccagtgccgggagctggtgcgcaagattgaagaagtgggcagcataaagctggtgccgctgcagaacatccccagtatgttgtgctacagctgcgtggagcgactgaccagtgcccacaagttccgggagctttgccaggagagcgagcgcacatttgccaccaatgtagtcaaggccgagatgaagtcggagccaacggacgaggtgccgcacgtagtggctgacaacattgagtacatctacgaatcggccaacgacttcatcgacggtgtcgaggatgacatcggaatggagaacatcatggaggagcccctggaggatggtgtcggggaaacgtcgcaggcctacgagactagcactgtagtggacgacctggacgaggatgacttgctggtgccgaatagcaccgatagcgactaccagcccatcgagcgctgccgcaaagctaaggtgcgtaaaacgcggatgactaaacgtggacgtggccgacctcgcggtgctagctccggacacccacgcagttttagcgaggagcgtccgcctgttcaagctagcttcaaatcatctcccgaagtatcctccacgaacattatgtgcgaaatctgcggcaatatctactccaagcgagccgctctcaacattcatatgcgtcgtcatatggccgagaaaccatttaaatgcgaaatatgcagcaaatccttcgcgggtccatccgagctaaatcgccatatccgcgttcacacgggcgagaaaccattcttgtgtaaatattgcaaccgctcgtttgcggatcgcagctccaatattcgtcatgaaagaacacacacaaacgagcgacctttcacttgctccacatgcggcaaggcattctcctactctaacgtgctaaaaaaccatatgctcacccacacgggcgagaagccttttctctgtcgagtctgcaataagaccttttcccgcaagcaccagttggatcagcatttgggcaccatgacccaccaacagactgtaatacaccacaaaaacgaacggacggggcgctattag

SEQ ID NO: 35949 - protein, 377 aa, DROSOPHILA
MPEYMLCRICLTEDINSEAMAPLFDDNDAQCRELVRKIEEVGSIKLVPLQNIPSMLCYSCVERLTSAHKFRELCQESERTFATNVVKAEMKSEPTDEVPHVVADNIEYIYESANDFIDGVEDDIGMENIMEEPLEDGVGETSQAYETSTVVDDLDEDDLLVPNSTDSDYQPIERCRKAKVRKTRMTKRGRGRPRGASSGHPRSFSEERPPVQASFKSSPEVSSTNIMCEICGNIYSKRAALNIHMRRHMAEKPFKCEICSKSFAGPSELNRHIRVHTGEKPFLCKYCNRSFADRSSNIRHERTHTNERPFTCSTCGKAFSYSNVLKNHMLTHTGEKPFLCRVCNKTFSRKHQLDQHLGTMTHQQTVIHHKNERTGRY

SEQ ID NO: 35950 - DNA, 5381 bp, DROSOPHILA
gacatgacatcgctcggatcggcagataacaacgcggcgataaccatggcaaatgaagtcggtaaactcgcgttattattgggtggctatgtttgcagttcgacttgaatacttcaactcccagagcaacttttgatgggttcgccgtggtggaggccgtggttgaatgaaccttatgcacttcgttccatgacatcgatttggcttatatgaatggcccgcaactcaaagttggagtcacagttgttgtgtgggtggagatggcgatggcaaacactttgatgtgaactatttttggccactcggtgcgatgaacctttcgggcttccttgacattatttatcatgggaaaaggtgaactgaacttaagaaatcaagtcaaagtttagcatcatattatctatatgtcgaagaatatgttataaaatatttcgaaaataccttgcttatttatttatgttttgagtactatatattacaaatttcatttcttccaaacgagtcacacagccttgaacttgtgggtaaaaaccattctatttcggggaatgcggaacgtgtcattgatcacattaattatagttatggagagctccacttatagaaagggaaagctttccaaggaatacttaagcgtactggcatccaaaaatgtcaggccatttatggggaattagtaactatgtatagaaaacaaaatgcattcaacctgaaattcttgtggctaattagtttgccttcttttcgcttgcaggtgtattttatggaaattgaaatggaagcaaaattgctaaaataaaaatgagaaaacagacgaaaacacaaacccaataactcaagctaaaagctggaaataaaaacctgcgattttgaggctcagtcgaacgtggaattgacttgacccatagaggtgcacgagtcgaaagagatagatacaacgccgtagaacgagaggcagcgacatacgatgcgtgtggttgggtggctcagaggtggcttaatgctcgccctggccgtaatggtaacgcaggcacgtttcattgcgaaaagagaaaccaccggcttggagcaggcgatggcttccacttccactgaccctgacattgttaaggcgcccagggaaagtgggatcggcagggaaccggtcgccataaaggcagaatcggatatgttcagctcacaaaccaatattgaagatgaaaaaagcgcaaaaactgtggatcaaaccgaaacccaaactgctagtccgaaagagaatctcaatgtcaagcaaacgacggcagccttcgagaaaaatgagtccagtaacaccacggaatctcacttaaatggagctcaagtggatcccgtaaaagaactaaaggacacggaaacttctgcagatactgtcaaggaagagtcaagcaccacaaccacgtctcagttggatcaaaacccgaccaatgtgacagataagaaatccacagaagctcagtttaaagatgaacgtctttcaaaagagattttaagcacaaccactgaacaaattttgttaaccgagaaagcccttcaaaaatatgtagtcataacgaattctcctttaagaggagaggcacaacctgagattaaggataaaacctcaaaatctgcgacaagcgaaaagtccacgctcccattaaaaccagtaactattgaagttccgagcaccaccacagagggagtgttcaacaccacaaccactcgatcttccgatcatggccgttccatgcagtattcatccaccactgaagaatcgagccgatcttctcctgcttcagtaacgcccatgaagttgatacccctacccatgacttctacaccatccagcactacttccacatcgacgcctttgccaaccactgcagtttccttcgcctcaaatgagaatgtcatcgaggagtccacctcaaagtcagaggtccgtcagttgcctgagaagcgagccaagtttataagtgaaaactccacaaatgcccagcaacttacactgcccaacacggctgaggtttggagtcttgctggaatgaaggcggtaccgaaggcaccgctaactaccactaccagcgtaccactccttaaccacactgatctcgcaaatgatatagatatgcccctcaataaaacggagctgcacaaggagaagaatctcctggattggatgaacattgccatgctgccattgacgcccgagaatcgcaccgaatttgtggtcagaaccactctggatgccaccgagggagccacccaggctactaccgaagctttggtagaggaaacccattccaaaagtgatattacagtgggattggaacaggataacgtcacaacagcacgaacaatgccttcaacacctgatcctggatcaatggacctcaatatgacgaccacaactgtgcgtacgcaacaattggaagttccattagtcaaaaagatgtccgatgcagccaatgccaagttgatagaggcggttacagagcctcaaagggaaacagaagcagcaacagaggctgcaacatttgttacattacccgagaaacttgcaacattcggcataacagcgagggttgattcaacgcaaacggaactgttgaatgttaccacagcagcagcggcaacagagtcaggtgaaatgtctaaggcaaattcaacagatacgttatcagcaatgacaagcacaactactaccacagcaaggcccatgtctgtggaacatgtaacgcctgaacaagacatggaggcagcaacatcactggccacgacagctgcaacatcaagtggaactacggaggcagcagcaacatcatcgacaacggcagcaactccggttgtctcagaggcagcaacagccgcagaagcatcggcaacatctgaggctacaacagctgcaacattaagtgttgcaaccaccgccgccagcacaaccgaaatagcaatgaaagcgactcaaatcagcaacattcgcgacgacaacgacgataacagtaacgacgtcatcgttgccacaaccaaatttccagagagcgagcaggcagcaacaacggcaagcgttgagccaacaacgacatcggttagtgtgcgagtggctggcgaggtgagcacttcgattcggccagaaatcatcgttaccagtacgcggaatagtacgatcgtggacacaagtacatcggcgacaagtgtagcaacacccacgcaaacggaaattgcgcaaataagcaatgaagtgaatttggaggcagtgacagtgaagacgcgcgacggtttgagcgatacgaatgagttaagaacagctgagaaaaccgataacgcggtcaataacagtgtggccataacagagagcgacttgggggcattggcaacagcagtggaaaccaaccccacgacaaccaacagtctgctcagtgacgtgagcaagttaagcaaggagcacgagtcctcgctggagaccaataacataggcgaggcgcctcccgaatcgacgacaccagcagcaccagcaactgttgctgttgcaacggatgagagcacagcagcgccggcagcaacaggtggccaggaaatcgtgagggagggtcaacatcatgacggacaacaggtggctgatgagcaggacaccgagcagcagttagccaagacgacgatggcggtgacaacgacaacaaccagtgcgacaaccactacaaccagtactacaacaaccacaacagagacgcccttaaccactacaacaatgcagccagtggagataagtctactggacgatagcaccacaacgacaaccacaacacctgcaccacccgtatactttgagtcctccacggtggccagcaccaccataaggagcagcaccaccatgctgccggagacgacaaccgcgtccacacagtcaccaagcgaaatgccacccacattcatggctccatatcccaacgaactggatcacatgcagaccaatgcccaggacaatgggacggacgtgaatgtgattatagccatcacggtgagcgtgattggtgtggtggccctcattctgctggtggcattcctctacttgatgcgcaaacgccagaagcagacgtcctacggccaaaggtgtcgccctgtgagcttggatgcctactccctggacaacgtttcggtgctgggcagtgtgaggcgcaagggtcgcgatatgagagcctccaagcgcacctatggcaatgcagccttcgatgatccctcgctgcggcacaatctactgaccgccagcgagctggcccgcttcgtggagcggcgctcagacgtcttcgaggagttccgggacgtgccgcagatcatagccagggcggacgaagtgccacctggttgtgaggacaagaaccggtaagttaaatgatattaatcattgctggaaaagtgaataccgaataataatgggcgtttgaggtacacttatcatttaagggctgggtcacacttgtgcaatctagatgatttgataacacgtttgtgatatgattagattaggcctagttcaatggtagataattaaatgttgggagaattttattaacttaatttattcagaaacgtgtagcttgaaaatcagttaagatttctcattggggttgttttttccccctaaccggtactcactgtaattaagggttcactttctcggcacgagttcacatcgaattgtcgaatcaattacaatactgatcttcctgcttttttcccggccaaacccataacaacgatggtgactcaacgcctcgacctcgaactggaaatgcgaaccgtagctacgccaacgtgattccgcttcctgagacgcgggtggtgctccagcggcaaggcgacgatgacaaaacggaatacattaatgccaattatgtgcgggtaagtaaccgaggcagagtctcccaagtgggcggcggatcagctcatccgaagctagacaaacaatcgactaggcgctttctcacacacatgtttagagtgggtggttgattgatatgtggatgtagttgcttgtgttgccgggttggaggcatcttggagcgcacattacaaacatacgtatgtacatatgtggcgagccttgcatgacgccctgccctaactggaatcttcgggcccctcgagggccattaaacatggcgcccgaataattacacgcccgatgagactcacctgctagatgctcctctgctggccgtgactgtgaaataggctcatcgtctttgttgcccagatccgtgcaagcaaatgggcccatctgcgaaaagcagcagataataactgcgccaagggaaagtgccagccaagatcaacgaagtttgaatgcccttacatcatgctacgcccccatgcgctcagctaca

SEQ ID NO: 35951 - DNA, 3381 bp, DROSOPHILA
atgctcgccctggccgtaatggtaacgcaggcacgtttcattgcgaaaagagaaaccaccggcttggagcaggcgatggcttccacttccactgaccctgacattgttaaggcgcccagggaaagtgggatcggcagggaaccggtcgccataaaggcagaatcggatatgttcagctcacaaaccaatattgaagatgaaaaaagcgcaaaaactgtggatcaaaccgaaacccaaactgctagtccgaaagagaatctcaatgtcaagcaaacgacggcagccttcgagaaaaatgagtccagtaacaccacggaatctcacttaaatggagctcaagtggatcccgtaaaagaactaaaggacacggaaacttctgcagatactgtcaaggaagagtcaagcaccacaaccacgtctcagttggatcaaaacccgaccaatgtgacagataagaaatccacagaagctcagtttaaagatgaacgtctttcaaaagagattttaagcacaaccactgaacaaattttgttaaccgagaaagcccttcaaaaatatgtagtcataacgaattctcctttaagaggagaggcacaacctgagattaaggataaaacctcaaaatctgcgacaagcgaaaagtccacgctcccattaaaaccagtaactattgaagttccgagcaccaccacagagggagtgttcaacaccacaaccactcgatcttccgatcatggccgttccatgcagtattcatccaccactgaagaatcgagccgatcttctcctgcttcagtaacgcccatgaagttgatacccctacccatgacttctacaccatccagcactacttccacatcgacgcctttgccaaccactgcagtttccttcgcctcaaatgagaatgtcatcgaggagtccacctcaaagtcagaggtccgtcagttgcctgagaagcgagccaagtttataagtgaaaactccacaaatgcccagcaacttacactgcccaacacggctgaggtttggagtcttgctggaatgaaggcggtaccgaaggcaccgctaactaccactaccagcgtaccactccttaaccacactgatctcgcaaatgatatagatatgcccctcaataaaacggagctgcacaaggagaagaatctcctggattggatgaacattgccatgctgccattgacgcccgagaatcgcaccgaatttgtggtcagaaccactctggatgccaccgagggagccacccaggctactaccgaagctttggtagaggaaacccattccaaaagtgatattacagtgggattggaacaggataacgtcacaacagcacgaacaatgccttcaacacctgatcctggatcaatggacctcaatatgacgaccacaactgtgcgtacgcaacaattggaagttccattagtcaaaaagatgtccgatgcagccaatgccaagttgatagaggcggttacagagcctcaaagggaaacagaagcagcaacagaggctgcaacatttgttacattacccgagaaacttgcaacattcggcataacagcgagggttgattcaacgcaaacggaactgttgaatgttaccacagcagcagcggcaacagagtcaggtgaaatgtctaaggcaaattcaacagatacgttatcagcaatgacaagcacaactactaccacagcaaggcccatgtctgtggaacatgtaacgcctgaacaagacatggaggcagcaacatcactggccacgacagctgcaacatcaagtggaactacggaggcagcagcaacatcatcgacaacggcagcaactccggttgtctcagaggcagcaacagccgcagaagcatcggcaacatctgaggctacaacagctgcaacattaagtgttgcaaccaccgccgccagcacaaccgaaatagcaatgaaagcgactcaaatcagcaacattcgcgacgacaacgacgataacagtaacgacgtcatcgttgccacaaccaaatttccagagagcgagcaggcagcaacaacggcaagcgttgagccaacaacgacatcggttagtgtgcgagtggctggcgaggtgagcacttcgattcggccagaaatcatcgttaccagtacgcggaatagtacgatcgtggacacaagtacatcggcgacaagtgtagcaacacccacgcaaacggaaattgcgcaaataagcaatgaagtgaatttggaggcagtgacagtgaagacgcgcgacggtttgagcgatacgaatgagttaagaacagctgagaaaaccgataacgcggtcaataacagtgtggccataacagagagcgacttgggggcattggcaacagcagtggaaaccaaccccacgacaaccaacagtctgctcagtgacgtgagcaagttaagcaaggagcacgagtcctcgctggagaccaataacataggcgaggcgcctcccgaatcgacgacaccagcagcaccagcaactgttgctgttgcaacggatgagagcacagcagcgccggcagcaacaggtggccaggaaatcgtgagggagggtcaacatcatgacggacaacaggtggctgatgagcaggacaccgagcagcagttagccaagacgacgatggcggtgacaacgacaacaaccagtgcgacaaccactacaaccagtactacaacaaccacaacagagacgcccttaaccactacaacaatgcagccagtggagataagtctactggacgatagcaccacaacgacaaccacaacacctgcaccacccgtatactttgagtcctccacggtggccagcaccaccataaggagcagcaccaccatgctgccggagacgacaaccgcgtccacacagtcaccaagcgaaatgccacccacattcatggctccatatcccaacgaactggatcacatgcagaccaatgcccaggacaatgggacggacgtgaatgtgattatagccatcacggtgagcgtgattggtgtggtggccctcattctgctggtggcattcctctacttgatgcgcaaacgccagaagcagacgtcctacggccaaaggtgtcgccctgtgagcttggatgcctactccctggacaacgtttcggtgctgggcagtgtgaggcgcaagggtcgcgatatgagagcctccaagcgcacctatggcaatgcagccttcgatgatccctcgctgcggcacaatctactgaccgccagcgagctggcccgcttcgtggagcggcgctcagacgtcttcgaggagttccgggacgtgccgcagatcatagccagggcggacgaagtgccacctggttgtgaggacaagaaccggtaa

SEQ ID NO: 35952 - protein, 1126 aa, DROSOPHILA
MLALAVMVTQARFIAKRETTGLEQAMASTSTDPDIVKAPRESGIGREPVAIKAESDMFSSQTNIEDEKSAKTVDQTETQTASPKENLNVKQTTAAFEKNESSNTTESHLNGAQVDPVKELKDTETSADTVKEESSTTTTSQLDQNPTNVTDKKSTEAQFKDERLSKEILSTTTEQILLTEKALQKYVVITNSPLRGEAQPEIKDKTSKSATSEKSTLPLKPVTIEVPSTTTEGVFNTTTTRSSDHGRSMQYSSTTEESSRSSPASVTPMKLIPLPMTSTPSSTTSTSTPLPTTAVSFASNENVIEESTSKSEVRQLPEKRAKFISENSTNAQQLTLPNTAEVWSLAGMKAVPKAPLTTTTSVPLLNHTDLANDIDMPLNKTELHKEKNLLDWMNIAMLPLTPENRTEFVVRTTLDATEGATQATTEALVEETHSKSDITVGLEQDNVTTARTMPSTPDPGSMDLNMTTTTVRTQQLEVPLVKKMSDAANAKLIEAVTEPQRETEAATEAATFVTLPEKLATFGITARVDSTQTELLNVTTAAAATESGEMSKANSTDTLSAMTSTTTTTARPMSVEHVTPEQDMEAATSLATTAATSSGTTEAAATSSTTAATPVVSEAATAAEASATSEATTAATLSVATTAASTTEIAMKATQISNIRDDNDDNSNDVIVATTKFPESEQAATTASVEPTTTSVSVRVAGEVSTSIRPEIIVTSTRNSTIVDTSTSATSVATPTQTEIAQISNEVNLEAVTVKTRDGLSDTNELRTAEKTDNAVNNSVAITESDLGALATAVETNPTTTNSLLSDVSKLSKEHESSLETNNIGEAPPESTTPAAPATVAVATDESTAAPAATGGQEIVREGQHHDGQQVADEQDTEQQLAKTTMAVTTTTTSATTTTTSTTTTTTETPLTTTTMQPVEISLLDDSTTTTTTTPAPPVYFESSTVASTTIRSSTTMLPETTTASTQSPSEMPPTFMAPYPNELDHMQTNAQDNGTDVNVIIAITVSVIGVVALILLVAFLYLMRKRQKQTSYGQRCRPVSLDAYSLDNVSVLGSVRRKGRDMRASKRTYGNAAFDDPSLRHNLLTASELARFVERRSDVFEEFRDVPQIIARADEVPPGCEDKNR

SEQ ID NO: 35953 - DNA, 3145 bp, DROSOPHILA
tgatcttcctgcttttttcccggccaaacccataacaacgatggtgactcaacgcctcgacctcgaactggaaatgcgaaccgtagctacgccaacgtgattccgcttcctgagacgcgggtggtgctccagcggcaaggcgacgatgacaaaacggaatacattaatgccaattatgtgcgggtaagtaaccgaggcagagtctcccaagtgggcggcggatcagctcatccgaagctagacaaacaatcgactaggcgctttctcacacacatgtttagagtgggtggttgattgatatgtggatgtagttgcttgtgttgccgggttggaggcatcttggagcgcacattacaaacatacgtatgtacatatgtggcgagccttgcatgacgccctgccctaactggaatcttcgggcccctcgagggccattaaacatggcgcccgaataattacacgcccgatgagactcacctgctagatgctcctctgctggccgtgactgtgaaataggctcatcgtctttgttgcccagatccgtgcaagcaaatgggcccatctgcgaaaagcagcagataataactgcgccaagggaaagtgccagccaagatcaacgaagtttgaatgcccttacatcatgctacgcccccatgcgctcagctacaagaaatcacatagaaaacagccaactactttgcactcacaagctatggataaatgaaatctccttatctaataaccagaacaggaatagtatgattttaaaacgttagtaatctgaaagaaagcgccttgggtaaaggctatagagtattttgaataattaaatggtgatgtattaagcaggacgtgcgttcaccaagttggatgtttcagttgtttaccaaaacgcactttaaacaactgcattcaagcgcgacgtggacgatgcagtgcagcgcattcatgcgaatcatttcgagcgctcatcggcattgcacctggcgataacctaagcatgtcgagattcaagcagcagaggtctgttgtgcgattttatggtatcgtttatctgagaggcgcgcgtagctgatcgccagtcattgtgtgggcaggggtagagttaagccgcaatcggttttaattgatggttatgtcattactcaacctcgcgtcgtctttttgccgaaaaacgctagatagcttcaaattcaaataatactagtatgctatccaatggaaagacatcattttgataccttttttaatcacttcagggcccgagggatgcacccaactactacatagcctgccaggcgccgctggagagcacgaccagcgatttctggcgcatgatctgggaacagcagtcgcgggtgatcatccaggcgacggatctcagtgagaacggaattgagaggtgcgccgagtacctgccaccgtcggcgactctggacaatcatagcagctatggcgattaccaggtgaccctcaagcatcgcgaagtcaaggatcgctatgccatttccacattggttctgaagcgagtggatggcgaggagagccgtgagctcacccactactggtacaaatggcctgaggcgggtgtaccggccgaggaggcgcccatcatcgccatgctgctggaagcgcgatcctcgctgaagtcctactcccttgagcaggccaacgagctgcgcgagaagtccgcgaccctggagacgtcaatggatgcggacggcagcaaagccgaggcgggcagcacgtccagccacgagattaatggaaacatctcaagtcgaagcggaacacgaagtcagcaggggtaggttgacataatctccatccattcatatcaaagcagttgttgtgtgttgcatggctttttaatgttctgtgtcttaacttcttcatctctccccctgcagaccgctaaccgttcactgttctccaggcacgggacgaaccggtaccattatagcgtcggacatggccatccgcagtctggaaacaccgaagcggtccgtggacatcccccaactggtttactacgtgcgacgcggacgtgccagcgccgtacagaccaaggagcagtatgaatttatctacaaggtggccagcatgtatgcggccaagatcacaaatctgtccaatgacaactgaaagccagatggcagtgttagcggcagagcccatcgagtggaaaccgaatttgcgattgagttcacctttcacccttacagcactgatcaatgggaccctttgtaataatagtagctatgttttatacgaaatattagtgtaaattagtattatgcttgaatgttggcacctaattaagcgtaggcttcgttgtatgtcgggctttaaatatcatttaaattgtatgtattcctttattattgtgatataatcgtacattcgtatatctcctgataatctgttgcatatttataatgtcaatttttgtttttgcactgtcacgcgcttcggggccatataatccggagcaaatgatcattatttggagctctccttgttttaagaaagtcaaatatgtaatcaaacaatgtgtgtatctattttaaatgagctttaatgtacgtaagttatttttaagtccgagctgtactatactcatattattgtaaattacaagaaaaaatatgtccagcagtggtttttgaagttttaaatttcgcgggcttcgcatttaagtgagaccttttttgattgggttttaactatgaaccgatactactgcacttctgatctttctcttatttacataaaatttcttttggttactaattttttcaaagttaaaaaaaaaaaacaagttttaatctcttaatttcgttgaaaactatttgagttgttatatttatttggttttatgtgtgcagtgggaacaagttaaattattgtagatctctggtcacactaaaccgcgagtgttttttgatactggctttcgataagatgaagttaacttatattttgttaatctgcgcttttgtggccgcctccgctgccagcgatccgaaagtgaagattggcattaagaagcgggtggagaactgcacccggaaggccaagggcggcgatctcgtccacgtgcactacagagtaagggaaatcagataaggaagatctctagccg

SEQ ID NO: 35954 - DNA, 813 bp, DROSOPHILA
atgtcgagattcaagcagcagaggtctgttggcccgagggatgcacccaactactacatagcctgccaggcgccgctggagagcacgaccagcgatttctggcgcatgatctgggaacagcagtcgcgggtgatcatccaggcgacggatctcagtgagaacggaattgagaggtgcgccgagtacctgccaccgtcggcgactctggacaatcatagcagctatggcgattaccaggtgaccctcaagcatcgcgaagtcaaggatcgctatgccatttccacattggttctgaagcgagtggatggcgaggagagccgtgagctcacccactactggtacaaatggcctgaggcgggtgtaccggccgaggaggcgcccatcatcgccatgctgctggaagcgcgatcctcgctgaagtcctactcccttgagcaggccaacgagctgcgcgagaagtccgcgaccctggagacgtcaatggatgcggacggcagcaaagccgaggcgggcagcacgtccagccacgagattaatggaaacatctcaagtcgaagcggaacacgaagtcagcagggaccgctaaccgttcactgttctccaggcacgggacgaaccggtaccattatagcgtcggacatggccatccgcagtctggaaacaccgaagcggtccgtggacatcccccaactggtttactacgtgcgacgcggacgtgccagcgccgtacagaccaaggagcagtatgaatttatctacaaggtggccagcatgtatgcggccaagatcacaaatctgtccaatgacaactga

SEQ ID NO: 35955 - protein, 270 aa, DROSOPHILA
MSRFKQQRSVGPRDAPNYYIACQAPLESTTSDFWRMIWEQQSRVIIQATDLSENGIERCAEYLPPSATLDNHSSYGDYQVTLKHREVKDRYAISTLVLKRVDGEESRELTHYWYKWPEAGVPAEEAPIIAMLLEARSSLKSYSLEQANELREKSATLETSMDADGSKAEAGSTSSHEINGNISSRSGTRSQQGPLTVHCSPGTGRTGTIIASDMAIRSLETPKRSVDIPQLVYYVRRGRASAVQTKEQYEFIYKVASMYAAKITNLSNDN

SEQ ID NO: 35956 - DNA, 2480 bp, DROSOPHILA
gtcggacatggccatccgcagtctggaaacaccgaagcggtccgtggacatcccccaactggtttactacgtgcgacgcggacgtgccagcgccgtacagaccaaggagcagtatgaatttatctacaaggtggccagcatgtatgcggccaagatcacaaatctgtccaatgacaactgaaagccagatggcagtgttagcggcagagcccatcgagtggaaaccgaatttgcgattgagttcacctttcacccttacagcactgatcaatgggaccctttgtaataatagtagctatgttttatacgaaatattagtgtaaattagtattatgcttgaatgttggcacctaattaagcgtaggcttcgttgtatgtcgggctttaaatatcatttaaattgtatgtattcctttattattgtgatataatcgtacattcgtatatctcctgataatctgttgcatatttataatgtcaatttttgtttttgcactgtcacgcgcttcggggccatataatccggagcaaatgatcattatttggagctctccttgttttaagaaagtcaaatatgtaatcaaacaatgtgtgtatctattttaaatgagctttaatgtacgtaagttatttttaagtccgagctgtactatactcatattattgtaaattacaagaaaaaatatgtccagcagtggtttttgaagttttaaatttcgcgggcttcgcatttaagtgagaccttttttgattgggttttaactatgaaccgatactactgcacttctgatctttctcttatttacataaaatttcttttggttactaattttttcaaagttaaaaaaaaaaaacaagttttaatctcttaatttcgttgaaaactatttgagttgttatatttatttggttttatgtgtgcagtgggaacaagttaaattattgtagatctctggtcacactaaaccgcgagtgttttttgatactggctttcgataagatgaagttaacttatattttgttaatctgcgcttttgtggccgcctccgctgccagcgatccgaaagtgaagattggcattaagaagcgggtggagaactgcacccggaaggccaagggcggcgatctcgtccacgtgcactacagagtaagggaaatcagataaggaagatctctagccgacctaaccccgaatttggaatcattctagggagcactgcaggatggaacagagttcgatagcagctactcccgcggcactcccttctcctttaccctgggagctcggcaggtgatcaagggctgggatcagggaatccttggtatgtgtgagggtgagcagcgaaagctgacgattccgcctgagctgggatacggagccagtggagcgggtggcggaaagattccccccaatgcggtgctcgtcttcgatacggagttggtaaaaatcgaaccgcgctctggatctgaagagctgtaaagcgaatagggccacaaataggcattccatgctacacccaaagtttactttcaactaaagtcataaacatttaatgctcaaatatttaaagtagtaatttgtcttgtttctgaagtgatgccacgccacgaccaataaataataatgtcattccttttatactagaccaaattgtatttattgcaagagccccttacttttggcgtctcagccacgcttccacctcgtcgaagtgacgccgcatcaaccgatgcttctccagcgtgctgctctggatgaagcgctcgccacaggtgccgcacacgaaaggacattcgccggtgtgctgctggagatgaagcttcaggtccttggcctgacggtaactcttctcgcagtaggtgcatttgtgcggctttaggccgctgtgcgtaagcatatggcgcttgagcttatcggagcgggcaaagtccttgccacagacggtgcagtggaatggcttctcgccggtgtgcatccggcggtgcgaggccagctctgagtggcggggaaaggccatttcgcacagatcgcacttgaagggcttctcgccagtgtggcgtcgcatatgggtcacaagagcggcggctgatctcgtctccattccgcacagggagcagaggaagcgcttaattgcctccttgcgcttgcggtcgccgttaatgtgcacatcgcgaatatgattgttcaggcgcgacttcatctggtacgtgcgatcgcagtgtggacactgtagcagcggtattccgtcctcagtggcatccttttccaggtcaccggtcccttgcgtgtgtctgtcgccagtcggattgctgacggaagacttgctgtgttgcaggagaatgtgctgctctaggttctctggccacataaacttgtaggaacacttgccacatgcatgcttcttttctgtactactacactgaccttgccggtggtggtccataatgctctgaagcaataatgaaattgacataatgta

SEQ ID NO: 35957 - DNA, 417 bp, DROSOPHILA
atgaagttaacttatattttgttaatctgcgcttttgtggccgcctccgctgccagcgatccgaaagtgaagattggcattaagaagcgggtggagaactgcacccggaaggccaagggcggcgatctcgtccacgtgcactacagaggagcactgcaggatggaacagagttcgatagcagctactcccgcggcactcccttctcctttaccctgggagctcggcaggtgatcaagggctgggatcagggaatccttggtatgtgtgagggtgagcagcgaaagctgacgattccgcctgagctgggatacggagccagtggagcgggtggcggaaagattccccccaatgcggtgctcgtcttcgatacggagttggtaaaaatcgaaccgcgctctggatctgaagagctgtaa

SEQ ID NO: 35958 - protein, 138 aa, DROSOPHILA
MKLTYILLICAFVAASAASDPKVKIGIKKRVENCTRKAKGGDLVHVHYRGALQDGTEFDSSYSRGTPFSFTLGARQVIKGWDQGILGMCEGEQRKLTIPPELGYGASGAGGGKIPPNAVLVFDTELVKIEPRSGSEEL

SEQ ID NO: 35959 - DNA, 3104 bp, DROSOPHILA
aagtcgtcgatgatctgaagcagaagctcctcaacatcctcgtccagctgcgtggtggtatccacctctcggacgagctctgtgagacgcggtttggtaagcatctgtaattcggaagagagttaaactagaccctggcgtattccgtgtgcactccataaggcacgcatcttacgggagtgttctcggaaccggcggcggatgatgtgtgattggatgacttgctaccaccagatatggggcccgttcccgtacccaaaccggaaaccggtccgccgttctgcgaggatgagttgctgttgttggtcatcggactgtgctgggagggcgaggccatgggtgggtcgtggagcagtccgctggcggacgatgtggagttgtggttgtggtgcaggtggtgctcggcgacgccgttgctatcgaaagtggtaaagagatccgacattgcttttgggtttcttcagagtcaaatcaagtgggtggtaggtcggttggttggaagtgtttggggaaagtacagtaagttgggcggatttttggggagtgggtaagagtgcagaaccaaagccaaaagcgttagtgtacttgttgttgttgctgcttatgttgtgtgtcctcctgctttctcaactgcagtcggtgattgtgtgtgcgtgggtgtttggttgcaaagcgaaatgtaagtaaaagaatagagtggtcaatttcacgcgtgcggtcttaagaatccgtcgctttgtgtgtttactaaaactaaagtgttacttagcagttgctcttagcgcatgcaacacttacaattattgcggttttaacactttgatcttaaactattactttcctaaattactaaacaaaataaaaataagcggagcaactacagccaaatcaacagtatggccagttgcaggcgactctgaaatgcccgctggtgctataaagcaatttggtatatttacgtttaatttcagtatattttagttagacagccacactggcgtggagttcaaaacaaaacaaagacggcgtattttgcaaatatcacgtagataaggaatatattttactttgtaattgggaacaatagctgcgcaaaagaaacatgtcagcgagcgaagaaacaatagcggacagtcaggtctccgagaatgtggaggatgtggaattcgtagacatggcgttcacaaaggagttgcgtaaagccacaaaagatgtgcataatcttactgatgttctagtgaatgcaaagatcgcacttggttcgttaattacacgatattattagaagttattagatattcctcttcttccatagccctttctgatgacgaggtctggtatgatggactcctggccttctacgaactgtacaaattctttgagacccatctgccggagcgcctgctgcccaaagaattccacagaacagcggcatttgaaagggattttgcctatttctacggttccgattggaggaaggactacgaaattcgcccggcggtccagaaatatctcgagcatctggaaaagattgccgcacagaacgaactcttgctgttcgcctactcctatcagatgtacatggctttgatgtccggcggacaaatgttgcagaagaagcgtatgatcgctcgtaaaatgtggatcttttcaaagaacgatgacgaggagcagcagaagcaggccgacaaggaggcagagttggccaccgccagagctgccgatggctctgtagacaaagacgacttggaggccaggccaatgcctgcccaggttaccatttgcccgccgggatgtgaggccacatattttcctgagaaggtgcgtagctttttactttgttccttatatctattgtctttatatccactttcagatctctgtcttaaaggccaaactaaggcgcgttttcaacaatcactacggagcttttgacgatgatttgcgtgctgcttttattgaggaaagtcgcaacgtatttcgcttaaatatagaagtagtacggaccatcaaaggtgtgaatcgtgccaatcttaggaagctggccctcgcactaatctttgtttcaagtattgtagtggccgtgaaatttgctctcaagtaagaaaagtaggaaatacaaatgtaagctctcttgagcaagttagaattgtgatcacacatttatttagtcgtttgttaaatagtaaataacctgaaatttgtctgaagtaaagtatttattgggaatgtccgttggcaaaattatcaagcagtcctcgtctatttatccatggcatgacacgctctatattggccctataacgttcgttgctaaacattgcctccctcagggatttgccattctcttcatttcccaaaaagctatcagtggtaaagtcatcggttgtcttgttaagacacatcgacaaggtagtgagcacagttccagcagcttgaagaaaaacatgtcagtcagaggaatttaaaaacctcaaatccttctgtaaattaccaaaaatggggtgctgtatcagaatggcgtgcagttcctttagcgagggaataaatccgttgtagttcaacagcttggcgtgctccttcatgttttgatgataccatcggataaggtagtcaaactgatcgactttgatgtccagttgagtggagctcattatgaagtaatacagatcctgggcaggatttccatacttcgtgacttggtgatccaacaggagggtttccttgacgcgaccatctgattcgtattggaacatgatgttatttatccaggcatcaccatgattgagcacattaaacgcttgttcatttattttggcatcttcaagtattctgtcgacatacgtatccaagatctctggctgcaaaatatgattttgttaagttagttacaaggaataaagtaaagtgacttaccattttgtgcaagtactcatccacaccgtcaaacttgctcacttcttctataaaggatttcttagtgttaacaaacatacccttaaatataggtgccgtttgctctgtaaaaatgccattattgtatttgggcgaatagggtccatttagttccttgtacttcagagaggctgcatgccactgggcca

SEQ ID NO: 35960 - DNA, 993 bp, DROSOPHILA
tggagttcaaaacaaaacaaagacggcgtattttgcaaatatcacgtagataaggaatatattttactttgtaattgggaacaatagctgcgcaaaagaaacatgtcagcgagcgaagaaacaatagcggacagtcaggtctccgagaatgtggaggatgtggaattcgtagacatggcgttcacaaaggagttgcgtaaagccacaaaagatgtgcataatcttactgatgttctagtgaatgcaaagatcgcacttgccctttctgatgacgaggtctggtatgatggactcctggccttctacgaactgtacaaattctttgagacccatctgccggagcgcctgctgcccaaagaattccacagaacagcggcatttgaaagggattttgcctatttctacggttccgattggaggaaggactacgaaattcgcccggcggtccagaaatatctcgagcatctggaaaagattgccgcacagaacgaactcttgctgttcgcctactcctatcagatgtacatggctttgatgtccggcggacaaatgttgcagaagaagcgtatgatcgctcgtaaaatgtggatcttttcaaagaacgatgacgaggagcagcagaagcaggccgacaaggaggcagagttggccaccgccagagctgccgatggctctgtagacaaagacgacttggaggccaggccaatgcctgcccaggttaccatttgcccgccgggatgtgaggccacatattttcctgagaagatctctgtcttaaaggccaaactaaggcgcgttttcaacaatcactacggagcttttgacgatgatttgcgtgctgcttttattgaggaaagtcgcaacgtatttcgcttaaatatagaagtagtacggaccatcaaaggtgtgaatcgtgccaatcttaggaagctggccctcgcactaatctttgtttcaagtattgtagtggccgtgaaatttgctctcaagtaa

SEQ ID NO: 35961 - protein, 296 aa, DROSOPHILA
MSASEETIADSQVSENVEDVEFVDMAFTKELRKATKDVHNLTDVLVNAKIALALSDDEVWYDGLLAFYELYKFFETHLPERLLPKEFHRTAAFERDFAYFYGSDWRKDYEIRPAVQKYLEHLEKIAAQNELLLFAYSYQMYMALMSGGQMLQKKRMIARKMWIFSKNDDEEQQKQADKEAELATARAADGSVDKDDLEARPMPAQVTICPPGCEATYFPEKISVLKAKLRRVFNNHYGAFDDDLRAAFIEESRNVFRLNIEVVRTIKGVNRANLRKLALALIFVSSIVVAVKFALK

SEQ ID NO: 35962 - DNA, 3044 bp, DROSOPHILA
ggtttgcattcgaaagttcgtttttatggctccaaatgaggtttccagtttatttatttagttcgttttatgttcttccaagccagcggagtactactcaagggtgcttcattgtgtcaatagcctgaaattggatatgaagtgccttcgatactgtcaaacagtaagacagacagctgccatgaagtgtacccactttaatggctaaatcgaagttcaaaagcgagggattccgggtaaaaatagtttgaaaatttgcattcatttctattccagccattagacggcgtccgttggcttggttttcaaaaacaaacgaacttcatcttacgatttgtgcaccaaaaaaaaagaatattcaagtaacaagaaatgtctcagaccatttgtttgtctctgtgtctgagcactcgccaagatttatgccctctgtgatggcaaactcagcgcactcacattatgaaaatgtaaaaatgtaaaatatgaaaatgtggaaatttgaatttactcccccttctcgtagagctgtttctgccatttcctaattttccacgcaaatgcattttatttattacgcaatttggggatttgcactgccagccgcaattgtaagcgacataaaagcgcttagactccgactccggagcgttaaacgaagcattagccccagtggattacggctaataccattgtgtcccgagacgacggacgctacggggcgtatacggaatatcccaaggtacaactcgagatgttgtctgaaataaataaatatgagaataaaagtgttgcttttatgcaatggcaaggaataacaaccgcattgatgtatgccattacgatatttttaaactgaaaacaacacaactactatgatagtattgatttgatttattctttgtaacattcgatagaattcgttttaaactgtcaatagaaactgaataaatcaatgtatgccaagttttaaaatgtagcatgatttcgtttgaacttttaaattgtagagatttctctgaatttctagcaaaaagaaatcatttttacatggataacaaaagaaaacccagcttttaatgtagttccctgcagaactgacagctattctaaattttcggaaaccatggcaagacagcgacttctcggctcgatcctttccaaaggcggagcccaagtgctgcgaaacttccagtcatttgtccagggcactcgtttggagtatgtctcctacacctcgccgcgcaatcagatgcaggcgccaccaattgtggtgatgcacgacctcaatctgtcactggaatcctggcgccaggtagctgttaacctcagtcaggttggattgcgccaggtgatcaccgtggatgctcggaatcatggccttagtccttacataaccgggcattcgccaatgcacctggccgccgacgtggaggccctgatgagccaccagagactgaacaagatcgttgcacttggacatggaatgggcggtcgggcaatgatgacactggcactcactcagccgcaactcgtcgagcgggtcatactggtggacatcacaccagcaccggtgcccagtaacttctatctcactcggcaggtgttcgagatgatgctccaggtggcgcccagtattccctcaaatctatcactttccgaggggcgtacgttcatcctgccactgttccaggatgtggtccacgacgcctccgagctgcgtcgcattatttacaatctgcgcaagatgcaggacaacacctttggctgggcagttaatccccaggcggtcctaagctcctggggggagatgatgatcaattacgaggccactttgggcggactgcgtccctacatgggcgaagtcttgctcatagccggttcccagtcggaattcgtgaccacgaccagtattgccgtgatgcagagatactttccaaatacagtggtacagattctggatgctggacactgtgtgtatgaggatcagccggaacaatttgttgaactagtcgtggagtttactcaaacatgcttagtatgttgaagaaacacctatttggttatcgtttaaagtgacttttatataaaattggcattgctatattggctgatatttcagcactcaatatactccaccgataattgcgctgtcagcagaatggaaaccgcagaaaaaaagggctgaatggcatgaccatttgtggcgggcgggctgttgccaaaatcgatgggaaatcaacgtggcaggcaatcgaaccgataccgagtacccgatacaggtgctccaagtggaagccaggaggtttggcacacaaaggccaatccctcaacccgccaatttgccaataaagcagctgaagacgaaggtgaggtgaaatgcgccacaatgcgatacaatttagatttatatgctttgtctgatttatttgtattggacgtgtgggcgatggagacgtctgtctgactggcttttgtgtgtctgctcgtgcctcaaaagtcgataatctgtgtcccggcgagtggggtgctcatctacacctcggagcagctcttattgctgaaattgagtcatgactgagatttgaatgtgcaaatgtacacagcagcagcgacttgaagttgtttgcccaaactccgtgcctttgttctggctttaatgaggattacgtgaaatttcattatgcttcgtaataaataagtagcaagtcaaataaacagggactggcaaacacacacacattcccacacactccgcaatgaatgtacataccatctcaactggatgtgcgtacgcactacgtaccgaaaccatattaaaatttagacacgtacacattttattgcttgttattttgcctctatgtgtggcagctgcataagcccaaaatgctgtggcactgtggcactgtggctcaacttccagggttttctactcccattcacatctatgttatgaggcctgcggtcctgaccttaacttcacctgggagatttgataaaacaatattatttcctggaaataaacgaattaccccagctgaata

SEQ ID NO: 35963 - DNA, 1044 bp, DROSOPHILA
attgtagagatttctctgaatttctagcaaaaagaaatcatttttacatggataacaaaagaaaacccagcttttaatgtagttccctgcagaactgacagctattctaaattttcggaaaccatggcaagacagcgacttctcggctcgatcctttccaaaggcggagcccaagtgctgcgaaacttccagtcatttgtccagggcactcgtttggagtatgtctcctacacctcgccgcgcaatcagatgcaggcgccaccaattgtggtgatgcacgacctcaatctgtcactggaatcctggcgccaggtagctgttaacctcagtcaggttggattgcgccaggtgatcaccgtggatgctcggaatcatggccttagtccttacataaccgggcattcgccaatgcacctggccgccgacgtggaggccctgatgagccaccagagactgaacaagatcgttgcacttggacatggaatgggcggtcgggcaatgatgacactggcactcactcagccgcaactcgtcgagcgggtcatactggtggacatcacaccagcaccggtgcccagtaacttctatctcactcggcaggtgttcgagatgatgctccaggtggcgcccagtattccctcaaatctatcactttccgaggggcgtacgttcatcctgccactgttccaggatgtggtccacgacgcctccgagctgcgtcgcattatttacaatctgcgcaagatgcaggacaacacctttggctgggcagttaatccccaggcggtcctaagctcctggggggagatgatgatcaattacgaggccactttgggcggactgcgtccctacatgggcgaagtcttgctcatagccggttcccagtcggaattcgtgaccacgaccagtattgccgtgatgcagagatactttccaaatacagtggtacagattctggatgctggacactgtgtgtatgaggatcagccggaacaatttgttgaactagtcgtggagtttactcaaacatgcttagtatgttga

SEQ ID NO: 35964 - protein, 306 aa, DROSOPHILA
MARQRLLGSILSKGGAQVLRNFQSFVQGTRLEYVSYTSPRNQMQAPPIVVMHDLNLSLESWRQVAVNLSQVGLRQVITVDARNHGLSPYITGHSPMHLAADVEALMSHQRLNKIVALGHGMGGRAMMTLALTQPQLVERVILVDITPAPVPSNFYLTRQVFEMMLQVAPSIPSNLSLSEGRTFILPLFQDVVHDASELRRIIYNLRKMQDNTFGWAVNPQAVLSSWGEMMINYEATLGGLRPYMGEVLLIAGSQSEFVTTTSIAVMQRYFPNTVVQILDAGHCVYEDQPEQFVELVVEFTQTCLVC

SEQ ID NO: 35965 - DNA, 3972 bp, DROSOPHILA
ttttcccccgaaccgagctggcgacaaacgtggcactttcgtttatcagggtggccggccttgagttcgggttcgggatattaataaacatgtcttcagagtccacgctccgttggcaggacattattcttgactgccctccaattcgggatcctttgtggggttaatgtggtcgctcattagtggggtaattggcagctaattggcttgatgagtaccagtcatcttgattcatcgtgattggcccggccatggatgagtcttgtcttcgaaaaatatgaacttaagtttcagattcctatgggagttctactcgaagcttttaaattgatatcaggtacttttctgcgccatctcacgctgcgaaaatgtaatcaaagtttgctgattaaagtgaaaatgtgcagaaattatgaatcaattttccgaagacgacgacaagcgaagtgcaaagtcatcagtgagctgcgaaagtggcatccagagttttagccgccaatcacggaaatttgcatagttcttcgcgcttttaactatggactacggatggaaaaaccaggtcaaatcccttgaaaggtgtggacgtaaaagtgccagccatttcgatgtccatattgcatttttactttggctattaatacattttcactcagtaaattccacattattgaattaaattaatcctgccgctgtcgattttattttaaatatattcattggcaacaaacggttgatatgttggtttttgtgtgcagcaatgatattattaatacttcggattatattgttttgatgtggataaacacatcaccaacattttttcgagtcaaaagtaatgaaattaaattggcttgccatttgattgaattggaaaaatatggctgccaagtaggctacaacacaatctatcaaagaaacttagatccggaactcagttcatttttatactcctagtgtctggatgttatcaaagatttcagtagtttttaaaggaatcggttcgtgtttgatcagcagtaaaggccacacaacgaggagttttacgtatattttttaccaaccatggatagcacgtcagccagcgtagtgtatacgaattctttttacgctccaaattactcggacacccagcagccacagccacagctgcagactcagcaacagatgttccatgccaactacatcgtcggaaccacattgggttctggattgggatttaattttgcaccagcccccattccccaggcgagtgccgcttccggtttgagtcccagaggcatgtacagtgatctctaccgctacgaggatggaagcggcgatgccagcggttccttgcttctggtccaagaggatgaccacttctgtggtgcagaggcggaccagcagttggtggccagcacgtcgtcctcatgcccgatggcgagttcaggcgagtccgtgagcattgacacagagcaggaggcggaacgggatcttcagatgaaccaatgtgagacgctggagcgggaagagctgaatggagatataggggaaatgggggaaatggaggagcttgcagaggaggttaatggcgagcagaggccgccgctgttaccctgcatgggtggcaacacatcctacatggtgttcccgcgcaccgccgccgactacatgccccgcctggcgctcccgcggcataggccctatataagcatcggtcaggagcagtacgtgatccaggcggaaactgtcttcgtgctgggcatgcgcctcaatgtgaccaagaacgacatcatcctgttcttcggcaaagtgggcgttatcaagatggacgagtcgaccaacaagccgaagatcttcgtctacaagaacaagataacggggcgctccaagggtgaggccactataacctatgtgagtccattctctgcacaggcggcgattagttgtctgagtggggccaagttcatgggacaggtgatcaccgttctgcccgcctacctatccacccggaggggcagtgtccggtacagttatccgcgagagcttaatgcgccggagcaccaacgtcgccagcgggcaatgaaatggaagccagccatcgacaattgggtgtgcatgctctgccggaacagcaacttcgtctggcgttccagctgcaacagatgccaggcggacaaggtggtcgctcctcagaataacgagggaagttcctgggcgggatcacgcgaagaggacggtgcccctcgtcgttggcggccatacaggaacgactggctgtgcaagatttgctataatatgaatttctggtaccgagcgaagtgcaatcgttgccacgccctgcgttccgatgaaatgaagagctccgagtcgacggaggaagatacctgggagctggttctgaatccgcccattgcagagtagaaacagtccagtccacctcgttctgtctgtgtctgtgtctgtatctatacgtgttatctgttttgtgtatccgcatctttttgtacgaaggacacttctgccttctgcatcctgctccttccggacttctaaaaatttcaagtgattggaacgcgaactgcgtcgtgatatccagatgcaacttcaattgaattgaatcgattcgatgcgatgcccatgagcttgtgagccccatccaagaacagcaagagccaagaacaaaagacacctaaattcctgttaatgcccgtcttagaaaaaggcgtttgaatgcaatgccgccaccatatacccgccgaaccagtctttgtccccagagcagagatcctcagattgcgggacaatgcaacttgctgaatggtaatccacttaatccgggtaactgaatattttacccaggcacaaaaggcaaccggacccacctggccagctctaaacgtttaatgaatttatttactttcccgacgcgtgcagtcagtggctcagtggctcattggctctgcggaactgcactgtaaatcgaaatattatattcaatgaagtctaaattgtttaataaaattaatcttctattcatttatttatagaaagggtgaactcgtggctttaaactatcacaatgaaatttcaaaatttctgaatcccccacagcaaatccttgactcagattgttttctgtgtgcagtggcatcaagccacttgaatccatgtcccacaagtcgctcgccagccccatcctcctactcctcctttctatctacctcgtccttttctgtcatgtgatttaatcaaactttgcgtcagccgaatctgtgccacaacagcttggctggttggtagatggtgcggctggtgagttgctcttttggctgcacccgcagttgcggctgccctcgtctgccgcatgccacgcccccctgctccattcaccagttcaccagaggcggcgcctggcagactttgtgttgtgcatttactttgcactttcttccacgcgagcggacaaggcacctggtgggagctgtggagtgtggagtccggagtccggagtccatcgtccctagtccatagtccatagtcggttgtgcttggtctgccgcctgcggggtatttgcgtagctgcaggtgttgctccgtctgctgctgcccaaccagcccagcccagcctggtaaaccaccaaacccgcccacagtgtcgccgatttaagtggcagccatggagtaaatgcaataaacaccattagctgcaacgactccgttggtcgtcacttgttggtcgttggtcgtcgtcgctccgtgcgcgtttctcgcccagttatcctctggctaggaaagttaactgcgaactgggccatcaaggtacgagttagtggaaaaacgtggcaggagcggaagaagtgggaggaggaggatggggaatctggggaaatgttgccgcatcaaaatgcaaacgcgaaaggcgaaaagagtcttaagtgaattgaatggaaaactttcaaactgcgggcgccatcaactttcggtgcaagc

SEQ ID NO: 35966 - DNA, 1621 bp, DROSOPHILA
tcgtgtttgatcagcagtaaaggccacacaacgaggagttttacgtatattttttaccaaccatggatagcacgtcagccagcgtagtgtatacgaattctttttacgctccaaattactcggacacccagcagccacagccacagctgcagactcagcaacagatgttccatgccaactacatcgtcggaaccacattgggttctggattgggatttaattttgcaccagcccccattccccaggcgagtgccgcttccggtttgagtcccagaggcatgtacagtgatctctaccgctacgaggatggaagcggcgatgccagcggttccttgcttctggtccaagaggatgaccacttctgtggtgcagaggcggaccagcagttggtggccagcacgtcgtcctcatgcccgatggcgagttcaggcgagtccgtgagcattgacacagagcaggaggcggaacgggatcttcagatgaaccaatgtgagacgctggagcgggaagagctgaatggagatataggggaaatgggggaaatggaggagcttgcagaggaggcggcgattagttgtctgagtggggccaagttcatgggacaggtgatcaccgttctgcccgcctacctatccacccggaggggcagtgtccggtacagttatccgcgagagcttaatgcgccggagcaccaacgtcgccagcgggcaatgaaatggaagccagccatcgacaattgggtgtgcatgctctgccggaacagcaacttcgtctggcgttccagctgcaacagatgccaggcggacaaggtggtcgctcctcagaataacgagggaagttcctgggcgggatcacgcgaagaggacggtgcccctcgtcgttggcggccatacaggaacgactggctgtgcaagatttgctataatatgaatttctggtaccgagcgaagtgcaatcgttgccacgccctgcgttccgatgaaatgaagagctccgagtcgacggaggaagatacctgggagctggttctgaatccgcccattgcagagtagaaacagtccagtccacctcgttctgtctgtgtctgtgtctgtatctatacgtgttatctgttttgtgtatccgcatctttttgtacgaaggacacttctgccttctgcatcctgctccttccggacttctaaaaatttcaagtgattggaacgcgaactgcgtcgtgatatccagatgcaacttcaattgaattgaatcgattcgatgcgatgcccatgagcttgtgagccccatccaagaacagcaagagccaagaacaaaagacacctaaattcctgttaatgcccgtcttagaaaaaggcgtttgaatgcaatgccgccaccatatacccgccgaaccagtctttgtccccagagcagagatcctcagattgcgggacaatgcaacttgctgaatggtaatccacttaatccgggtaactgaatattttacccaggcacaaaaggcaaccggacccacctggccagctctaaacgtttaatgaatttatttactttcccgacgcgtgcagtcagtggctcagtggctcattggctctgcggaactgcactgtaaatcgaaatatta

SEQ ID NO: 35967 - protein, 329 aa, DROSOPHILA
MDSTSASVVYTNSFYAPNYSDTQQPQPQLQTQQQMFHANYIVGTTLGSGLGFNFAPAPIPQASAASGLSPRGMYSDLYRYEDGSGDASGSLLLVQEDDHFCGAEADQQLVASTSSSCPMASSGESVSIDTEQEAERDLQMNQCETLEREELNGDIGEMGEMEELAEEAAISCLSGAKFMGQVITVLPAYLSTRRGSVRYSYPRELNAPEHQRRQRAMKWKPAIDNWVCMLCRNSNFVWRSSCNRCQADKVVAPQNNEGSSWAGSREEDGAPRRWRPYRNDWLCKICYNMNFWYRAKCNRCHALRSDEMKSSESTEEDTWELVLNPPIAE

SEQ ID NO: 35968 - DNA, 2555 bp, DROSOPHILA
cgcctggcagactttgtgttgtgcatttactttgcactttcttccacgcgagcggacaaggcacctggtgggagctgtggagtgtggagtccggagtccggagtccatcgtccctagtccatagtccatagtcggttgtgcttggtctgccgcctgcggggtatttgcgtagctgcaggtgttgctccgtctgctgctgcccaaccagcccagcccagcctggtaaaccaccaaacccgcccacagtgtcgccgatttaagtggcagccatggagtaaatgcaataaacaccattagctgcaacgactccgttggtcgtcacttgttggtcgttggtcgtcgtcgctccgtgcgcgtttctcgcccagttatcctctggctaggaaagttaactgcgaactgggccatcaaggtacgagttagtggaaaaacgtggcaggagcggaagaagtgggaggaggaggatggggaatctggggaaatgttgccgcatcaaaatgcaaacgcgaaaggcgaaaagagtcttaagtgaattgaatggaaaactttcaaactgcgggcgccatcaactttcggtgcaagcgggtggcagaaagtttctgaagcctgatttgtttatagttttcaagattgtcgacttttgtgacccaattcagcctttacttcaacataattagaccaacttggttaaacttgactattacgcaacccatcggccaaatttccagtgccaatattttgattttctttttaagtaaaaatgcagtgttttttcacacaatttgattgatggtaacattcatgcccgttgtataccgaacctgcattcgatttagtttaaagagttgctgtttggataatgatttttggtatatgtccatagctttggtatgtattttctaaacttgttagtaggcctagaaaatgctctaagtcagttaaatagtaaacaagactcaacaaggcaatctcacacacaaaacataaatacctaaacacaatgcataagaacttcaaaagtctgcaaaacactaacccatccaatatgaagaaggccaaaaccgcggctaagggatttcccattcaccttggtttttataggaaccccagcgagtatgacgatcgcacgaccaccaatcgcgattatggattgaaaagttccaagggttctggaacgccatttccgcaaaaacaaaagaaattagatacggcggcactaacggccaagttggagacggatagtctgctccgatctgaattaagcgacttatcgattgtcatctccgaaagaaaggcgtcctcagaaccacaagtggcatccaatactacaaccgaaccaacgtttgagatgagacgaaagctttttgacgaggccgagttcaccatctgcaagggtcacaaactgaaccaggacttccatcatatagtcgaagatgaaaagcattttaacaaaaggcagagtgccaaggataacattccctatagcaatttcatggatctgaagaacttctgcgaccagaacaacataaaattttccaagggttttgacggttagcgttctccactgttgtcatcgaattaggagcgggaataaagtgcaggagtcgggaattccatcttcgcatctccaacatcaccatttccaccatctgtccctcttgaaagtgtcactcacggaggataaatggtgccaagtgcagcagaaaaaccaggatgctaggtttgtgaggaggcccgactgggagatacctgctatacacttttccaactgcaaagaattacatggtactcaattcaataattcaataataaagggttcctatcttatacatgtgcaataaacgaaacggacacatttcttttcgaataatatctttaataatgcaactaatatttaaatattgaatatcaaatgagagataaacaaacgttaaatacttacaatgttcttcaattgatttgtctaaaatctgtttctggaagactttgcacccgagtgctttgtgtatacctttgtgctttgcgttttccaggacgcaggcacaaagacagaaatccacttggcttcacccacatcccggcaccaggacaacccgcccgaaggagtacgccgccttccagcatctgtggttcattgtactttacgagaattttcaacgtgctaagctcgcgacttccgcgtgtttttgccgtactttccggctgccattttgttgcgtttttgcgtcgttcccgctgctatccagcattcatcctctttgtgggcccgggcacggaaagcatcgaacaatggaacaggcaacggtgtgagcagtggtgctgaaatgtttggctgtgaattatggcggcagagatcgacaccgtttctaagctccgattggcggggctgtgacagttttgaaggttcgctgcatacgcgcatatcgcgtatacgcaacgttgtgccgttcggttactgactgtcatattgcaaacgacacgcctgggaagcagtggagtcagtggaatcagcggaatcagggaatcatcagaagccccgaacaccgaaccgactg

SEQ ID NO: 35969 - DNA, 555 bp, DROSOPHILA
atgcataagaacttcaaaagtctgcaaaacactaacccatccaatatgaagaaggccaaaaccgcggctaagggatttcccattcaccttggtttttataggaaccccagcgagtatgacgatcgcacgaccaccaatcgcgattatggattgaaaagttccaagggttctggaacgccatttccgcaaaaacaaaagaaattagatacggcggcactaacggccaagttggagacggatagtctgctccgatctgaattaagcgacttatcgattgtcatctccgaaagaaaggcgtcctcagaaccacaagtggcatccaatactacaaccgaaccaacgtttgagatgagacgaaagctttttgacgaggccgagttcaccatctgcaagggtcacaaactgaaccaggacttccatcatatagtcgaagatgaaaagcattttaacaaaaggcagagtgccaaggataacattccctatagcaatttcatggatctgaagaacttctgcgaccagaacaacataaaattttccaagggttttgacggttag

SEQ ID NO: 35970 - protein, 184 aa, DROSOPHILA
MHKNFKSLQNTNPSNMKKAKTAAKGFPIHLGFYRNPSEYDDRTTTNRDYGLKSSKGSGTPFPQKQKKLDTAALTAKLETDSLLRSELSDLSIVISERKASSEPQVASNTTTEPTFEMRRKLFDEAEFTICKGHKLNQDFHHIVEDEKHFNKRQSAKDNIPYSNFMDLKNFCDQNNIKFSKGFDG

SEQ ID NO: 35971 - DNA, 2576 bp, DROSOPHILA
tgagaaaggatgtcaggggaatcgagaaatcaactagtttttcctacagttttagtgctttttatgcgtttccatttcccccctgcggagtgagaatgttcttgtactttttgtgctgattctcgctttcctctaatctctccctctgtctctcaatcgtagcatttctcgttttcctgtccaggtcagtgtcgccacccaagagctttcacatcccggcgagctgttttgttttttttttttttatccagaagtcccgggctacgccctttcagagctcatcccgcattttccgcttcttttgcctggcagcgcccgatgcaacggcaattcacttaacttactcaagtcgttgagggcataacttccgctccgcattccagtaaaagaccatccaatccccatcccaatccgcatcatcccgccactccggttactgtcttaatgccaatgctcatgctcacacattccccggcaatcctcatacgcgtttagcaatccttttccattggttcgtgcaattgtgcactttacttaagttactttactgcatgtgaggttgcttaaactagttggattactttggactaggaaagcagagtgtaagccgaagtcgtttgaatagagtaaatatttacagaatacgatgctcattttatttgaactgcttttgctcgaataaatgagatgaaatgcttaaacatggttcgcagctaatccaagttctttaaatattcttaggctgcactttggcgccgtctattacggtttcatggtcgttagtgaaattggtttaactagatcagtgagttgccaccaaagtgctaattgcactggtttcgggccttaaaagcctctttggccaagacaaacaagccgccgccagaagaaagtgagtgagttgaggtgtgaaaacgcatggctcagttcaccgctgattctcgaaccaaacggaagcaaaatgagactagaagttgcaatatacgcgttcctcagctgtatgcacttgtgctccgccgatggtcacctgaaacgcttgagcagatcactgatctttccgccaacgagtcccacgcgtgtgcagttcatcggtggcattggcattcccgtagagaacctgcactttgagtctgttacctcgggctatgtgctcaaggcggagtactttctgcccaccaactccacggagataacacgggtctacctcaagccgatggccataacgggcagggagaaggagtccccctatggagcattatatcgttggattatttaccgtggcatcgagatggtcatcgagaacatgggcttgcccggccgtagttgtctcctccggctgatttgtgagcatgccgcactgccgctgaaccacgaatccgggctgcttggtgagatcatgaacatagtgctgcggccctccagttcggtggaccagctgggacaaagctcggatcgggagtatcacacatcggagcactttggcaagaggggcggcgactgccaggcggcctatgccagcaggtgcaagaagtcgcccatggaactgattagcctgctgctggaagtcaatgaataaatacttaattcgcactgaacaaggctgtttcgtttcgaattgaattgaatgtcaggtcacaattgagtcacgtggtgccacaattagggtgtgacaattacaaagttgataaacattttaattagttttggcgcactggctgcgtgatctgcctgcgaatcaccatcaattgtaattagggacacgctgtctgacggggcgtatgcgtaatgtggaaaatcaacatgcaaacaggatcactagcgtacttaactcgcttaaatttaaatggcatgcacacacacagtttgcctgaattatgtgaagctcgaaatatacggccttctcattaagtaatccagaacacgtatgtgtaggacatctcctaatgagcttagtgaatttgaccatttcgcaatggaggatgggagagtatgggagagctgaaagatgggagctggacagccgtgaaataattacacaaacccacccacccatacagaacacaacattcaatgaaacgcgaccggaatcgggcaggcggaattgcccatccggcgattgctgctggcatttcaatgccagaatgtggaaatgagtttaatattaattaacagcacgtcaacgcgtccagcgggcggaaaacacagcacactaagccattgagtttgggtcattagtcgagcggtttggtgtttgttttaaaacatttgcccatcgggccctcgcatggctgaaactttgaaagttccccagggcgggtgccaaccatgaaaacaacaatatagaaataaaattctttgaaaacctttaggggcacgggggttggatccatttgtcttcaatttacaactgccttggggccagtatgtgtggtaaattatttagcaaatgcaaatgcaatttttcagatgggtgcggaccatatttagccccaggcatgggatgcccattcagagcgatcaatggatgttttccttatatctcgaaataataactgagtggccaggcaaacatgttt

SEQ ID NO: 35972 - DNA, 576 bp, DROSOPHILA
atgcacttgtgctccgccgatggtcacctgaaacgcttgagcagatcactgatctttccgccaacgagtcccacgcgtgtgcagttcatcggtggcattggcattcccgtagagaacctgcactttgagtctgttacctcgggctatgtgctcaaggcggagtactttctgcccaccaactccacggagataacacgggtctacctcaagccgatggccataacgggcagggagaaggagtccccctatggagcattatatcgttggattatttaccgtggcatcgagatggtcatcgagaacatgggcttgcccggccgtagttgtctcctccggctgatttgtgagcatgccgcactgccgctgaaccacgaatccgggctgcttggtgagatcatgaacatagtgctgcggccctccagttcggtggaccagctgggacaaagctcggatcgggagtatcacacatcggagcactttggcaagaggggcggcgactgccaggcggcctatgccagcaggtgcaagaagtcgcccatggaactgattagcctgctgctggaagtcaatgaataa

SEQ ID NO: 35973 - protein, 191 aa, DROSOPHILA
MHLCSADGHLKRLSRSLIFPPTSPTRVQFIGGIGIPVENLHFESVTSGYVLKAEYFLPTNSTEITRVYLKPMAITGREKESPYGALYRWIIYRGIEMVIENMGLPGRSCLLRLICEHAALPLNHESGLLGEIMNIVLRPSSSVDQLGQSSDREYHTSEHFGKRGGDCQAAYASRCKKSPMELISLLLEVNE

SEQ ID NO: 35974 - DNA, 516 bp, DROSOPHILA
tatatatgtatatacatttaagccatttttgcttgaaaaagtgcaaagtttatatttataggagccttacttttttgttgttctaaagtaatatagattaaaaatgtatataccattttgtaataaaggagatgccagcttatgagtgatgaaaatcgaaaaatatgtctcccccgggaaatatcatgtatagattctatactcacattgaagccgcgtccgatttcgacatccgcgtccacgggcaacgtaaaaagtcgcttggagacaacgaaactgtttgtccacgcgcaatcgacgtaaatcgatatgaaatcgccgttctgtatgtcagttgccattgtagtcctcgatgaatgtgtcgatgatatagcgcttcacctcgttgatggaggtgcgcttgttgctgcactgcagccgttcctgattttccggcagcacgagcagttgctgcagttcaccctgcgacgataaaaaataacagcaaaagttaatgcacacaacgtacgtaattgt

SEQ ID NO: 35975 - DNA, 1875 bp, DROSOPHILA
atgagaggcgatgacatctattcgcgggtgcactccgccacccctctgcccctgcccctacacctggtcctcctgctcttcctgctcgtgctgcagctcctggcaccggctgcagcgactcccgtgaatccctgtccccacaagggcatggccgaactgattcgcaacagtccggtaattgtcaaggccctcgtcgcacggatcttcgccgatgagccggagggaccggtgcagtccctcgcacaggacacgattttaataacattaacgccggaaacgatatacaagggtgcctcgctgctgaaagtggccaacggcaataccgatgccgggaatcccatgtcgccgagggtgggaggtctcatgtcctggagctcgggccatcgcagcagaggtggcagcgctggatccgcgggcagcggtggcacctggagtggcgctgagtcagcctttcagtacgaggggcagttgaatgcgaccctccagccactgcgttgtttcgataataacatgctgaaaatgctgccggcggagttaattgcctttggcaaactgctgcccgctgcgacggcatccaccggaggcagtccgcagaccgcacgacagcttcaacgaccgcccgtgggtggcgccaccgatgtgctgcaagtcagcgtcaacggtctgcatcgctggacgccgcagttcgagaatcatatctggaagcatttggttgcccaactgtccaaggagacggacgttttcggcgatggcaacaacgatctgctggcagatgaggatgagaacgagctgctcataatgcgagcaagtggcgacgagtcattgcataaatttgaccaggcaacgacgacgattacgccgcagaccagtgtccgtgcccatgcccatccgagcgccagtcccccggcacctgaccccatgggagagacaagcggcggtaatgaaccaccaagtgatgatgaaggagcaggcgttggaggagctggcgaaagtgtcaggtttgtgccgagtgcgcacaatgaccggtctggaaacgaagtgggagctggagcggcgactggctccagtgctgggaccaggaaggcacgtgccagcaatcagcacaagaaacgcaagcccaccaagagcgtggccctgtcgacgctcctctgcgagggctacaacatcgagcagcgcaactgcaacagtttcgagtgcagcgatgacataagcgatctgctaaagttctacaagaagctgccgatgggtgaggatttgccaactcaagcttcggatgcttcgcttgccccttcctacccggatgcatattcaaatttggacctcaccacggcgggtctgatgggcactgcattcagtccaacgccctcgacgccctacaacatgggctacattcgcagctggaggaacctccttaacttcacccttatggtcacattaagggctaagaacgacaccaagagcacggcgaccatattctccataagaaacgccactcacaatctttatctggaggcctgcaaggacggactgcgtttgtatttggagcgggacaatacgacggaaatgttgccggtgaaattcaatttatacgattatcgctggcatcaagtggccatcagcatacagaacggcgatttcatatcgatttacgtcgattgcgcgtggacaaacagtttcgttgtctccaagcgactttttacgttgcccgtggacgcggatgtcgaaatcggacgcggcttcaatggtgaactgcagcaactgctcgtgctgccggaaaatcaggaacggctgcagtgcagcaacaagcgcacctccatcaacgaggtgaagcgctatatcatcgacacattcatcgaggactacaatggcaactga

SEQ ID NO: 35976 - protein, 624 aa, DROSOPHILA
MRGDDIYSRVHSATPLPLPLHLVLLLFLLVLQLLAPAAATPVNPCPHKGMAELIRNSPVIVKALVARIFADEPEGPVQSLAQDTILITLTPETIYKGASLLKVANGNTDAGNPMSPRVGGLMSWSSGHRSRGGSAGSAGSGGTWSGAESAFQYEGQLNATLQPLRCFDNNMLKMLPAELIAFGKLLPAATASTGGSPQTARQLQRPPVGGATDVLQVSVNGLHRWTPQFENHIWKHLVAQLSKETDVFGDGNNDLLADEDENELLIMRASGDESLHKFDQATTTITPQTSVRAHAHPSASPPAPDPMGETSGGNEPPSDDEGAGVGGAGESVRFVPSAHNDRSGNEVGAGAATGSSAGTRKARASNQHKKRKPTKSVALSTLLCEGYNIEQRNCNSFECSDDISDLLKFYKKLPMGEDLPTQASDASLAPSYPDAYSNLDLTTAGLMGTAFSPTPSTPYNMGYIRSWRNLLNFTLMVTLRAKNDTKSTATIFSIRNATHNLYLEACKDGLRLYLERDNTTEMLPVKFNLYDYRWHQVAISIQNGDFISIYVDCAWTNSFVVSKRLFTLPVDADVEIGRGFNGELQQLLVLPENQERLQCSNKRTSINEVKRYIIDTFIEDYNGN

SEQ ID NO: 35977 - DNA, 3148 bp, DROSOPHILA
cgggaatgcgggagattcacgagcgttgctatacagatctattggatctatgtcgaaccattgccagccagcgaaacgttaccatggctagtatcatgaacattcaggccctgaagagcatggccgaaacactaccaatcaccgagaaggacatgtgcagcattccgcacgtgaccaaggcgaactttgataaatacggcgccaagctgctcgaaatcactagcaactatgcatcggagaagctgctgatgcaagccgtcctggacgaagaggaggaacaggcggccgccaagcagaggcccagtacatccggctggaataacgaaagcgtggactgggacatggcggttgcctcacagggcaatgcaaacacgagcggtgccagcggtttcaactcgtttagagcgggcaaaagaaaaaagatatacaagtcaggggccagcaagaggtacaaaacgagtactacatcgccagcggccaggaagacaacatcagccaggggtcgcggtggtagggctggcgccaaacgagcggagagttcagcttcgtcagcgtcgggctggaagtccaagaaaacagggaatagctttggcttcgatttaatgccactgccaggatcaaaataatttaatatgctttgacgttttgcctaagaaactacagtttttggatgttatagcgtatgaatgtaacataagctaaaagatttttgaaataagttgttaaaaaatttcaaatttctgtatgagcaatgtgctcagtttattaatgtttgtccgcttatgttccttattgtaaattaacaccttaaatttcagttaatagaattaagtacttatcactaaaaatttttacataaactttcatttcgttaaacaataatagcactatagatgcaacccccgcaaaaaaacaaaaacaatcagatgcagctgtggtcaacactgtacactggtgtaatctaagcctttcattagtactcagaaccatccattatcatctatgtcttggcggcttgtcgcaccttatcctcaaattcgtaggcacccatagaccagatcaggttggcgtccgtctccacctggacgaactcggtcgcataggtgtttgaggtgcttaccataccaccaaactccagctgtgcatgatctagaaatgaaagcattactgacagattcgtgaaatcagtattattttggtgtacgaacataggttccatttgagtcccgtggtagtgacattgtgggccgacgatcccacgggcatcagagagcaccatcgctggctggtgaccaggtcgacgggcacctgtatcgtgtgctttcccggccgcaataaccacgtcaccgaatccccgctcaacaggaagacattgcagttatccttttgcgatttgtacagcgtgtttaggttggccatgacctggtccaagcgaccggaagtgtcatgaaacaccaccacatcctggattttacgctgcgtcattacgggttgcagtacggccatggccttcgtgaaatctgttgcatcctggtcgggtgtgtggactttcggcgtggtcttgaagaaatcgaccgtttcctcagtgatcgagtcaaagtcacccgttatcacatcgagcggttcaagtggtgtcgtgggcgcggagccattggccttctttgacattgcctgagccacgacaaagtcacgccagtggttggagcctccatcgacagcacaccgaacggcggctaaaagagaccgcaagatgttagctggctaagattggttttataacagatccagacctaccgtttttccatagcagtttcaccacgtgcgccggcacttgaatctgccgattgagcaccacgcaaacgtgtccatggtcgcccagcttaaagttctcgttgatcaggttgcccggcgtccatttgtactctttgggcggtattgtgtggtccatttgctgccgaaatccgattgttgtttttgtgcaaaggaagcggtgggtggcggaatgggtggtgcgttggtgcgccggcctgccaactcgcgtgattcggatcaaaccgaatccgtggcgagagcggcgcatccaatttaaggcggaccctggagcgcctgccgccgtcattgtgcagccgcccgtcccatataatttaaccaaaatcatatattattgaaagaatacgcccggacagtccgctagtacgaagctctcactttgaatatttttaaaaattgttcgtttaaactggggcctctggtcacaccattcgtccgttagcgatgtggcgggaattttaaacaaacctgctaccacgaatactataatactactatttaaagtctctaaactgaaacttagcttgcatagcgaatatattatcgtagactgaataaagcagttgatatatttatattctaaagtacttaactttgcttgcaaatagatcgaattcctgtattcaattggcaactatttaagccaattattttgaccgcagcaagcttacatttgaattgaatgcccacattctggagcatgcagcttcgaccaaatacttatttttcattcaatagacaagttaatccttcggtaaacttctgtggcttaggttaatgaagccgccgtccggtttgatgaacagcggaaacaaaaagatggccaggggaaagagacggctggtcagcagacttatcggggggcggcatagtcgcagtcgcaccacaatacttttgtgcttgaacctccgatggcagctgtatcaatattgttacagttcattttgtttgacctacacaaataaaggcatttatacggatcctgtggccagaccatgaacacatcctcgccagcacccctggccatggcctttggtctgccccttttctggattcagattgacagtgggcgacgttccatgaacgcccattgttggacatccagttgcgaacgggtgaagttgaatggctttacatgccacgtctgaaatgcattgtccaagtcgcattgttgagccgaactattttatttcggttccgtatccaactcttaaagctatgctgtataaataggtagtatttcctgaagtagtaccacattaaactttcccaagcctttaaagtaaagcaattccaatgttctatgtaatttatgtat

SEQ ID NO: 35978 - DNA, 1028 bp, DROSOPHILA
ttaaattatatgggacgggcggctgcacaatgacggcggcaggcgctccagggtccgccttaaattggatgcgccgctctcgccacggattcggtttgatccgaatcacgcgagttggcaggccggcgcaccaacgcaccacccattccgccacccaccgcttcctttgcacaaaaacaacaatcggatttcggcagcaaatggaccacacaataccgcccaaagagtacaaatggacgccgggcaacctgatcaacgagaactttaagctgggcgaccatggacacgtttgcgtggtgctcaatcggcagattcaagtgccggcgcacgtggtgaaactgctatggaaaaacgccgccgttcggtgtgctgtcgatggaggctccaaccactggcgtgactttgtcgtggctcaggcaatgtcaaagaaggccaatggctccgcgcccacgacaccacttgaaccgctcgatgtgataacgggtgactttgactcgatcactgaggaaacggtcgatttcttcaagaccacgccgaaagtccacacacccgaccaggatgcaacagatttcacgaaggccatggccgtactgcaacccgtaatgacgcagcgtaaaatccaggatgtggtggtgtttcatgacacttccggtcgcttggaccaggtcatggccaacctaaacacgctgtacaaatcgcaaaaggataactgcaatgtcttcctgttgagcggggattcggtgacgtggttattgcggccgggaaagcacacgatacaggtgcccgtcgacctggtcaccagccagcgatggtgctctctgatgcccgtgggatcgtcggcccacaatgtcactaccacgggactcaaatggaacctatatcatgcacagctggagtttggtggtatggtaagcacctcaaacacctatgcgaccgagttcgtccaggtggagacggacgccaacctgatctggtctatgggtgcctacgaatttgaggataaggtgcgacaagccgccaagacatag

SEQ ID NO: 35979 - protein, 332 aa, DROSOPHILA
MTAAGAPGSALNWMRRSRHGFGLIRITRVGRPAHQRTTHSATHRFLCTKTTIGFRQQMDHTIPPKEYKWTPGNLINENFKLGDHGHVCVVLNRQIQVPAHVVKLLWKNAAVRCAVDGGSNHWRDFVVAQAMSKKANGSAPTTPLEPLDVITGDFDSITEETVDFFKTTPKVHTPDQDATDFTKAMAVLQPVMTQRKIQDVVVFHDTSGRLDQVMANLNTLYKSQKDNCNVFLLSGDSVTWLLRPGKHTIQVPVDLVTSQRWCSLMPVGSSAHNVTTTGLKWNLYHAQLEFGGMVSTSNTYATEFVQVETDANLIWSMGAYEFEDKVRQAAKT

SEQ ID NO: 35980 - DNA, 3955 bp, DROSOPHILA
tttgtcgcgtcgacatcgaaacacacatgcccaacgacgctcttccccccagctccagcggagtcccagatgccgccaattccgccgcattatgacattgtgtgcacggcatctttatgtaaatccctcagactgagtttgttctcggcatgcatcgatacaagaacaaagaatgaaatattcgtaaaaacccctatatacataccttaaaatgtttaacccaccgcaacgtatgtaaaaggcagttgccacagcttgctgccgtgttgcgctgaaagatatcaaaaagctaaatttgtttggctcaatttctatgtctaagtatattaagtgattcggcaaataatttcctatacatatgtacaaattgtctacgttttgtgaaacaaaattcttgtgataagaatttcataaatatgcgtatattgttatagtatagaattcccacgacgggcgtatatgataactttgaccccagcttgttgttatatttttaatgatcacacaaaataatataacatcggaccctaaacttaaccgattagaaatcgatttggcaatttgcatttttcttgagtaattatttgaaggacttaaaatctggacgatttcctctcattatttaacaaattttgttatgttttgattagtcacaaaaatgtagagaataatcttttattctattaccaaagaccctagaataattctattctattctagtgtctttgctattaccaaattatatatagtacatctatttaatttaatagattacggattattgctcaatatctcataacgtgccatatataagtgaattgattcgatgcaattttttaaatcttgagctaacatattttaaaaaggttggttttatattatagaaagtttcctaaaacttttaaaaattggctgtctaagacggcagaaatcaataaataatccaataaacgtctgttgatttttattccaccgataaaaatacgatacacctttatttctgtttggggtttacatattttattttaaatcagttctattatcaataacatttcattgtgaaactttgtgtaaaatcttcgtccaacatattagggattggggtagctactacgttttgacggtttcaaagaggttctatcttgatgggtcaattcattcatttactattaataaatctgtgaatatacactactgcataaaagtcattagattaagcattgcattaattcatgtaaacagaagtgtttgtagaatcgcctcacattgacccaccaactataaatcattgctagcaaatatatcgttctaggccatattactgggtccagcgcccggatcatcatcaccatccgcgttctctttggtcaagtcggaaaaaaagtcagatgcattgctgcattttgaggagggcagattgtgacgctgctccttgtaggcattgtgtttctcattgtacttgatatctccaaagtcctcgaaatactttacattccagaatcgcacgtcgttgttgtgcgaggatgatgcgatgagctcaccgctggcattcacgtctaacgattcgatgggcatgttatgctgtcccacaacgccgagattacgatacggagcgatgtgacaagctcgaatgtttccatcctctccggcgacgcaagcaatccggtctgtgatggggatcattagactaatggggctcttgatgcccggatacatgtcgcagtggtacccaaattggccccagttgtaggtgtacaagcgacccttggaggtaccaaccaccagcttggagtcaccgcggtagacccccatgcagttcagctcctcctcgtacggctccgattgcacgtacatcttccgtgcggatatattaaatgtagtcaggtagccatcggcactggtggccagcagaagcttgctttgctcgttagtcgtcagctgggtgatctgatcttccagttcttttagctcgaagatggcgttcttggtgcgcaaatcccacagcttgaccgtaccggcatcatcgcccgaggcaaagagattttcattcagaacgtgcagcgtgttgatggcatcatcgtgggccgtctcgtatagcttttttagtttctccgtttccatatcggtgaccatcacgcacttgtctttggagcaggtgagcaggaagcgcccatcctctgtgaactccacatcgcggcatgctttggaatgaacctcaatagtgcgcagcagcttgttagcctcgttgtcatactcgtacaaatgtacatccccgattattgtggccaaggcgatgatgtcgcgatccggatgaaagcagatatctgttataaagtcttccagcttaatctctggaggggaactgcgtggcttctttatggctgctatcatggcacgtacagtctcgtctgtttcgtcgtcctcgtccaagtcgaaggtggcttctggttgcttgttgctgcccgatggattatcgtcatccttgcgtttctttgcactcgttgctcctccggcggtgacaccacccgcctcgtcgagcattgaatcatctgaatcggagtccgctgcatttggatcgaaactgtcatcgctgctgctactatcgttgccttcgtaactaatgtcgccatcgttatccggcactggagcacccatgtctaccaggtcatattcgtcgttgtcgctgtccgactcgttcagcacctcctgttcgatttccgctattactcccaccaccatgtcctcgtccagatcatctagttcgtcttcgtcggagggggttttaaagttgttatgtctgcgaaacgtatgttcggaacatgtttaggattccaatccattgacccaatgcggtgcgtaataaactactcacgtgtgcataatattgcaagtccaagctccgaaaatatccgcttttatttaccacgtttggatattgtttggataccacgagaacaagaagaagcagaaagcatgtagccactcagctgttcgatatggttggccaaataactagttcttagctaaattcgcttttaaatgttttcctctgatacacaacaatatatcaatttacactttatattttcaatacaagtcatgcgatgcgctttcatcgctttacaattttttttcttttaatgatcttttaaaatattatcggattaaatatggtatatttgagtaggttactctgatgtttcagctatatgtgaagggtggaccgacggtcacactaattcctattcgcattgtttccattggcatattgcgcgggtttttagtccgaaagtgtataaaattgtattgcttacttatttgttaactagttgtatgcaaattaaagcgctgacatctgtttaaatcgctggtcgtgatgtccaagaagcctgtcgcgcaaagaaaacagctcacacttagcagcttcattggcctggatggcaattcccagagtcaacctaagagcagaggtatttggagcattttgaccaaattagggatgttaatagttgcatttcagccgcaagtgtcagaagcaagccccccgcagtctacaatcccatctttctggacgcgtcctcatccgacgatgaaactacggagatatccagtcaatccaacaatggcactattgctacgaagaagtccagcagagatcctagaaccgcaaagctcaaaaaacacacatacctcgatctgtcagtgtccccactagctaaactttctgccaagaaatatgccagagattcgcccaaaaagcccacatccctcgatctgtcagtgtccccactagctgaacttcttgccaaaaaatctgacagagattcgcccaaaaagccagtacagaatgagaatagttacacctatcggggattgtcggaatctcctgttgaaaataaatcaattggcgatacactaaggaaaccacctcaaaaagagaggaaaacatcaatag

SEQ ID NO: 35981 - DNA, 1880 bp, DROSOPHILA
ttctcgtggtatccaaacaatatccaaacgtggtaaataaaagcggatattttcggagcttggacttgcaatattatgcacacacataacaactttaaaaccccctccgacgaagacgaactagatgatctggacgaggacatggtggtgggagtaatagcggaaatcgaacaggaggtgctgaacgagtcggacagcgacaacgacgaatatgacctggtagacatgggtgctccagtgccggataacgatggcgacattagttacgaaggcaacgatagtagcagcagcgatgacagtttcgatccaaatgcagcggactccgattcagatgattcaatgctcgacgaggcgggtggtgtcaccgccggaggagcaacgagtgcaaagaaacgcaaggatgacgataatccatcgggcagcaacaagcaaccagaagccaccttcgacttggacgaggacgacgaaacagacgagactgtacgtgccatgatagcagccataaagaagccacgcagttcccctccagagattaagctggaagactttataacagatatctgctttcatccggatcgcgacatcatcgccttggccacaataatcggggatgtacatttgtacgagtatgacaacgaggctaacaagctgctgcgcactattgaggttcattccaaagcatgccgcgatgtggagttcacagaggatgggcgcttcctgctcacctgctccaaagacaagtgcgtgatggtcaccgatatggaaacggagaaactaaaaaagctatacgagacggcccacgatgatgccatcaacacgctgcacgttctgaatgaaaatctctttgcctcgggcgatgatgccggtacggtcaagctgtgggatttgcgcaccaagaacgccatcttcgagctaaaagaactggaagatcagatcacccagctgacgactaacgagcaaagcaagcttctgctggccaccagtgccgatggctacctgactacatttaatatatccgcacggaagatgtacgtgcaatcggagccgtacgaggaggagctgaactgcatgggggtctaccgcggtgactccaagctggtggttggtacctccaagggtcgcttgtacacctacaactggggccaatttgggtaccactgcgacatgtatccgggcatcaagagccccattagtctaatgatccccatcacagaccggattgcttgcgtcgccggagaggatggaaacattcgagcttgtcacatcgctccgtatcgtaatctcggcgttgtgggacagcataacatgcccatcgaatcgttagacgtgaatgccagcggtgagctcatcgcatcatcctcgcacaacaacgacgtgcgattctggaatgtaaagtatttcgaggactttggagatatcaagtacaatgagaaacacaatgcctacaaggagcagcgtcacaatctgccctcctcaaaatgcagcaatgcatctgactttttttccgacttgaccaaagagaacgcggatggtgatgatgatccgggcgctggacccagtaatatggcctagaacgatatatttgctagcaatgatttatagttggtgggtcaatgtgaggcgattctacaaacacttctgtttacatgaattaatgcaatgcttaatctaatgacttttatgcagtagtgtatattcacagatttattaatagtaaatgaatgaattgacccatcaagatagaacctctttgaaaccgtcaaaacgtagtagctaccccaatccctaatatgttggacgaagattttacacaaagtttcacaatgaaatgttattgataatagaactgatttaaaataaaatatgtaaaccccaaacag

SEQ ID NO: 35982 - protein, 476 aa, DROSOPHILA
MVVGVIAEIEQEVLNESDSDNDEYDLVDMGAPVPDNDGDISYEGNDSSSSDDSFDPNAADSDSDDSMLDEAGGVTAGGATSAKKRKDDDNPSGSNKQPEATFDLDEDDETDETVRAMIAAIKKPRSSPPEIKLEDFITDICFHPDRDIIALATIIGDVHLYEYDNEANKLLRTIEVHSKACRDVEFTEDGRFLLTCSKDKCVMVTDMETEKLKKLYETAHDDAINTLHVLNENLFASGDDAGTVKLWDLRTKNAIFELKELEDQITQLTTNEQSKLLLATSADGYLTTFNISARKMYVQSEPYEEELNCMGVYRGDSKLVVGTSKGRLYTYNWGQFGYHCDMYPGIKSPISLMIPITDRIACVAGEDGNIRACHIAPYRNLGVVGQHNMPIESLDVNASGELIASSSHNNDVRFWNVKYFEDFGDIKYNEKHNAYKEQRHNLPSSKCSNASDFFSDLTKENADGDDDPGAGPSNMA

SEQ ID NO: 35983 - DNA, 3803 bp, DROSOPHILA
ggcatcattggtaaatacatttattatggctttaggaactttgaagtaattgcttaacttctttttcagaactggctgaagtccaatctgtaactgccgcacaacctgcacaaattggcgccaagggcgtagatgaaaagggattttttgatgtgagtataatagacaaatacgagctcaataataactataatcattgttttttttttagcttaaaacatcaaagcgcatctataatttctacgcaatcaatgcaaatctggcacaggaatggatcgaaaaattgcaggcatgtttgcaatagacagacaatgcaaatcgacgcttttttcacaccctgaatttcgtaaaatttcctttctgtttggttcggcgatctgaagttttgttataggataaatcagtatgtttccagttttacgtattaatattttgaatctgtggcgctgccatcatatcatagctaaactatcactttagaattcccttagttgatttgagaaatcgctcgcacccattaacataaatgttagcaacaattatgccaagcaacaagcgaaactttagttaaacaatgaaatccatttgtaaatgtgaatgtaaagaaactataaaattatgtgattatataaacaaacaaaaatcagactatgataaatttacgataaaatggaaaagccacgcccgcaaattttttgatataattttttatatatatacatatatccttatgcctaaactatataggtttatagtgaatttaccaaagaatattccacctttgttgcgcaattgaaatgcatttcttgattgcttcctttaaactaaaccctattattaaacgctttcctttatttatacactacatggtaatcaatatataatacatactttaatgcaattatttgtggcttacaaacgataatatacatttttaaacaaatgcgcttggtattattattgtttacgctctattccttcggagaaacttttccatccatcataggaacgttgtccaatagacaatattgagtataaagaacgaaaacgggaagaaaaagcgcgagaatttgtctatataaatggctgtggcatggccatggcagaaagtgtcgtactggggctcaataatcgattcccgatgatgctgtagtgcagactaggaatcgtcagcttgggcgatatatcccatcatatttcttccaactcacctttaggtcgtccagatcactgatgttctcgtccgaataccccttcattgcctttgtggccaccggtcccataaaattgttgaccactgcaaattccatcagagaaaggaatacaaacaccgaacaggacgacatccagacgtctatagccttgacatacgaaaccggcggcagcgattgttgcgactgggtattctgggtggccagggttagcagtgaggtcactcccagagttacacgggcgggtatcgcttctggttttatccaaaacgatatccaagacatgaccacaatcagagccgaggggatgtaggtgtggaacaaatggtaacccaggcgtcggcgcaggttgaacacaatggccaggcaggtgaagttacctagagataaaataaatataaattatattgaaaaaaatggcttttaatagtttagtcttacctgttgagtactctatagtacagtcggttgtgtagttatttgatatgtctagctgcggcaactcaatctccgtgttaaccacaagtgggtcggtcatgttccaaatgaaaaccaaatcttccaccgtatgggatactgccaatcaaaactcggttcaacacagattatttgtaattcgagaagcggaatggaaagttccaagcgatacgggatttgcagggtgtagataaccattacatttccacctacaactctcgatcatcatggagcagatttgcgtgtcatgcggataggactcaaacttcatggcgcacgacaggaccaacgtgagtttggacatatagagcagcgttttgtcgtggtacagccagagatagtgattgggaatgctcatctcatggaaggtgacctttttggcgttcttaaagaagcaatcgggccgccaaatgctgtgcaaccagtcgacatccaatatgcgatactgctcactcatgttctcaggcaaccgcaggcgaggatcacgccagctttgtgcaaggaagatgtccgtcacataggtctaaaggagcatgataagccaattagtgtttgctgagtgatgagtattgaaaagatgaacacattctactgaccatagactcctcgttaatggagtccagggagaggaccgtgacatggaagtagactactgtgggctggccgaggagcttgggagcccggttcttgtcgtacgtctttgagggaatgggcaaaatgtccgggagcgaaagactcgactcgtagtgggagaccagctcggcgctctccgtgttatttctgcatatgtggaacagaacagccctgtggcgtaaatctgatgaaactgggcaaacgcactcggactcacctgtaaccatgaacacaatggcagtgctggatcgattgctccagcgcgtgcaaatatattgccaacgcaatcaggcacctgaattctaccaatttgctagttgggctttgcattatgaacacactaccttcggctttgatattgttcctctggcactcattgctccgcagtccatgtcaattcccaaagtagctcatctctgggtgcgcttgagaatgaacttgctcggaggattagtaagcgaggaattatattttactcgtcgcgcagcaaaaaccaataaagaaacggcagagttatcgcgacgattgtgatgtgctgcaaagtgtgataaattgatttctaaggtttcattcgctttcattggcattcgcccacactacactacttttcaaattgacaactgaccccggttagcgaaatggcaaagaggaaatgatgttcgcacccactgacaagggcattaatttaaatgtccactctgtatttgcgaataatatctgtgaaatatgaaaaaccgtttgactgcgcgaaacaagcgaactgggcgccaactgtcgatgtcaaaaatgggtttatcggcatgttccggcatttgctttcgaagtacgttttcacaaactgttctgggtttgctcttaactttaaatcccaattttcttgaaatgcaaatacgtgctctacaatattttaaataaaagccgaatacaaacttgtcttaaaattgaattaactcttcaggaacattttacataatgtgttaaataattgttgaattttaaaatttacaaaaatattatttgaaaaccggaacttcccgttgctgtaacaggccgcgttgccaacctcttctcttatctggcagctctggcgcgcaatcagctgttcgcggaactggcaactctatgaggtcaaaatattgattgtttcacttgccaagacgtttttttttggcaattctaaaatgtacaagtggcgataaatctgcacataaaactcttaaagcaagcgtaaaaggaaacgtaaaccacccagatcgacagtaacatggaatcctgcgatacaatcgcaggtgagtgacagaagcagcggtgtgtgaatttaatcccggtgcgattttcaagggggtgctgggtcaggggtcattttcctttgtgcactggcgcgatttgctgcggcgcattgtgcaacttgtggatattgattaatagcaagaacgccgagatacacaaataatggtttaccgacttttacaattttccgta

SEQ ID NO: 35984 - DNA, 1433 bp, DROSOPHILA
cgacgagtaaaatataattcctcgcttactaatcctccgagcaagttcattctcaagcgcacccagagatgagctactttgggaattgacatggactgcggagcaatgagtgccagaggaacaatatcaaagccgaaggtagtgtgttcataatgcaaagcccaactagcaaattggtagaattcaggtgcctgattgcgttggcaatatatttgcacgcgctggagcaatcgatccagcactgccattgtgttcatggttacagaaataacacggagagcgccgagctggtctcccactacgagtcgagtctttcgctcccggacattttgcccattccctcaaagacgtacgacaagaaccgggctcccaagctcctcggccagcccacagtagtctacttccatgtcacggtcctctccctggactccattaacgaggagtctatgacctatgtgacggacatcttccttgcacaaagctggcgtgatcctcgcctgcggttgcctgagaacatgagtgagcagtatcgcatattggatgtcgactggttgcacagcatttggcggcccgattgcttctttaagaacgccaaaaaggtcaccttccatgagatgagcattcccaatcactatctctggctgtaccacgacaaaacgctgctctatatgtccaaactcacgttggtcctgtcgtgcgccatgaagtttgagtcctatccgcatgacacgcaaatctgctccatgatgatcgagagtttatcccatacggtggaagatttggttttcatttggaacatgaccgacccacttgtggttaacacggagattgagttgccgcagctagacatatcaaataactacacaaccgactgtactatagagtactcaacaggtaacttcacctgcctggccattgtgttcaacctgcgccgacgcctgggttaccatttgttccacacctacatcccctcggctctgattgtggtcatgtcttggatatcgttttggataaaaccagaagcgatacccgcccgtgtaactctgggagtgacctcactgctaaccctggccacccagaatacccagtcgcaacaatcgctgccgccggtttcgtatgtcaaggctatagacgtctggatgtcgtcctgttcggtgtttgtattcctttctctgatggaatttgcagtggtcaacaattttatgggaccggtggccacaaaggcaatgaaggggtattcggacgagaacatcagtgatctggacgacctaaagtctgcactacagcatcatcgggaatcgattattgagccccagtacgacactttctgccatggccatgccacagccatttatatagacaaattctcgcgctttttcttcccgttttcgttctttatactcaatattgtctattggacaacgttcctatga

SEQ ID NO: 35985 - protein, 426 aa, DROSOPHILA
MQSPTSKLVEFRCLIALAIYLHALEQSIQHCHCVHGYRNNTESAELVSHYESSLSLPDILPIPSKTYDKNRAPKLLGQPTVVYFHVTVLSLDSINEESMTYVTDIFLAQSWRDPRLRLPENMSEQYRILDVDWLHSIWRPDCFFKNAKKVTFHEMSIPNHYLWLYHDKTLLYMSKLTLVLSCAMKFESYPHDTQICSMMIESLSHTVEDLVFIWNMTDPLVVNTEIELPQLDISNNYTTDCTIEYSTGNFTCLAIVFNLRRRLGYHLFHTYIPSALIVVMSWISFWIKPEAIPARVTLGVTSLLTLATQNTQSQQSLPPVSYVKAIDVWMSSCSVFVFLSLMEFAVVNNFMGPVATKAMKGYSDENISDLDDLKSALQHHRESIIEPQYDTFCHGHATAIYIDKFSRFFFPFSFFILNIVYWTTFL

SEQ ID NO: 35986 - DNA, 2684 bp, DROSOPHILA
cccgctttgttcccctaaaattggtaagaaccacaatagaaaaaaaaaatatatccctctttttaacatgtctaacttctagcgcaagacagagggaccaataagctctgccgattgggtgctagatgacgctgagttcgagagtctgttcaactctaaaacaaagatgattatcctaaacacgccccacaaccctattggaaaggtcttcaaccggaaagagctagagaggatagccgagctctgccgcaagtggaatgtgctgtgcgtctcggacgaggtgtatgagtggttggtgttcgacggagccgagcacatccgtatctgcacgctgccgggcatgtgggatcgcaccattactctgggatcagcgggcaagaccttctcagtaactggttggaaaataggctgggcctacggacccgctgaactgattcgaaacctgcagatggtgcatcagaactctgtgtacacctgtccaacgccgctccaggagggcgtcgcacgcagtttcgaggtagaactggcccgtttgggtcagccggagagctacttccttagcctgccgcgcgagctgaagcagaagcgtgacttcatggccaagttcctgtccgaatccggtatgcgtcccaccattcctgagggtggctactttatgctggcagactggtcaccactggcgggcaagattgatctaagctctgagccagacaagcatcgggattacaagtttaccaagtggatgaccaagaacatgggcttgcagggcataccgccaagtgccttctacagcgaacccaacaaacatctgggggaggactttgtgcgctactgcttcatcaagaagcaagagaacctggataaggcggccgaactgctgtccaaatggaaatagtcgccggacaataaacgaattgctatcagccgctttgtttatctctgcccgaatgcagttccctaacctgggtgttacgtaaccaacagggaaaacaaccttgtgctggtgtggtagccttactgcaatctccatttattagcaatccaacaacatgttcatccgcaccatacattggatagtaggtagctagtgtcgctgtaacgtgtatattgtgttctgtgtttttaaactagtgttctccgcttaggcatcgtacacggacttcagggccaattcgggcttgtcgtagcccagttcctcgatggttgggatgcccagctcctgcagtgtgggggtgatcttctccagcaagtagggatagagggtggccttttggtcgccgcacttgtccttgcatccctccagccacctgatggccagtgcaatgtcgttgacgcgacggctggcacgcagaccggcctcgatgatcttggggctgggcaccagatccatgcccagcagatcgttcatgcccttgcggatctcccagccatcgatgccctcacggctgaagtacttctcgtagcgcttgtcgaactcctccgccgattcctcggttccgtgcagacagcgcacggcggccacgcgcgacgatgtgccgacgaggctgctgcggagggcgcttgccaggttacgggccgtgatgctcaacatgctgccgttaaaaacagtaaaatgcttgttaattgcaaaaatttggttaagtaacagctcgactcacttttcttgttcttgctacttttcacacgggtatgacagatctgagtgatggttggcaacactggcttttccagggatggacacgtttataactgtcgctgtcacggaacagtgagatatttaaaatgtttctgcttcagtatatttcaaattcgggtaagatcacagttagtttatcattttccttatatttaatttcttctatcttgcccaaaaaaagcaaaaaaaaaatcaaaatcaaaccttgtttctttttcaacggtccacattgatgctggctactgccaggcggtattttttgatgatttaattgcggtcacactgcatcttcaacttgacgcgtgctatttgattaatctctctgaaaaataagtcaaattaaccgataaagtttaaaaaaaggcgatattggaagttgaaacagagcagaatacggttagttctctgttccgccaccaggtgtgacatttagaagcgtttatattgtgtacgagacttgcaaaatgtcataagcaattaggggtgacaagaaatcaaaatggcgtacgcggtgcaaaaaagaatcgcaccaaacaagcgtcgctgctgagtggagaatcactagctcaaaaaatcgcattttcagccagtaaaaaacaattaaaactagttaaccagtgactaatcgttgtaacaccatttgcaggtagagatctggtgaaaaatgtccaacgcagacgtgcaatttaactacggccagcagggaaatggcgacaacttcaacgacgacagcaaccagcagcaggatgaggatgaccagtacaacgaagatggcggcggcaagatcgaaaacgtcggcgagagccccaaattcgttcggttgcgcggcctgccctggtccgcaacgcacaaggagatactcgactttctggaaaacgtgaatgtgactaatggctcggcgggcattcacctggtcaccagtcgggtcgacggcaagaacaccggcgaggcgtacgtggaggtggccagccaggaggacgtcgaagag

SEQ ID NO: 35987 - DNA, 618 bp, DROSOPHILA
tgtgaaaagtagcaagaacaagaaaacatgttgagcatcacggcccgtaacctggcaagcgccctccgcagcagcctcgtcggcacatcgtcgcgcgtggccgccgtgcgctgtctgcacggaaccgaggaatcggcggaggagttcgacaagcgctacgagaagtacttcagccgtgagggcatcgatggctgggagatccgcaagggcatgaacgatctgctgggcatggatctggtgcccagccccaagatcatcgaggccggtctgcgtgccagccgtcgcgtcaacgacattgcactggccatcaggtggctggagggatgcaaggacaagtgcggcgaccaaaaggccaccctctatccctacttgctggagaagatcacccccacactgcaggagctgggcatcccaaccatcgaggaactgggctacgacaagcccgaattggccctgaagtccgtgtacgatgcctaagcggagaacactagtttaaaaacacagaacacaatatacacgttacagcgacactagctacctactatccaatgtatggtgcggatgaacatgttgttggattgctaataaatggagattgcagtaaggctaccacaccag

SEQ ID NO: 35988 - protein, 149 aa, DROSOPHILA
MLSITARNLASALRSSLVGTSSRVAAVRCLHGTEESAEEFDKRYEKYFSREGIDGWEIRKGMNDLLGMDLVPSPKIIEAGLRASRRVNDIALAIRWLEGCKDKCGDQKATLYPYLLEKITPTLQELGIPTIEELGYDKPELALKSVYDA

SEQ ID NO: 35989 - DNA, 2322 bp, DROSOPHILA
tctatttattatatgtattaaataatttgaaaaactaattaaacgatcaacttataggtaaaatacccatctaaactaccgataaaggtaaccatgagagattggatgaaaacgagtgccattagccctctaacgaaatataaaaactaaaaaccatctaaaccataagcgaggaaaaggggtgcgaatacctcccaaccgatatacccagcgtgcctctgggcactgtcactgtcatttgcgtcgcagcgctgccgccgtccgcgtccgcgtcgctttgcctggcccagtgtttccgctttctttcgcctcgttgtaatgttacttttagtttgatgtcggagcctcgacgagccggtcgtaagcgaaatcgtaagcgagactttagtgcgattccgctccgttccgccggttgtgtgtgcgtgcttagttcgagctgaggcgaagcagaagcagaatcggaatcagaatccagcggaatcgagaatcaaaatcgaaaccgaaagtggttctccgcgtgtgcgagctagtgtgtgtgtgtgtgtacgtgttgtgtttgggcccgcttttctgcttttctacccccgaaaaagcaaagcacagcataaaactgtgcgctcgtaagcgcgtacgtgtgtctatgtgcctctgtgtgagtgctagtgtatgagtgcgaccaggggaaaggaggcaaagaaaagaaaaccaacccccaccagcgacggcggagaacaggaaaacaacaacagaaggcacacaaccagcgcaccaccaccatcattaccattaccgccaccacccactacaacacttcgtcatcgtttcgcgttgtgcagaaaataattacaaaaaagaaaagaaatagaattgcaagtaatattagcgaccgatcgagttttagtgctaaagcgattcgaaagattgtcttgcttaaaccaaaagggcccctcgaggccctagaactactatccattaccccgccgatcatcccgatcctgacatgatgaacttctccgcgttcggcggccccttctccggcatccaccaatttgccgctaaattcgacgcccagacgccgggcgccttcggcacgccccccgcggctgccgcgaatgcagcagccgcagcggcagcggccggcaccgataaccatgtgcagcgatatcagaccaatggcaatcactttaatcagaatgtgcccaacggtaagtgcatctgccccaccactacactatactatacaacatttacaatgtggctacacatacggacagacaatcgcctgcaatgcacatgcaggcacatgtgtctgtataacataatcactaaaaatttattttatttttatcgatttattttcgcccgctgcgggcagcgacgccggcgtcaaagcgtcagggggtatacactctcactcgagcagcgacagtggcggtggtggtggggagacagagtcgttgacagaggcagtggcagagggggtcggctactgcctcgcctaatgccctacacacagagggtcttgttttggggcaaagggcactactcttgttggaatggcaacttctggatagccttctttttcaaaaataaactaaacgggctgctgatagtcatcaaaaactaacgggtacttcttgcaataacttatgattaagatcatcataaatgagaatagtaaaacgtaaaaaatatacaacctctaatttcggtgaataacacctcttgattgtccaattggttcatattttagtattcatgacggcaggaaaaagcaagtagagtaagcaaaaatatttaaatgaaattaatacaaattgcttatagctgtattattttacaataatattctggagttcacgaacaaagaggtttattgatctcaacataaagtttgatttgaccttctgtttagcatactttgcttcaaacaaatcgtaggaccttatgacaatcctatgaataattctcaatagtttcaattctctgaagcttagttaaaatttcgtttccaatactcagctaaaaaaaaagtcccacttgaaactcgaacaatactttccttgaattcccagcgaaaggtggcttccatctggatctacttactgacattcgcataaagacatgtgtgagtgtaagcgggttttccacccccatctacgaaattctcgctttctggctagcaaagacatcttcttcaggcaatttgtaaaccgcactacaattttttgggggttggttggcgggttggagcgacttagtacgagtacgagtataccctgtcatcaaagcagaatttaacgattttttcgtcgttgtttt

SEQ ID NO: 35990 - DNA, 228 bp, DROSOPHILA
atgatgaacttctccgcgttcggcggccccttctccggcatccaccaatttgccgctaaattcgacgcccagacgccgggcgccttcggcacgccccccgcggctgccgcgaatgcagcagccgcagcggcagcggccggcaccgataaccatgtgcagcgatatcagaccaatggcaatcactttaatcagaatgtgcccaacggcacatgtgtctgtataacataa

SEQ ID NO: 35991 - protein, 75 aa, DROSOPHILA
MMNFSAFGGPFSGIHQFAAKFDAQTPGAFGTPPAAAANAAAAAAAAGTDNHVQRYQTNGNHFNQNVPNGTCVCIT

SEQ ID NO: 35992 - DNA, 7195 bp, DROSOPHILA
agcatgataagccaattagtgtttgctgagtgatgagtattgaaaagatgaacacattctactgaccatagactcctcgttaatggagtccagggagaggaccgtgacatggaagtagactactgtgggctggccgaggagcttgggagcccggttcttgtcgtacgtctttgagggaatgggcaaaatgtccgggagcgaaagactcgactcgtagtgggagaccagctcggcgctctccgtgttatttctgcatatgtggaacagaacagccctgtggcgtaaatctgatgaaactgggcaaacgcactcggactcacctgtaaccatgaacacaatggcagtgctggatcgattgctccagcgcgtgcaaatatattgccaacgcaatcaggcacctgaattctaccaatttgctagttgggctttgcattatgaacacactaccttcggctttgatattgttcctctggcactcattgctccgcagtccatgtcaattcccaaagtagctcatctctgggtgcgcttgagaatgaacttgctcggaggattagtaagcgaggaattatattttactcgtcgcgcagcaaaaaccaataaagaaacggcagagttatcgcgacgattgtgatgtgctgcaaagtgtgataaattgatttctaaggtttcattcgctttcattggcattcgcccacactacactacttttcaaattgacaactgaccccggttagcgaaatggcaaagaggaaatgatgttcgcacccactgacaagggcattaatttaaatgtccactctgtatttgcgaataatatctgtgaaatatgaaaaaccgtttgactgcgcgaaacaagcgaactgggcgccaactgtcgatgtcaaaaatgggtttatcggcatgttccggcatttgctttcgaagtacgttttcacaaactgttctgggtttgctcttaactttaaatcccaattttcttgaaatgcaaatacgtgctctacaatattttaaataaaagccgaatacaaacttgtcttaaaattgaattaactcttcaggaacattttacataatgtgttaaataattgttgaattttaaaatttacaaaaatattatttgaaaaccggaacttcccgttgctgtaacaggccgcgttgccaacctcttctcttatctggcagctctggcgcgcaatcagctgttcgcggaactggcaactctatgaggtcaaaatattgattgtttcacttgccaagacgtttttttttggcaattctaaaatgtacaagtggcgataaatctgcacataaaactcttaaagcaagcgtaaaaggaaacgtaaaccacccagatcgacagtaacatggaatcctgcgatacaatcgcaggtgagtgacagaagcagcggtgtgtgaatttaatcccggtgcgattttcaagggggtgctgggtcaggggtcattttcctttgtgcactggcgcgatttgctgcggcgcattgtgcaacttgtggatattgattaatagcaagaacgccgagatacacaaataatggtttaccgacttttacaattttccgtaggttaatagacgaaaatcactgcgtagataactcttgacaagtgcgaaaatcgaaacgaccatggaatcacctctgttgcccaaggccaacaacaatttgggcatggacaagatgagctccagcttgaacagcagcaccatggaggacaccacgcccagcgattcgggagtacaactcctggactcggaaaacagcgatgtgatggtggagtccatttgctcctacgaggaaaacgttagaccgatgcccctccctttggtggatcccaactccaatgtgactgcagcgccggatgagtctatgaccattagcgagtgctctacgttcgacaccacggagaagattgtataccgtcgcaaagtgcacaaagcttcgtccgcctccaaaactcccaaaaagcgagtgtccttccacgaggacatactgaagaacactcgtaccgacaacattcacattgagcatggctttatcacctacaagaacggacgcaagttggccttcgctaactcagcgggcgtggccggcgctccaggacgatattcctggtgtccggatcgggaacgtccggagggacctaatgaactcagtgccgctggcagggaagacgatggcgaggaggctaccggtggcggaggtgccaggcgaaagagacatctggtctaccgaaatgcctgctcggatgtgctggactacgacaacatttttgacacggacgaggcgcccggtctgcactatgacacctcaggtgtctttgagtacggccctgcgacccaaaaacaggaagagcaaccccaactttacaagtgcgtgtgcagcagttccaactccagtttggattccgacgaacaagacaaaaattccaatgcgaattgtaagcagtacgagcaggctaagagcagctcatgtgattgcattggtatgagcaatgctaacaacaatctaatcggtaagctatataacattctgcttaaatccttgtgatgtatatccacattaatctttatcccacaattaggtgacaattgctactattcagagcccaatatcggagatgctgacagtcccaaagtcaagtccgtatggaataaggagaagaagccgaaatcaagctgcttaaagaaaactaagctacatacaaatgtcatactcgagcaggatctcaatgggcgggtaaaaaagtttaacgtgcacgacattaagcaccaactgctcgacaacagtagcaagatgatatttggatcgctaaagagcatctttaccatgccattgccggagcgcggagttcccgagggctccgaagacctgcaggcggtggtggaatgcgtccctgagctggaacagacaccagagcacaaatcgcggccggcggccgagtcaccgcctcttagagctaagccattcctcagcaagagtctcgacggcagcaagcaggcacaaccagttaagaaattcgtgcacaacgttgatgagcaattgcggcataagaacgaagacgatggtgccagctccacggaagcctcgccgatggagtcaaaacagtcactgatgttgcatcgccaagaggaattcgataaggaaacagtgccaatgggcagcgcacagggcgagttccgcagcaagtttataattaattgtgagagcactgttttcgaacacaccggagtatcctacgagacgggggatctgcaatccgaactctcatccggtattcagcacaccagtgtagccagtctgctcgagcaaaacactcccatcgcagagccggccgctagtcaaattaagaaatcatttttggatgctcccattgccaagacgtttagtaatttctttcgaagcttcaaagacagcacaccagttgcaaaggacgagcaagcagtcacagataactattttggtgagcaaataatattcatttgaattaatattttccccgatgactaacactgttcattatgcttatatagcttcaaaaatcgctaagccgcagcaacaagcaccagccgcgggcaaacttcagcgcaacttttcctcatcaaccatatccgaacctagttcgaacaccaacaccagcagcaaccatcaaatcgcaatgaatccgcagctgggcaacgcggagcgtcagtctcgacaccttccttcaccgctcaagaagcgtggacaacccttacagccgccccgttactacgaccaacagcatcctcaccaaagtcggagcctccacagccccagtgcctacctagccgctggacgcggaggaccaggaggtagtggtcgcgactcaaagagcactattctcagcgaagagtttgacgacatactaactataaccactacagatacaactaatgcgcgctcaatggacagcgatttggtcatcgtagactacacagatgtggactatgctcacttactgaagccgccagctccggcggccaaaacttcacttataaataggttccttcgtaatgtcacacagaagaaaataatggaaacctccatacgcaagaacaatttctttgccgataaattgagaaccgaacagaggcatgccggatccgatctgtatgtgaagggtgctcggccaaagaactacgagcttatagatgacttaaatgcagagattgccatggagattgagatgtgtggcacgaattcgccgcgacgggaacttgccattagtttggataacgatttccaaggcaacttgtccaatttcgaacttggcattggggagatctcaattgatgtattcaaaggaaagtccttgttcaatctgaaacaatcaaatgagcagctaatgaaggtagattgtaattgtgtagcaaatagcaatcaattataaaaacttatcatttcaggctttcaaactgtatacaggctacaatgtagatggcatcatgacacctgtacttgtcctactcactgataaaactctgtatgtggtgaatatggaaggaaatagtctgtgtgtcaagtttgttttggcctacaaggacttggatgtcatactggtaaatgttaacggatgacattgctgtgatatattagttaatgcaacatcattttttagatgggaccttttggcaacacagttttgctcagcaacagtaatcgagacatgcagcaggtcctgctcgcgggtggtccgtatccagccggatccctggtagccaacctggagttgtgtgcccgacgcagtggatccactctgcctgcagttggtcagctgactctagaacatttggctccactgcaggcttttgtgcgtgccaacagctgtgttggcgtagcagaacattggatgctctatgcagtggttaatgtgccagctggagggtcaatgagagtcgaatcgccaagcgaactgctgggaccttcaatgaagggattcctcatgcatcgaagacttaggcagacgatcagcacttcagcagcgaacagaatattttggcaaccaggatactttttactgaagttcgtaactctcgatatttgaaggaattcaatttaatatgtgttcatttcttagagctggcgtattgtatatgttcaacgattccacccaaaggcttcccagctgggccatggccctcgccgagtgtcagggcgcccggcgaactgtgaaatcagagcgcccccactgcttcgagattacgctaaagggcgaagtcctgcaaatggctgcgcccgacgagtatgtagcctccgagtggctccaggctcttttgcaatcagccagtggcgtaagtagacaattaatattagaagatttgttttaactttttgttgtgtttagcttgtggttcaagaggagaagcacaaaacccttggatgcacgttgatcgtcacggataaccatttaataaccctgcgtgaagacttttcggctcctctacgaaaaataagccagcaggcggataacaatgcagccgttcagggaaataaagaaaccatgcttgaggaggatatgctcagtgtttttgaaaccagtagcttagtaagtgcgcttattgtattagcaaatcaaacttcgtaatcatttggacttaaaattttagatgggttccaccattagtactcctacccgtggcactcaacattcatattcctcgttaagctctacgcctactaagcaaacaaacgaagatgcagctccgaaagaaactgtagcttcgccggaaaaatcacaaagaatgaccagtgtttacggaaagaactccggtttagccatactaacttgtgcggacatcaaagagatgactggcattaagataacctcgcggagcgagacttggtggtgcattctggagttctcctgccaggaggcaccattggaaaaccaggacgatttggttatattctttgccagcagcatggaaatgcaacgtttcctgcggttgctagagcagctttggcagtctaagaatgtatgtttctcgttgactactaaacctttccttagcaataacgaaatattctaattttacagaacgatctatttccaataaccatactagacgacggtgactctctggccgagcaatataataaactttatatggacacaaatagggcctgggagcctttgctatcagctgcgctgggttaacgtggctctggccatatatactccatttacaaatagaaaattatatttccatatacattactcaagcgttaaatattctatcctgaatactcaaatagctaaagaacaaaaagtattgatatttatatagtctgtatgtattatgtattatgattttgtaatgcgtgcctccgcttgactcattcattcgtttgcgcttagtaacatctcatttgaataatttttgtgatattaaacttaaagtcgctgatctttggtatgctcttttgtaggatatttagtttctattgattttctacattcgttatttcttaccttttataaatacattgtgtacaaatattgcacagataataagaaacaaaatattatacataatctaacttatacgaatattggacatgtaatcaatcggtaatgttatgttttgggggtgctcttttggtccaaggatcatatccatatgatatacgacaaacaatatgtggctatttataaaataaacaaaacaaacatttataaatgtgtattaggaaaagtgtgcatggtggacttaatcttattttgcaatgctgtgcctctccttttcaattagcatagattaaattcccctcccaacgcccgacatttcgctgtaagcctttcagcccactaaaagctcatgataattaataaaaccaataaacgccattacaaaacgaatttttatttattctgagctcgctgatggtccttgacattttcaataattgcaagtggtgaaagggtttacagaggaaagggttttctgggctctaagtcgggtttatgctgtgtgggaccctatattccgaatgagtgtgggggagatggagtgggggtctggagaggatgctgaataaggaaacaagttacatacaaataacctaacatcaacatacattgtgtacatgtgcacaactatgtacatacatatgtatatgtacatcggtatatcgaagtatctgcaggtacattctgt

SEQ ID NO: 35993 - DNA, 4517 bp, DROSOPHILA
ctacaatattttaaataaaagccgaatacaaacttgtcttaaaattgaattaactcttcaggaacattttacataatgtgttaaataattgttgaattttaaaatttacaaaaatattatttgaaaaccggaacttcccgttgctgtaacaggccgcgttgccaacctcttctcttatctggcagctctggcgcgcaatcagctgttcgcggaactggcaactctatgaggtcaaaatattgattgtttcacttgccaagacgtttttttttggcaattctaaaatgtacaagtggcgataaatctgcacataaaactcttaaagcaagcgtaaaaggaaacgtaaaccacccagatcgacagtaacatggaatcctgcgatacaatcgcaggttaatagacgaaaatcactgcgtagataactcttgacaagtgcgaaaatcgaaacgaccatggaatcacctctgttgcccaaggccaacaacaatttgggcatggacaagatgagctccagcttgaacagcagcaccatggaggacaccacgcccagcgattcgggagtacaactcctggactcggaaaacagcgatgtgatggtggagtccatttgctcctacgaggaaaacgttagaccgatgcccctccctttggtggatcccaactccaatgtgactgcagcgccggatgagtctatgaccattagcgagtgctctacgttcgacaccacggagaagattgtataccgtcgcaaagtgcacaaagcttcgtccgcctccaaaactcccaaaaagcgagtgtccttccacgaggacatactgaagaacactcgtaccgacaacattcacattgagcatggctttatcacctacaagaacggacgcaagttggccttcgctaactcagcgggcgtggccggcgctccaggacgatattcctggtgtccggatcgggaacgtccggagggacctaatgaactcagtgccgctggcagggaagacgatggcgaggaggctaccggtggcggaggtgccaggcgaaagagacatctggtctaccgaaatgcctgctcggatgtgctggactacgacaacatttttgacacggacgaggcgcccggtctgcactatgacacctcaggtgtctttgagtacggccctgcgacccaaaaacaggaagagcaaccccaactttacaagtgcgtgtgcagcagttccaactccagtttggattccgacgaacaagacaaaaattccaatgcgaattgtaagcagtacgagcaggctaagagcagctcatgtgattgcattggtatgagcaatgctaacaacaatctaatcggtgacaattgctactattcagagcccaatatcggagatgctgacagtcccaaagtcaagtccgtatggaataaggagaagaagccgaaatcaagctgcttaaagaaaactaagctacatacaaatgtcatactcgagcaggatctcaatgggcgggtaaaaaagtttaacgtgcacgacattaagcaccaactgctcgacaacagtagcaagatgatatttggatcgctaaagagcatctttaccatgccattgccggagcgcggagttcccgagggctccgaagacctgcaggcggtggtggaatgcgtccctgagctggaacagacaccagagcacaaatcgcggccggcggccgagtcaccgcctcttagagctaagccattcctcagcaagagtctcgacggcagcaagcaggcacaaccagttaagaaattcgtgcacaacgttgatgagcaattgcggcataagaacgaagacgatggtgccagctccacggaagcctcgccgatggagtcaaaacagtcactgatgttgcatcgccaagaggaattcgataaggaaacagtgccaatgggcagcgcacagggcgagttccgcagcaagtttataattaattgtgagagcactgttttcgaacacaccggagtatcctacgagacgggggatctgcaatccgaactctcatccggtattcagcacaccagtgtagccagtctgctcgagcaaaacactcccatcgcagagccggccgctagtcaaattaagaaatcatttttggatgctcccattgccaagacgtttagtaatttctttcgaagcttcaaagacagcacaccagttgcaaaggacgagcaagcagtcacagataactattttgcttcaaaaatcgctaagccgcagcaacaagcaccagccgcgggcaaacttcagcgcaacttttcctcatcaaccatatccgaacctagttcgaacaccaacaccagcagcaaccatcaaatcgcaatgaatccgcagctgggcaacgcggagcgtcagtctcgacaccttccttcaccgctcaagaagcgtggacaacccttacagccgccccgttactacgaccaacagcatcctcaccaaagtcggagcctccacagccccagtgcctacctagccgctggacgcggaggaccaggaggtagtggtcgcgactcaaagagcactattctcagcgaagagtttgacgacatactaactataaccactacagatacaactaatgcgcgctcaatggacagcgatttggtcatcgtagactacacagatgtggactatgctcacttactgaagccgccagctccggcggccaaaacttcacttataaataggttccttcgtaatgtcacacagaagaaaataatggaaacctccatacgcaagaacaatttctttgccgataaattgagaaccgaacagaggcatgccggatccgatctgtatgtgaagggtgctcggccaaagaactacgagcttatagatgacttaaatgcagagattgccatggagattgagatgtgtggcacgaattcgccgcgacgggaacttgccattagtttggataacgatttccaaggcaacttgtccaatttcgaacttggcattggggagatctcaattgatgtattcaaaggaaagtccttgttcaatctgaaacaatcaaatgagcagctaatgaaggctttcaaactgtatacaggctacaatgtagatggcatcatgacacctgtacttgtcctactcactgataaaactctgtatgtggtgaatatggaaggaaatagtctgtgtgtcaagtttgttttggcctacaaggacttggatgtcatactgatgggaccttttggcaacacagttttgctcagcaacagtaatcgagacatgcagcaggtcctgctcgcgggtggtccgtatccagccggatccctggtagccaacctggagttgtgtgcccgacgcagtggatccactctgcctgcagttggtcagctgactctagaacatttggctccactgcaggcttttgtgcgtgccaacagctgtgttggcgtagcagaacattggatgctctatgcagtggttaatgtgccagctggagggtcaatgagagtcgaatcgccaagcgaactgctgggaccttcaatgaagggattcctcatgcatcgaagacttaggcagacgatcagcacttcagcagcgaacagaatattttggcaaccaggatactttttactgaaagctggcgtattgtatatgttcaacgattccacccaaaggcttcccagctgggccatggccctcgccgagtgtcagggcgcccggcgaactgtgaaatcagagcgcccccactgcttcgagattacgctaaagggcgaagtcctgcaaatggctgcgcccgacgagtatgtagcctccgagtggctccaggctcttttgcaatcagccagtggccttgtggttcaagaggagaagcacaaaacccttggatgcacgttgatcgtcacggataaccatttaataaccctgcgtgaagacttttcggctcctctacgaaaaataagccagcaggcggataacaatgcagccgttcagggaaataaagaaaccatgcttgaggaggatatgctcagtgtttttgaaaccagtagcttaatgggttccaccattagtactcctacccgtggcactcaacattcatattcctcgttaagctctacgcctactaagcaaacaaacgaagatgcagctccgaaagaaactgtagcttcgccggaaaaatcacaaagaatgaccagtgtttacggaaagaactccggtttagccatactaacttgtgcggacatcaaagagatgactggcattaagataacctcgcggagcgagacttggtggtgcattctggagttctcctgccaggaggcaccattggaaaaccaggacgatttggttatattctttgccagcagcatggaaatgcaacgtttcctgcggttgctagagcagctttggcagtctaagaataacgatctatttccaataaccatactagacgacggtgactctctggccgagcaatataataaactttatatggacacaaatagggcctgggagcctttgctatcagctgcgctgggttaa

SEQ ID NO: 35994 - protein, 1354 aa, DROSOPHILA
MESPLLPKANNNLGMDKMSSSLNSSTMEDTTPSDSGVQLLDSENSDVMVESICSYEENVRPMPLPLVDPNSNVTAAPDESMTISECSTFDTTEKIVYRRKVHKASSASKTPKKRVSFHEDILKNTRTDNIHIEHGFITYKNGRKLAFANSAGVAGAPGRYSWCPDRERPEGPNELSAAGREDDGEEATGGGGARRKRHLVYRNACSDVLDYDNIFDTDEAPGLHYDTSGVFEYGPATQKQEEQPQLYKCVCSSSNSSLDSDEQDKNSNANCKQYEQAKSSSCDCIGMSNANNNLIGDNCYYSEPNIGDADSPKVKSVWNKEKKPKSSCLKKTKLHTNVILEQDLNGRVKKFNVHDIKHQLLDNSSKMIFGSLKSIFTMPLPERGVPEGSEDLQAVVECVPELEQTPEHKSRPAAESPPLRAKPFLSKSLDGSKQAQPVKKFVHNVDEQLRHKNEDDGASSTEASPMESKQSLMLHRQEEFDKETVPMGSAQGEFRSKFIINCESTVFEHTGVSYETGDLQSELSSGIQHTSVASLLEQNTPIAEPAASQIKKSFLDAPIAKTFSNFFRSFKDSTPVAKDEQAVTDNYFASKIAKPQQQAPAAGKLQRNFSSSTISEPSSNTNTSSNHQIAMNPQLGNAERQSRHLPSPLKKRGQPLQPPRYYDQQHPHQSRSLHSPSAYLAAGRGGPGGSGRDSKSTILSEEFDDILTITTTDTTNARSMDSDLVIVDYTDVDYAHLLKPPAPAAKTSLINRFLRNVTQKKIMETSIRKNNFFADKLRTEQRHAGSDLYVKGARPKNYELIDDLNAEIAMEIEMCGTNSPRRELAISLDNDFQGNLSNFELGIGEISIDVFKGKSLFNLKQSNEQLMKAFKLYTGYNVDGIMTPVLVLLTDKTLYVVNMEGNSLCVKFVLAYKDLDVILMGPFGNTVLLSNSNRDMQQVLLAGGPYPAGSLVANLELCARRSGSTLPAVGQLTLEHLAPLQAFVRANSCVGVAEHWMLYAVVNVPAGGSMRVESPSELLGPSMKGFLMHRRLRQTISTSAANRIFWQPGYFLLKAGVLYMFNDSTQRLPSWAMALAECQGARRTVKSERPHCFEITLKGEVLQMAAPDEYVASEWLQALLQSASGLVVQEEKHKTLGCTLIVTDNHLITLREDFSAPLRKISQQADNNAAVQGNKETMLEEDMLSVFETSSLMGSTISTPTRGTQHSYSSLSSTPTKQTNEDAAPKETVASPEKSQRMTSVYGKNSGLAILTCADIKEMTGIKITSRSETWWCILEFSCQEAPLENQDDLVIFFASSMEMQRFLRLLEQLWQSKNNDLFPITILDDGDSLAEQYNKLYMDTNRAWEPLLSAALG

SEQ ID NO: 35995 - DNA, 2345 bp, DROSOPHILA
atagcaatttcccgaaagtcattaaagttcaagattatggtctgagtactcgatttacgcgcagaccaacaatctatacctatttagggttgccattatcattatcgcaaattaggggtagaagttgtagattgactaagacaatacgggccagaagagccggtacactttaatacttaaatgtgataaatccaacggattcttgaagacatgtgacccaatgcctagcctacacattgagactattaaagcaagtaatcgcaatttatgcggcttaagtgatccgtcacagtgggtcgagccatgccaatatcttgcaagaaagctggagtgactaatgagcatcagtcattattttctagaaagaaaatagtgaggattattacttttcagtgcataattggcaatagcaatggaatatctacatatttaaaaacaattttcaatggcaatcctcgatggaacctatgattgacctagacaataagaccatgcccactgtgcaccgcacttcgtgtcatccaagcgcttggcattttcacttttttgccgttggacccgtccacagattattaaatttatgaaattctattgatgtttacacgcaaactttgaccgctcgagagtcagtggatggatatactacatacaaatgtgggaactatatgtacaagtatccgcaaacttgagactgctgaaagagcagacgagtgcgtcggtgtctgtgtactaaatttaatggaatcttgaatttaagcgggactggagcgttctatcttcatgacactattcagtttgactttagacactgctcgactcacatgcagtcgggaattgaattcgcaaacggatttcaaatacgggaaatgagcaaaaatatctgtgccatggatgtgacgaaaccgtatcgatcccatctttgatacgagtagtgcgccatcgattgcgttcaactgctataaacccattaaaaacccatttgaactgacaacagcacagtatggtttatttcggcgatcggcaacgcgatcgcaatcgcgatcggagtaatcagaaagtcgagcgaatcattcacgatgaagagtttggcgaggagaacgtcgagttggtggactcggagtgggcggacttcgagaagttcatttgccagttgcgcaagcggcggaacagtgctatgtccatggaggaggaactgcgtcacgtgcagcggcatccgaagatcaagtcgcacgccttctatccgtgcccgccgccagctgaaaatgctcgggattcggactcctcggacgatgatgatcccatcggatacatcgatactcttgtaagcacaactggcgatttgtaatacaatagctactgttacggaaatctaattctttgtttgataacgcacgtcataaagttcttatctgtatatctgtcccacttgcattcgctgtgtgttagccaagttcatacacatatggtcaacagaatagtagtttgggtaaaacataagttttactttgttataaaaaaaagttctgagaacaaataccttttcattccaattatataactttttgataatttttgcttattgcttaaagcctttgctagcatcgaattttcaaattatgaagaaatattatattccatgtctggtttggagtattacaaaagaacctccttaaaaattataattttttcgcaatttttagccgcaggtgtatgtataaagatataaatataggtacgtctgcgaatagccgtgattataatgccaatttgtctgattatccgactttcttattattattacccctttttgatgacgcaaagagcgtcgaaattttttccattgctcacgtagaggcagtagtaaaatatttgaattacatctatgaaattatacaagctcaaatacaatatctcaaatattgtaaaacaatcactagattaaaaatggaaaaatcactgccaccttataagatatccaatcaatcgatacgttcgcattgtttattattgcaaatttaacaatgttgaaaagtctgctttatttatttaagcatttttcgtcacgcccgtttcgtacatctgccgtgaaaccatcgatcaaaacaaaaactttttagatttctgaatggttttccaagctttcgctcgccgcttttcctgccagttgccactggcgattttccccacttctattcgcatctgggcctttgtaaaagcaatgcaaaaacagtgtacaaatgacaaaacaggcaaaaacattagctatttttaatccgattataacgaaaagtgtttattatatttaaaaaaaaaaaagaaagcaacaaagattccattgctaaagg

SEQ ID NO: 35996 - DNA, 345 bp, DROSOPHILA
atggtttatttcggcgatcggcaacgcgatcgcaatcgcgatcggagtaatcagaaagtcgagcgaatcattcacgatgaagagtttggcgaggagaacgtcgagttggtggactcggagtgggcggacttcgagaagttcatttgccagttgcgcaagcggcggaacagtgctatgtccatggaggaggaactgcgtcacgtgcagcggcatccgaagatcaagtcgcacgccttctatccgtgcccgccgccagctgaaaatgctcgggattcggactcctcggacgatgatgatcccatcggatacatcgatactcttgtaagcacaactggcgatttgtaa

SEQ ID NO: 35997 - protein, 114 aa, DROSOPHILA
MVYFGDRQRDRNRDRSNQKVERIIHDEEFGEENVELVDSEWADFEKFICQLRKRRNSAMSMEEELRHVQRHPKIKSHAFYPCPPPAENARDSDSSDDDDPIGYIDTLVSTTGDL

SEQ ID NO: 35998 - DNA, 2373 bp, DROSOPHILA
tagtatagtacacacgaatcaaaacattcaaatttgaagcacaaaaatacattttatttatctatcgcttcgattaagtgttgttaatagccagctttaaactatttggaatagaagctctactattattatctatcataagtatgttcaatcagtgctatgtcgtgccgctttgaattaccgctattgttgttcacctgctcactaccctggtatacacctgttattattttgcccatttcgcgccacttatcagttgagatgcttgtgtttgggttgtcggcaaacaagcttccctctcatgctaaattcattagcctatacaactcgcaattcattagttgagtttgcttacgttttatacctacatacatacatatgtatatatcgatttattcgttgcagatcgccgtcccgttccgccttggtgacacccactttgataaggagataattaaagagtaatacatgttcccgatttgcctttcgtctgggccattgctttgcgttttgccggtgttaattaagccttcacacacttaagtgtgccacttgaaatgtacgcatgagcactgtcttatcgccagtcggattcggccaacggagtagacaaaagtaaaaagtgatctcacagataacagaaaattccgaatcggattcggattcagtatcagtaacggcagcagcaacaacagcagcagcattttcccatctgaagtcacaatcgcagtgcatcggcagcagcatattcataagaaatctttggccgcagccacatcggcggatcaactccacgccactggccagtggccattgaagggaagtcggtcttgtgaccacgacgtggtgctgcagctaattgaatttaatgcacaaatgagcctaaggaatttgctttcataagtctgacgaatgcaattcctttactgcgccacttgcattgtcatctgtcatcgtcgagatatttcacttccgagtcgcacaccactgccgtcccaagatgaaagcgaccaggaacggcggccagctgctcatcgctccttcgccgcagactgctgcccgtctgctgcccctgcgcacctactccaacgcctcctcgctgggccaccaccatgacaggagcaccctgtccgacggcgacgaggaggagggcggccttggctacacccacacgctggtgagtaaagtaccaggttctaatcatattcgattagccttaaaaccactgcattgttttgatgctcatgcaactattcaataatatgaataaagtcatattttaaggctcaccatatagtttattaacaattttgtaatcgaaacctcatgtacagcagaaaccatcgtatagagattcaaatgtcattacctgagattttataactagctaattttacctgagatggatgtcacattcacttaatatcactacatagacattcatcattttatatagtatcgcggttttaaattcacgtctgttgcttgcggttagacacattaagttctatatattgttttattacaaagtgattaaaggcactttcaacgacaagtcttagcacaaagaaatttaaaatgtaataatttcccttcgactattcatttctctagcttcggaagccataaattgagtccataaagttttatgggggatggcgtgaaaatttacctgttatcataaacattttattgatcgagaattgattgattgttttacaatgtcaatcggattcatgagcataaagtttattatataccaaaagtagagccaaatgctaatctattaagtggggtaaaaaagccaaacaaatgttgaccaaaaattaaacgattcgattaataagaaagccgtaaatacccgtgctaataggaaaatccatttatctatttaaggcccacaattgtgtttgcattagaacgcctacgacgacccagtttgtttgttattaattgtttttttttttatcgtaattgcttggctggaaatcccgagttgataataaattgccgtctactgtatttttatttacataaacacgtcgatatggcgcttagatttggcaattccgaccttgtattagatggtgttgtttatataaggggattgctcgtttttaattaaaataatctaattaatgtttataaaaagtaatatattgctttaaagaacgtatttctcatacgccaagagatttttcgcgagggtataattaagttcgatacgcctttacacacatgtttcttgttttactttttccgctcatgtgattaacatgtgactatttgcttgttttaactttatttgcttcgcttttttcttgattaatttttgtcatgtgcggtgacacatgttgctcaacatagcaatga

SEQ ID NO: 35999 - DNA, 213 bp, DROSOPHILA
atgaaagcgaccaggaacggcggccagctgctcatcgctccttcgccgcagactgctgcccgtctgctgcccctgcgcacctactccaacgcctcctcgctgggccaccaccatgacaggagcaccctgtccgacggcgacgaggaggagggcggccttggctacacccacacgctgaaaccatcgtatagagattcaaatgtcattacctga

SEQ ID NO: 36000 - protein, 70 aa, DROSOPHILA
MKATRNGGQLLIAPSPQTAARLLPLRTYSNASSLGHHHDRSTLSDGDEEEGGLGYTHTLKPSYRDSNVIT

SEQ ID NO: 36001 - DNA, 4310 bp, DROSOPHILA
catgaaacatgcaaaatatgccacttttaatgctccacactcgactttctcctaccatcgcagcattcaaaatatataaagtggggggctgtgaaaaaagaggactttatgctgtcaccgaggttattcaaaataatgcgattgcatgggcttaaaatcagagtcgaaaaaggtgtgaacaggacacacactttaaatgctatttattgggcttaactaattaaaatgactacttagacatgtttattcaaagagttcaatgtatcgttaaaagtcactcgaaattcgaaagcagttgattttttaaaggtttaatgcaataaaacctgttttgtgatcctgttaaaaaatcgtccaaaaacgcattcaatagataacattatttacagaattattttgcatttaaattgcaatgaaaattacattttgcgtgcacgtttttaattttatgtcaattatattttatgagcgcatataagcaacaccggtttgacacagaatttaccaaaacaatgaaagaaaagttggcaattacctcaactttctcgttctcctggcccttcctgctccccccatcccccattccccactccggcaatttgcatgcccagcaaagttttagtgtccagtcagcgcgtctggccaaagcggatcgcatttgatttgcgcgtatatgtacatatatatatatatatatatccatccgcagcactatccatatccatatgtccgattcgatgcccaccggcatcgccgtcacactgatcgtgtgcctgcccatcgcaggtagccgatacgatgcgatccgctccgatccgatcggatcggcgatttggtcgccggctctcgatgctcgatgggttaaaaggcccgctccggccggcgggtcgagtcagtctgcccctggcctggccctttgtcgggacgcgttttccagagcgtttcacagccgagagcaggtgcaggtggttaccccccgctgccaccgtgacgtacaccgatgaccgagaagagggagcggccgggcccgctgcgctggctgagacacctgctcgaccagctcctggtgcgaatccttagcctgagcctcttccgttcgcgctgcgatccgccgcctttgcagcgttttcccgcaacggaactaccgcctgccgtcgccgccaaatacgtgcccattccaagggtgaagggacttccggtagttgggacacttgtggatcttatagccgccggcggagccacgcagtaaatccgtaaagtttaacctcgaaaagtcggagagaaagcaatcgtgttgaaaatgcataatatattcttgtgtccgaaaactctataaaattggcttatgccggactagttcaatgttaaacaattcaaccttaattggcaaccttttgaaaaaagtgattatcaataggtttttcttttaagaaagtgcttaaccctactaaattaccaaaaagtgcaaaacgtaatagagttttttatatctaaaatgcttcatgagatactaaattatattaaaatctcacaaatcgaaatatttaaatcgaaatatcaaagctgcaaagaagaaaaatatgttgaaatatacaaggacgaaactaaaaaactaatcacaatctcttcgacttaagagagttcaactacaatacatatgtattaatatattttcgccgaaaggatccatagtttaacccgtatatcctttatctgtttagccttcataagtacatcgatgcgaggcacaagcagtatggtcccattttccgggagcgattgggcggtacccaggatgcagtgttcgtatcgtccgcaaatctcatgcgcggagtcttccagcacgagggtcagtatccgcagcatccgctgccggatgcctggacgctgtataaccagcaacatgcctgccaacggggactgttcttcatgtaagtggagtggaccaaatgagtccgttgaattgcaaatgtggagccgacgaaaacgatctcttgtctcttcttcgatgggaatagggagggcgccgagtggctgcacaaccgacgcatacttaatcgactgctgctcaacggaaatttgaattggatggacgtgcatattgagagctgtaccagacgaatggtggatcagtggaaaagacgcactgcggaggcggcggcgattccgctagcggagagtggtgaaatacgaagctacgaactgcccctgttggaacaacagctctaccgttggtccatagaaggtacaagacgtcatgcattaagggctgatccccatacaaaatgatttcatcccaactctatccacttgtagttctgtgctgcatcatgtttggcaccagcgtgctcacctgccccaagatccagtcctcgctggactacttcacgcagattgtgcacaaggtgtttgagcatagctcgcgactgatgacattcccgcctcgcttggcccagattttgcgcctgcccatctggcgggatttcgaggccaatgtggatgaggtgctgcgtgagggagctgccataatcgatcactgcatcagagtgcaggaggaccaaaggagaccgcacgatgaggcgctttaccatcgcctccaggcggcggatgtgccaggcgatatgatcaagcggatatttgtagacttggtcattgcagcaggtgacacggtgagcaatccaattgaattgcaaagcccattactaattgtagttacacctcatttagaccgcattcagcagtcagtgggctttgtttgccctttcaaaggagccgaggctccagcaacgactggccaaggagcgagctaccaatgattctcgcctgatgcacggcctgatcaaggagtccctgcgtctgtaccccgtagctcccttcattggccgatatctgccgcaggacgcgcaacttggcggtcactttatcgaaaaggatgtgagtgaaagaaatttctttgagtgcctcatcgctcatgtttgccttttttcagaccatggtgctgctctccttgtacacggcaggtcgcgatccatcacactttgagcagccggaacgtgtgctcccggagcgctggtgcattggagagacggagcaggtgcataagtcacacggcagtctgccttttgccatcggccagcggtcttgcattggtcgccgtgtggcactcaagcagctccactccctgctgggccgatgtgctgctcagtttgagatgagctgccttaacgagatgcccgttgacagcgtactccgcatggtcaccgtgcccgatcggactttgcgtttagcccttcggccgcgaaccgagtgatacagtcatacacgcataaacataatcatagaactaacactaatcgtaattgtaatcgtagtctctttagttttatataaatatataaatgtcacatatttagtaatctatctagttaaaaatttcaaactaggaaaacaatgcctgcagcatgatatagactaatagcacagtcgccagaataaatattcccaggagtggggcaccccacaccagttgtccaaagatcatcgaacaaccgatcgttgtgagagcgggtatagagcccaatggtcgtaggcaaactcgcggaggaaccagattttcacatatttcaacgtggccggagcttttgtcaaaccactgttccgtcatcggagcgtacaacagttgccgggccacttttccgaagtaatcgtcgcggacgtagaatccttgtaattgactaccatactggataaaaaatgttatcagggaaaaacaaagaggccattttaaagaaacttaccttattgttaatcttttccgaaacgaaatgcagcattcttaccaatgctctaacttcattggtttggatgggcagcgtggcgggatcgacagcggcatgcaggctagaagcattgagcgacatttggtgcgggttcagctttgaggtgtccaaagtgtcgctggcgtcgaaaaagctgaaattttgcacagcaggcgcagaaggcacagatggttcctctggcagagtttcatgcatagatagattcgcttgatcaacctgtttagatattcaaatatttaaattttatgttaaccaaaaacgaacagtaaactcacattaaacgttcgacagaatgcgtcgatgcattgacgcaaaacctccggaatgcgactgaactcgcgcagggtcacttcttcctgggtgcactcgccaaagatcttcttataaaagttcttaagaaatccttcagaccgctgtctctccgcaatttcatttcgtagcttggcgatgtctctgagcaccgagttgcgg

SEQ ID NO: 36002 - DNA, 1563 bp, DROSOPHILA
atgaccgagaagagggagcggccgggcccgctgcgctggctgagacacctgctcgaccagctcctggtgcgaatccttagcctgagcctcttccgttcgcgctgcgatccgccgcctttgcagcgttttcccgcaacggaactaccgcctgccgtcgccgccaaatacgtgcccattccaagggtgaagggacttccggtagttgggacacttgtggatcttatagccgccggcggagccacgcaccttcataagtacatcgatgcgaggcacaagcagtatggtcccattttccgggagcgattgggcggtacccaggatgcagtgttcgtatcgtccgcaaatctcatgcgcggagtcttccagcacgagggtcagtatccgcagcatccgctgccggatgcctggacgctgtataaccagcaacatgcctgccaacggggactgttcttcatggagggcgccgagtggctgcacaaccgacgcatacttaatcgactgctgctcaacggaaatttgaattggatggacgtgcatattgagagctgtaccagacgaatggtggatcagtggaaaagacgcactgcggaggcggcggcgattccgctagcggagagtggtgaaatacgaagctacgaactgcccctgttggaacaacagctctaccgttggtccatagaagttctgtgctgcatcatgtttggcaccagcgtgctcacctgccccaagatccagtcctcgctggactacttcacgcagattgtgcacaaggtgtttgagcatagctcgcgactgatgacattcccgcctcgcttggcccagattttgcgcctgcccatctggcgggatttcgaggccaatgtggatgaggtgctgcgtgagggagctgccataatcgatcactgcatcagagtgcaggaggaccaaaggagaccgcacgatgaggcgctttaccatcgcctccaggcggcggatgtgccaggcgatatgatcaagcggatatttgtagacttggtcattgcagcaggtgacacgaccgcattcagcagtcagtgggctttgtttgccctttcaaaggagccgaggctccagcaacgactggccaaggagcgagctaccaatgattctcgcctgatgcacggcctgatcaaggagtccctgcgtctgtaccccgtagctcccttcattggccgatatctgccgcaggacgcgcaacttggcggtcactttatcgaaaaggataccatggtgctgctctccttgtacacggcaggtcgcgatccatcacactttgagcagccggaacgtgtgctcccggagcgctggtgcattggagagacggagcaggtgcataagtcacacggcagtctgccttttgccatcggccagcggtcttgcattggtcgccgtgtggcactcaagcagctccactccctgctgggccgatgtgctgctcagtttgagatgagctgccttaacgagatgcccgttgacagcgtactccgcatggtcaccgtgcccgatcggactttgcgtttagcccttcggccgcgaaccgagtga

SEQ ID NO: 36003 - protein, 520 aa, DROSOPHILA
MTEKRERPGPLRWLRHLLDQLLVRILSLSLFRSRCDPPPLQRFPATELPPAVAAKYVPIPRVKGLPVVGTLVDLIAAGGATHLHKYIDARHKQYGPIFRERLGGTQDAVFVSSANLMRGVFQHEGQYPQHPLPDAWTLYNQQHACQRGLFFMEGAEWLHNRRILNRLLLNGNLNWMDVHIESCTRRMVDQWKRRTAEAAAIPLAESGEIRSYELPLLEQQLYRWSIEVLCCIMFGTSVLTCPKIQSSLDYFTQIVHKVFEHSSRLMTFPPRLAQILRLPIWRDFEANVDEVLREGAAIIDHCIRVQEDQRRPHDEALYHRLQAADVPGDMIKRIFVDLVIAAGDTTAFSSQWALFALSKEPRLQQRLAKERATNDSRLMHGLIKESLRLYPVAPFIGRYLPQDAQLGGHFIEKDTMVLLSLYTAGRDPSHFEQPERVLPERWCIGETEQVHKSHGSLPFAIGQRSCIGRRVALKQLHSLLGRCAAQFEMSCLNEMPVDSVLRMVTVPDRTLRLALRPRTE

SEQ ID NO: 36004 - DNA, 3086 bp, DROSOPHILA
ggcgttgagcgagagcgtggacacctggtgcatcatcgtctccacattgatgagttctgcatagaaactaggattctgaccattctgcagcaggctaacgaatttcgcctgaaacgaagggaattagagtgagccataaatacccctatttaatccacttaccggcagcagattgatgtctagttcgaatttgtactggtcgacgagcagacggtggcaaacatgcatcaggggaccacagacgccgaagaactggtgcagcgtttggaattgcaccggattgttttcaagcgtcgtggtccgcaggccccagcccaacggattgccatctatcccgaagatggagtgcacaacgtgggggaagatctcctgcacttggcgcaaggagcaccgatcgaacaggatgctcagctcgtgcacgcgctcgaatagaggcaaactgagcaccgtcaacaggcggctctggaatggaaagatattagagcgcaatttgtattacctcgatgctcgcaacttacgcttaggttttctggcggcatggtctgcgacatggtgagttcgtgtgcgtcaaaattgtcttaaattacaaataaatatcactttaaatcataaaaactcttgccggcgtgctgtaaacaaaaacctttcgtcgtgttgccggacctgcgaaaaatggtatcattccatagggctgcgacatcggcaaagaatacgtgaagtttttataataattacattaaaattttagtgaaattcgatagcggtaattaatcaaattctgaataattaataaaatattatttcttgcattttaatttagaaacggattggttattcgttttgcagatggtacgggttgaggtgggaacagagtatttcggaataaaaaatttggtatattttgtcggccctacaacggtcacactagcaaccggcagcgtttgttttgctgcagatttttgtgtttattttcgtttttgtgcaatttaacaagatcaacatgaagcgaagaagtcaaactagagccgaacaagccgttccaccagctaaaactacaaaggagaatagtggatcgctcacagtgtcccagctcagctccgatgttatttggcaggtgggtgctccgctggacaaaatcgaagtgtaaattatagatctggataacctatttacagctggcatcgcagtactggacgccggacacgaaagcagatcacctgccgtacagtgccaagatcatcgaacgcatttacaatgaggagatcggtgatggcggtggccacagtgcacggaggataaacatgctggagttcagtcagtatctggagcagtacctgtggccacactaccaacgtgaaaccgccacccatgcccaccttatgtccatcgttataatggccaacgagaagttccgggagcgcgtcgaagtttggaccgtgtttgaaaagctcccggatcagtatccagccttctttcgccacgtgctagagagctgtttgccgagcaaaaaggcaaaggaggctagtagcacgctaagggagcggacagcgctgttgatgttcattaaccactgctttaacagcatggagatagagctgtgcagagaacaggccaaacgactagtctccttgtccatgtggcattgcctgcagcctcgtaagttcttcttcgcaactcttcacatctatcaaagtgatcaaaaatgtatttgcttgcaggccgtcgcgaacaagagcttcgagaagttcctgagtggcgaaagtactggaaacgcttgctcaagaaggagaaagacagcaaaccggaggtcctctgggagagacactttatgcagaaccttatcattgacttcctgcacatactcgaaagcattcccgccgaaggcgaggtgccgcgcaacgtggttcactactgtgagcgcttcctagagtttattatcgacttggaggcacttttgccgactcgacgcttcttcaacacggttttagacgactgtcatctgattgtgcgggctcttctgtcacccttggttcgtcgcgaggagggaaaactgtttggtcaggtaggtgtcagacttctcatttaataactatctcgtacagcataaattagttaaaattaagtacaaatctcaatgttggacattgctaaactacgaaaacacttatattagtgtggacggtggctcctcagtaatcgttgccgttcatataatgcagctcatcgccccagtcgtttgccgacggtggctcattgtagcagcaggtctttttcagcagaaatgtcacatgtcgctggcgcagcacgcatatgtatagcaacagcggcgtctgcagggcgttaactacgatgtgggcgtaaagcaggccttccatctgcaaccaggacattatgaggaatagccaggctatagacattactaacagcatcagcgagaacatgataaaactgcaaggaagataatgttttcatatacttatatgtaatgcctagatgccgatctacttacttggctttcaatttgtgcgcaatgcggccgtataccgtcctgcggttaatcaacttcctggtggtcacatagaagaatatgtttaccaaaatggtacaagcaattggagcaaagaatatgcatatgcctagccagccgatcgtctcttgctcgcccaccatgtgctcctgtttgtaggattcggcgtcgaggaagaaatgtgcgaagacagccagtgcagccatcgttgctgtgcatccccaagcatacgcagaataatagcagtacttcctgccgtccgtgactcgcaggaagacgttcctcgaacgaaaggtcttccaaatgtaaaaaccgaaactgttcagccagaagaaagctgccaagaggctgaagcacaggataatgtccgccacaatgaagctcacatggctggtcagctcggtgaaaattctgacaaggtctgctgcctggcttaccataaggcacatggctatcgttgtcacaatgttaccaaccagatctctgctgaatggattgaaaattaacgcatgaagcaagtcaaattcaaactattgctcacctgagagtaggaagtata

SEQ ID NO: 36005 - DNA, 963 bp, DROSOPHILA
atgaagcgaagaagtcaaactagagccgaacaagccgttccaccagctaaaactacaaaggagaatagtggatcgctcacagtgtcccagctcagctccgatgttatttggcagctggcatcgcagtactggacgccggacacgaaagcagatcacctgccgtacagtgccaagatcatcgaacgcatttacaatgaggagatcggtgatggcggtggccacagtgcacggaggataaacatgctggagttcagtcagtatctggagcagtacctgtggccacactaccaacgtgaaaccgccacccatgcccaccttatgtccatcgttataatggccaacgagaagttccgggagcgcgtcgaagtttggaccgtgtttgaaaagctcccggatcagtatccagccttctttcgccacgtgctagagagctgtttgccgagcaaaaaggcaaaggaggctagtagcacgctaagggagcggacagcgctgttgatgttcattaaccactgctttaacagcatggagatagagctgtgcagagaacaggccaaacgactagtctccttgtccatgtggcattgcctgcagcctcgccgtcgcgaacaagagcttcgagaagttcctgagtggcgaaagtactggaaacgcttgctcaagaaggagaaagacagcaaaccggaggtcctctgggagagacactttatgcagaaccttatcattgacttcctgcacatactcgaaagcattcccgccgaaggcgaggtgccgcgcaacgtggttcactactgtgagcgcttcctagagtttattatcgacttggaggcacttttgccgactcgacgcttcttcaacacggttttagacgactgtcatctgattgtgcgggctcttctgtcacccttggttcgtcgcgaggagggaaaactgtttggtcaggtaggtgtcagacttctcatttaa

SEQ ID NO: 36006 - protein, 320 aa, DROSOPHILA
MKRRSQTRAEQAVPPAKTTKENSGSLTVSQLSSDVIWQLASQYWTPDTKADHLPYSAKIIERIYNEEIGDGGGHSARRINMLEFSQYLEQYLWPHYQRETATHAHLMSIVIMANEKFRERVEVWTVFEKLPDQYPAFFRHVLESCLPSKKAKEASSTLRERTALLMFINHCFNSMEIELCREQAKRLVSLSMWHCLQPRRREQELREVPEWRKYWKRLLKKEKDSKPEVLWERHFMQNLIIDFLHILESIPAEGEVPRNVVHYCERFLEFIIDLEALLPTRRFFNTVLDDCHLIVRALLSPLVRREEGKLFGQVGVRLLI

SEQ ID NO: 36007 - DNA, 5884 bp, DROSOPHILA
attgcatttgaaacagattgcacgcaaacagatctatatactcaaaagtagcgttgtataataccctttgatccatcgagggtataaaatgtggaagcaaggctttgaattcgcgccctctttccatcaccgtgctctctttttttaaattgagcgacggaaattatcaattggagcaagtagtccgtgcgagtgaagcaggaaccggcaatgtctgcccgtatgagtgtgcgacggctttgtttgctcctccagcgcactctagtgctccccctcccctcgcttcctgcaccaggatgaggcttgatgatgcggtgcgataagatgcagctgtgtgcaatgccctattgacgcgtggcctgtcatcacacttgtcctctcgcacctccacaaactctgaaatggaagggaagataagaagtcttctttaaagacttcccttagttaaatgttagtccgcaacacccttcagctaaccttcaacacagatttgtattgaacacacacgcatgtattgggttttagggaaagtccccccattccaacggcaaggacttccgctttccgctcacctggctggtctaattagcactacctctctcgcacacatagccaaacttaaatggtgcaactgtgtgagtggtcttgcccaaaatgatgacgtatcaaccttttggggtacaccaaccggcttggcttacatagtatgtctggctttgaatacctgtagtgcagctgaaatcaagaaagagagagagagagcttggcaaggcaagagaaacgctcaatgtttgcgtgagtttgtagaattcacgatggcaggtagtacaacaaacacgttccattcaacacgcgcgtttgggaaaccgaacaggagcggatcagcccaaatgggggttgagaattcatttatttgtaatatctcttaattagatataacgacttcttgactgattgctataacaatatgaaaaaacaaacatacctacagctcctggacatgctaaagttttatacccgcttcgagatcaacgacgttactggaagttcgctcactgatcacgacatgacccagctgcactacaagaagatcacctcgctgcagcgagcggtgttcgccaagtttcccagcctgcgggtctttgccttgtccaacgtagccacggtggataacagggagtcgctggagcagcacttcggtgggttggatggcaagggactccttcagattgccacgttcttgaatctcgtgccagaggaggtggtctcacccttggactggcatcgggtagacgagcaatttctgcgtgagctgctgattacgcgacatgagcgacgctgttcgcagttggaggcgctaaacgagatgcccctgtatcccacggagcagatcatctgggacgagaacgtggtgccctcggaatattactccggtgacagctgcttggcgctacccaaacttaatctgcagttcctgactctccacgattatctcctacgcaactttaacctattccgcttggaatccacctatgaaatccgccaagatatcgaagatgccgtcagccgcatgttgccatggaaatccgaagatggcgatgttgtgttcggtggctgggcaagaatggctctgcccattgccagctttgccgttgtcgaagtggccaaacctcatcttggcgaaaagaagccctccagagtacgtgctgatgtgggcgtaactctttcggtgcgccgagagatcaaggcagagtgggagaaccttcgaaagcacgacgtgtgcttcctcataaccgtaaagccaacgcaaccatacggcactaagtacaagcaccgcgagccttttgttccccaggtaggcttggtcagtgtccgtgggtgtgaggtggagggcatgctagatgccaatggccgagtcatagaagacggcccggaaccaaggccacagctgcagggtgagaatcgttgctaccgcgtttggctggactccaatcagtaccgcttggatatggacgatctacaggaggtaggtgtccaactatttcctgctaattgccaacagtgttacttaataagatccttattcagggagccgacgatgtctacgagagttttaacatcctcatgcgccgcaagcccaaggagaataacttcaaggccgtgctggaaaccatacgtcatttaatgaatactgaatgcgtggttccgccttggcttcacgacatccttttgggctatggtgatcctggagctgcccactacagtaatatgcccaatcaggaacgcagtctggagtttaacgataccttcatggattacaatcatcttgaggccagtttcccccaatataatttgaagtgtgaggtgccagtggaaaaccgccaacctccttttaggctaatatttgaggatgtgcctattcaaaaggaaagcgatggagaggatcctgaagagaaacctgaagagaaattgaccaaatccattttggtgcagccctacaaatatgaagccaggggcccatatcccagcgacaagcctaaacagtaagtattgaaatctgatatccagcttaatgtatttaataactctcatgtatgatttaaccaaattgactacaaatgacctttcattctgttttagaaactctattcgttttacacccactcaagtggaagccattcgtgctggaatgcaaccgggactgacactggtggtcggtcctcctggcaccggtaaaactgacgtggctgtgcaaattatatcgaatatttaccacaaccaccccaatcaacgaacccttattgtgacccactccaatcaggcgctcaaccagttgttcgaaaagatcatggctttggatatcgatgagcggcacttgctacgtcttggtcacggcgaggaagctttggagaccgagaaagactacagtcgatatggacgagtcaactatgtactggccaagcgtatggatcttcttagccaggtgcagaagttgcaagaggcgcttggcgtgagtggtgataatgcttacacttgtgaaaccgccggctatttttatctgtacaatgtcatggcgcgatgggagaagttccagagtcagataagcgtacataaaggggaggcggatgcggagaagctaagagcagagtttgaaaaggagtttccctttggaaaattctttgcagatgccccgcagccattgttcaagggcgcgaattatgatgaacttatggatattgcctgctctaatttccgatacatttcggatatattcaacgaactagaggaattccgtgcttttgaattgcttcgcacgggactagatcgatcgaaatatttgctagtcaaagaggcaaagatcattgccatgacttgtacacatgcggcactcaaacgcaaggagctggttaatctcggttttcgatacgacaatatccttatggaagaatcggcgcagatcctggagatcgaaacgtttattcccctgctgctgcagaatccgctggatggacttaatcgtcttaaacgttggatcatgatcggggatcatcatcagctgccgcctgtgattaagaacatggctttccaaaagtactccaacatggaacagagtctgtttaccaggctggttcgtctcggagtgcctaccgtagatcttgacgggcagggtcgtgcacgagccagtatttgttcgttgtacaagtggcgctacaagaagctggaagacctgcagcacatctttgagcgggatgaatacaaacaggctaatccaggatttgttcacgactaccagcttattaatgtcgaagatttcaagggagtgggggaaagcgagcccaatccctacttctaccaggtgagacgaaattgaataattccaagcatttccttttctgaaaactctcttaaaaaacccacagaatcttgctgaggcagagtacattgtcgccgtgtacatgtatatgcgtctgctgggctaccctgcagctaagatctccattttgacaacctacaatggtcaaaagcatctcatccgcgacgtaatcaacgcccgatgcggaaacaatcctcttattggttggccgcataagattaccaccgtggataaataccagggtcagcagaacgactacatactcatttctctagtacgcaccaaggcggttggacatctgcgggatgtacgacgtttagtggtggccatgagtcgagcgcgtctgggattatatgtatttggcagggtctccttgtttaagaactgtctggaacttcagcagactttcaagcttgtaagtttttacaccattttatggttttttagaggtttataattccgtcactgtttcagctaacacagagacctttgaagttgagtctggtacccgaagacaagttccccacggatcgtttggctagtgctgctgtagccagtcaagatatcaagacggtagaaaacatgtccgaaatggcacagtttgtgtacgagcggtacatggcaaaaatggaggagctaaagggcactcttccttccgaagaagagttggaagcaatgcgcaaccagctgctgcaggaagatgaggaatctgttccagaagcttccgaagagcctccggaaaaaagagcagctaaggaagagccattgtccaaaaagaaaacaacagaagcctttaagcccacccctattctcaacgaaataaacgtggacgacacggagatgggtcaaagggaacaaattgaagaggaagctactgatcaagacaaaacccaggagtcggctccagctgaagagtcttagttattgttcagttgctcaaataatttaatttcattaagttccaacaaagttaaagtgacaaatcaaaaacgcatagaccacactccataaatttccgtttacttcttgggtgcggttatgccctctagctgagccttcagctgagcgttggtcttcttcaggaaagttatctcctccgtgaacttcttttcttcagaggccctcagctcagcattacgacgctctgcctgttcctgcttaagtttcatatctgcgattatctcctctagtgcctctttgtctagttcaagagtcttgacccgatcacgaagcatttccttttcctcatgcgcctgcaaagccttgcgcatgccaaaggctacggaactgcagtacaatgtttcataggcctccattgacatggcgatctcatcgcggatgcgaagcagtagcaggccacgctctgaacagttaatggtgacctggcgaatgatctcgtctgcgataatagagtttaaacaagaaggaaaatggtaaaagggattgtcttaccaaaacattgtgagtacagctcgcggcgcacgggacaaatacctgtctcacgagcttgggtctgctgcagcctagtatcaagcatctcctgcaaattgatcacatcctggcgtgttgctggagtactggacacagactgctgccacaactggccatcctcctcccagcagcgcggtggcaatatagaatttagaatttcctcagtttcccttttggtatctagcaaagcgcccgccgtttggggccttttcatctctatctctgtgagcggagcaccccctttcttgtccgggtgcttcaccaccagcaccgggttgttgtagcgcaccagggtctggaattgacccacgcttgttatatccagctcctccattttgttggtactatttcaatttctcgattcctatctcaaaaaatatatatatttttaatttatatttgtgtaattcaggaattcagcaggtttgtttgttcaccgcttttgatgattagaaaatcagaaatgcctgtggtaagaaaattccaggggttgtgagtttgttattctccctgcgcctt

SEQ ID NO: 36008 - DNA, 3602 bp, DROSOPHILA
atgctaaagttttatacccgcttcgagatcaacgacgttactggaagttcgctcactgatcacgacatgacccagctgcactacaagaagatcacctcgctgcagcgagcggtgttcgccaagtttcccagcctgcgggtctttgccttgtccaacgtagccacggtggataacagggagtcgctggagcagcacttcggtgggttggatggcaagggactccttcagattgccacgttcttgaatctcgtgccagaggaggtggtctcacccttggactggcatcgggtagacgagcaatttctgcgtgagctgctgattacgcgacatgagcgacgctgttcgcagttggaggcgctaaacgagatgcccctgtatcccacggagcagatcatctgggacgagaacgtggtgccctcggaatattactccggtgacagctgcttggcgctacccaaacttaatctgcagttcctgactctccacgattatctcctacgcaactttaacctattccgcttggaatccacctatgaaatccgccaagatatcgaagatgccgtcagccgcatgttgccatggaaatccgaagatggcgatgttgtgttcggtggctgggcaagaatggctctgcccattgccagctttgccgttgtcgaagtggccaaacctcatcttggcgaaaagaagccctccagagtacgtgctgatgtgggcgtaactctttcggtgcgccgagagatcaaggcagagtgggagaaccttcgaaagcacgacgtgtgcttcctcataaccgtaaagccaacgcaaccatacggcactaagtacaagcaccgcgagccttttgttccccaggtaggcttggtcagtgtccgtgggtgtgaggtggagggcatgctagatgccaatggccgagtcatagaagacggcccggaaccaaggccacagctgcagggtgagaatcgttgctaccgcgtttggctggactccaatcagtaccgcttggatatggacgatctacaggagggagccgacgatgtctacgagagttttaacatcctcatgcgccgcaagcccaaggagaataacttcaaggccgtgctggaaaccatacgtcatttaatgaatactgaatgcgtggttccgccttggcttcacgacatccttttgggctatggtgatcctggagctgcccactacagtaatatgcccaatcaggaacgcagtctggagtttaacgataccttcatggattacaatcatcttgaggccagtttcccccaatataatttgaagtgtgaggtgccagtggaaaaccgccaacctccttttaggctaatatttgaggatgtgcctattcaaaaggaaagcgatggagaggatcctgaagagaaacctgaagagaaattgaccaaatccattttggtgcagccctacaaatatgaagccaggggcccatatcccagcgacaagcctaaacaaaactctattcgttttacacccactcaagtggaagccattcgtgctggaatgcaaccgggactgacactggtggtcggtcctcctggcaccggtaaaactgacgtggctgtgcaaattatatcgaatatttaccacaaccaccccaatcaacgaacccttattgtgacccactccaatcaggcgctcaaccagttgttcgaaaagatcatggctttggatatcgatgagcggcacttgctacgtcttggtcacggcgaggaagctttggagaccgagaaagactacagtcgatatggacgagtcaactatgtactggccaagcgtatggatcttcttagccaggtgcagaagttgcaagaggcgcttggcgtgagtggtgataatgcttacacttgtgaaaccgccggctatttttatctgtacaatgtcatggcgcgatgggagaagttccagagtcagataagcgtacataaaggggaggcggatgcggagaagctaagagcagagtttgaaaaggagtttccctttggaaaattctttgcagatgccccgcagccattgttcaagggcgcgaattatgatgaacttatggatattgcctgctctaatttccgatacatttcggatatattcaacgaactagaggaattccgtgcttttgaattgcttcgcacgggactagatcgatcgaaatatttgctagtcaaagaggcaaagatcattgccatgacttgtacacatgcggcactcaaacgcaaggagctggttaatctcggttttcgatacgacaatatccttatggaagaatcggcgcagatcctggagatcgaaacgtttattcccctgctgctgcagaatccgctggatggacttaatcgtcttaaacgttggatcatgatcggggatcatcatcagctgccgcctgtgattaagaacatggctttccaaaagtactccaacatggaacagagtctgtttaccaggctggttcgtctcggagtgcctaccgtagatcttgacgggcagggtcgtgcacgagccagtatttgttcgttgtacaagtggcgctacaagaagctggaagacctgcagcacatctttgagcgggatgaatacaaacaggctaatccaggatttgttcacgactaccagcttattaatgtcgaagatttcaagggagtgggggaaagcgagcccaatccctacttctaccagaatcttgctgaggcagagtacattgtcgccgtgtacatgtatatgcgtctgctgggctaccctgcagctaagatctccattttgacaacctacaatggtcaaaagcatctcatccgcgacgtaatcaacgcccgatgcggaaacaatcctcttattggttggccgcataagattaccaccgtggataaataccagggtcagcagaacgactacatactcatttctctagtacgcaccaaggcggttggacatctgcgggatgtacgacgtttagtggtggccatgagtcgagcgcgtctgggattatatgtatttggcagggtctccttgtttaagaactgtctggaacttcagcagactttcaagcttctaacacagagacctttgaagttgagtctggtacccgaagacaagttccccacggatcgtttggctagtgctgctgtagccagtcaagatatcaagacggtagaaaacatgtccgaaatggcacagtttgtgtacgagcggtacatggcaaaaatggaggagctaaagggcactcttccttccgaagaagagttggaagcaatgcgcaaccagctgctgcaggaagatgaggaatctgttccagaagcttccgaagagcctccggaaaaaagagcagctaaggaagagccattgtccaaaaagaaaacaacagaagcctttaagcccacccctattctcaacgaaataaacgtggacgacacggagatgggtcaaagggaacaaattgaagaggaagctactgatcaagacaaaacccaggagtcggctccagctgaagagtcttagttattgttcagttgctcaaataatttaatttcattaagttccaacaaagttaaagtgacaaatcaaaaacgcatagaccacactccata

SEQ ID NO: 36009 - protein, 1170 aa, DROSOPHILA
MLKFYTRFEINDVTGSSLTDHDMTQLHYKKITSLQRAVFAKFPSLRVFALSNVATVDNRESLEQHFGGLDGKGLLQIATFLNLVPEEVVSPLDWHRVDEQFLRELLITRHERRCSQLEALNEMPLYPTEQIIWDENVVPSEYYSGDSCLALPKLNLQFLTLHDYLLRNFNLFRLESTYEIRQDIEDAVSRMLPWKSEDGDVVFGGWARMALPIASFAVVEVAKPHLGEKKPSRVRADVGVTLSVRREIKAEWENLRKHDVCFLITVKPTQPYGTKYKHREPFVPQVGLVSVRGCEVEGMLDANGRVIEDGPEPRPQLQGENRCYRVWLDSNQYRLDMDDLQEGADDVYESFNILMRRKPKENNFKAVLETIRHLMNTECVVPPWLHDILLGYGDPGAAHYSNMPNQERSLEFNDTFMDYNHLEASFPQYNLKCEVPVENRQPPFRLIFEDVPIQKESDGEDPEEKPEEKLTKSILVQPYKYEARGPYPSDKPKQNSIRFTPTQVEAIRAGMQPGLTLVVGPPGTGKTDVAVQIISNIYHNHPNQRTLIVTHSNQALNQLFEKIMALDIDERHLLRLGHGEEALETEKDYSRYGRVNYVLAKRMDLLSQVQKLQEALGVSGDNAYTCETAGYFYLYNVMARWEKFQSQISVHKGEADAEKLRAEFEKEFPFGKFFADAPQPLFKGANYDELMDIACSNFRYISDIFNELEEFRAFELLRTGLDRSKYLLVKEAKIIAMTCTHAALKRKELVNLGFRYDNILMEESAQILEIETFIPLLLQNPLDGLNRLKRWIMIGDHHQLPPVIKNMAFQKYSNMEQSLFTRLVRLGVPTVDLDGQGRARASICSLYKWRYKKLEDLQHIFERDEYKQANPGFVHDYQLINVEDFKGVGESEPNPYFYQNLAEAEYIVAVYMYMRLLGYPAAKISILTTYNGQKHLIRDVINARCGNNPLIGWPHKITTVDKYQGQQNDYILISLVRTKAVGHLRDVRRLVVAMSRARLGLYVFGRVSLFKNCLELQQTFKLLTQRPLKLSLVPEDKFPTDRLASAAVASQDIKTVENMSEMAQFVYERYMAKMEELKGTLPSEEELEAMRNQLLQEDEESVPEASEEPPEKRAAKEEPLSKKKTTEAFKPTPILNEINVDDTEMGQREQIEEEATDQDKTQESAPAEES

SEQ ID NO: 36010 - DNA, 4243 bp, DROSOPHILA
gcaggaagccgccgctttgctgcctccgttggcggaaaattaaagaaaacaacatcgtggaattcgcatacgccaacggagaagcaataaaaaggatagcgaaaacgagaatgaaaattgaatgaggaacacaattcccattttgtctcagactatgaaatagatccggttactctcgtttggtctccggctcagacggattgaaggatggctcctgagtcaagcatccacgatgctcactggtccaccggtggatttcaattcagtaatttaaggcggacttaaaaaactagctgcatgaatttagagttcaaattggcgtatctgcggaggaatgtcatcataaagttattcttcttccagtaaaacccattaaaaactatgctcctgtggcgcgcatctcagatatttatctactaactttattgctaaactaactaatttcctttgaataggtttctacttcaaaatgtgtagaaaaacttacttgtcttatcttacaaattggtagaatagaagaaagaactaaagaagccaagctgcaagtgtaaaatccaatcaagttagcctaattaaaaaacgcccgactacaaactcaatcactaaatgccattttgaatgccttttctacttaagctttcccttgtttgggatggtactcttctctctatttgcaaagtcaaacaaagccagaaaggccaaagaactgaaactgtaaactatgctaattgacaaagaacaaagtgcaacaaaagcgagagcggaaacaaactgaatttaaagtcaatcaaacaaagaggattacgtgtaaaataactacaatttttgggaactagtgaatattctggaaattttgattagaattattactaatggtgataacctttacaaacagttttgcaatatatttttacaagatctagttacctgatacgaatttttgactgcccttaaaattattactcttttttttaacaactaaggaatataagactttgaaatgggatatagccaatgctttgttgagataaagaagaatagcttcagattaatactgatgtgcataattctctacgtattaataaattttcgagaacaagttgaacataaaatgaaagaacagccgcctatagaaggaaaaccggataataagatgctatttgtgaactcctcacaatgccagataaattccatggatcctttttctcccacggcgatgtaccacatgacaccgatgccctcatctgcgtgccctatgatcaaactgatgaagccccaatccattgacggaatgaactatctgtacttgatcgccagtgcaaaggagctttggaaaaagctaggagttcggaggttaagcgatatcttttgcgcctacaaacgcttcgtgcggtttaatgactttgtgaatatctactttgaatcgacattgtttcgctttagcaaattgagaaatttcacaaaggtagattccggtaatataactctgcgtgtttggtgctggatggactatggtcgtctagtgtatcacgatgtctttatatttctaccattcccaaaccctcaaaaggttaataattcagcgccagtgaaacgtctttcagttctaatactgggtatagactctatttcccacatgcattaccagcgatacttcaggttagtagttaaaaagttttaattgcataattttatcaaagggccgttgtttaattgttcttttgtttattcgttttgtgtgaaacaaacaaaagaaaaacatagcgtcgatatcaccagttatccaattaaaacataaatgaacttcgattgcaataataaaaaaccaccgacatttatatgtcgcagcaattcaacaacaaaaggattcgctagtaaatatttcaaaatactttctgattgtcaaaaatacgctaggagcccttcttacatagcaaatacgccaaacaatataaataattctattaaatttacagtcgagtaagggacttgatagaaggtttgccacacactgaactatggggctacaaccgcgtcgggcaaaattcgtatccgaatctgattccattgcttagcggtcagagtgtggatgaagtggaggccaaaagtggctgttacggagcaagcggagggaccaatttcgatcggtgccaccttctgtggcatgattttcaggctgctggctatgccaccatttttggcgaggattcccgtgtagcgggaacctttacttatgtgagacccggctttaagaaaagaccaactgacttttatttgcgaagtgtgataaacgagatccacatgagatcaacttatttcgcacgaggaccacttgaaatcaaatgcagtggcgatcgagtatatcatcatgttctgtacgactttatctaccgtttgctgccccatatgcaggcaagaatgtacgatcgaggattctttgcatttttttggcagacaatgggcgttcacgattattttcagtacggggagcgggccgactgggagtactataggattatgcgcgccttaaaaagacgaaaaatccttgagaggaccctagtcctaattgtgtctgatcatggcctgcgatatggtccttttgtggacacatttcagggcatgagagaaacatcgctgcccataatggttgctatatatccacgatcgctaagggaacgctttccgttggccttcgcaaatcttgaagccaacgcccatcgcctagtgaccacctacgatctgcacgagacccttaaagatgtggtcgatctggaaaaccttagtgacgagcggattttgaatcgtactctgcgactgcgaaacaatcacaacgtttcattattcctgcccattcctgaggagcgtagctgcttctctgcccgcattccgcttcactattgccaatgcgatggatatgtcaagataccgtggaatgtgcgtagtatccagcggattgccaagctcgctgtggccaacatcaatcgactgcttgcaccctatccacagtgtgaacagctggaattgctcaatgtggaggatgcctatctgagaaaacaacacaagctcaataaaacgatcattgtgcgactggtgacgcaaccaggaaatggccattttgatgccacggtcctttccaaaaatgaaacctcgctgcaaggacctatcacaaggactgatcaatacagacaccaatcattttgcgcccgagaagctcccatcgagatttattgctattgttcttagattcagttgtcttctgtcttcgcatctaaaagttacaaattgcattttaaaaaccaccagagtaacgaaggaactaaatgactatgtttttaataaagcaaataaacaaatacatttcagagtatcatttttagaattgagatgcccatggaaacaaacatcattgactcataaaaaccacaactatcagtggtttactgattaagttgccaacaatgtgcaggtataaattacaatacaaatttgtatatatatatattaacttctctttttttgtgaaccacaatgagtaatgatattgcaattttatttagaaatgcttaatttatttatacataaaaaatttaattaatttaaattagactgaactatttatttatcgcttcaaattggacatttaagaggttgttaaaactcccttgtctgtagcaataaagcaagcaatgaaaatgaggaaaaactaccgctgcgccaagaacctggaaccagaaccagagtagctggcattaggataaatggctagcaaatgtgtttagatttctcttaatttcatttaccgcatataaacaaccaggcacttaactagagctgtttttgcgacaaactgtcaacagatggcgccgttgtgtctcgccatgcatgcaagtcggagataatcgcgtgccacgggattttctctataaagtcatatgctgtcgtgaacaattcttaagttcttaagtaaattagatacaaatttacaaaaaagaaataattaaaataggccaccgaattcatgcttttatttttggtgattcattagcgatttaatctatcttaaattaaaataataaccataaatgactaccataaaggttgttgctattcttggcaatacaattcgctcacgtggtcacctctaatgcaaacgtcagttgtgaaagacagagacagtgcgactggcacacatatggcgggcatacacatttgtcgtcgctctgctgtaattaataataatttg

SEQ ID NO: 36011 - DNA, 1926 bp, DROSOPHILA
atgggatatagccaatgctttgttgagataaagaagaatagcttcagattaatactgatgtgcataattctctacgtattaataaattttcgagaacaagttgaacataaaatgaaagaacagccgcctatagaaggaaaaccggataataagatgctatttgtgaactcctcacaatgccagataaattccatggatcctttttctcccacggcgatgtaccacatgacaccgatgccctcatctgcgtgccctatgatcaaactgatgaagccccaatccattgacggaatgaactatctgtacttgatcgccagtgcaaaggagctttggaaaaagctaggagttcggaggttaagcgatatcttttgcgcctacaaacgcttcgtgcggtttaatgactttgtgaatatctactttgaatcgacattgtttcgctttagcaaattgagaaatttcacaaaggtagattccggtaatataactctgcgtgtttggtgctggatggactatggtcgtctagtgtatcacgatgtctttatatttctaccattcccaaaccctcaaaaggttaataattcagcgccagtgaaacgtctttcagttctaatactgggtatagactctatttcccacatgcattaccagcgatacttcagtcgagtaagggacttgatagaaggtttgccacacactgaactatggggctacaaccgcgtcgggcaaaattcgtatccgaatctgattccattgcttagcggtcagagtgtggatgaagtggaggccaaaagtggctgttacggagcaagcggagggaccaatttcgatcggtgccaccttctgtggcatgattttcaggctgctggctatgccaccatttttggcgaggattcccgtgtagcgggaacctttacttatgtgagacccggctttaagaaaagaccaactgacttttatttgcgaagtgtgataaacgagatccacatgagatcaacttatttcgcacgaggaccacttgaaatcaaatgcagtggcgatcgagtatatcatcatgttctgtacgactttatctaccgtttgctgccccatatgcaggcaagaatgtacgatcgaggattctttgcatttttttggcagacaatgggcgttcacgattattttcagtacggggagcgggccgactgggagtactataggattatgcgcgccttaaaaagacgaaaaatccttgagaggaccctagtcctaattgtgtctgatcatggcctgcgatatggtccttttgtggacacatttcagggcatgagagaaacatcgctgcccataatggttgctatatatccacgatcgctaagggaacgctttccgttggccttcgcaaatcttgaagccaacgcccatcgcctagtgaccacctacgatctgcacgagacccttaaagatgtggtcgatctggaaaaccttagtgacgagcggattttgaatcgtactctgcgactgcgaaacaatcacaacgtttcattattcctgcccattcctgaggagcgtagctgcttctctgcccgcattccgcttcactattgccaatgcgatggatatgtcaagataccgtggaatgtgcgtagtatccagcggattgccaagctcgctgtggccaacatcaatcgactgcttgcaccctatccacagtgtgaacagctggaattgctcaatgtggaggatgcctatctgagaaaacaacacaagctcaataaaacgatcattgtgcgactggtgacgcaaccaggaaatggccattttgatgccacggtcctttccaaaaatgaaacctcgctgcaaggacctatcacaaggactgatcaatacagacaccaatcattttgcgcccgagaagctcccatcgagatttattgctattgttcttag

SEQ ID NO: 36012 - protein, 641 aa, DROSOPHILA
MGYSQCFVEIKKNSFRLILMCIILYVLINFREQVEHKMKEQPPIEGKPDNKMLFVNSSQCQINSMDPFSPTAMYHMTPMPSSACPMIKLMKPQSIDGMNYLYLIASAKELWKKLGVRRLSDIFCAYKRFVRFNDFVNIYFESTLFRFSKLRNFTKVDSGNITLRVWCWMDYGRLVYHDVFIFLPFPNPQKVNNSAPVKRLSVLILGIDSISHMHYQRYFSRVRDLIEGLPHTELWGYNRVGQNSYPNLIPLLSGQSVDEVEAKSGCYGASGGTNFDRCHLLWHDFQAAGYATIFGEDSRVAGTFTYVRPGFKKRPTDFYLRSVINEIHMRSTYFARGPLEIKCSGDRVYHHVLYDFIYRLLPHMQARMYDRGFFAFFWQTMGVHDYFQYGERADWEYYRIMRALKRRKILERTLVLIVSDHGLRYGPFVDTFQGMRETSLPIMVAIYPRSLRERFPLAFANLEANAHRLVTTYDLHETLKDVVDLENLSDERILNRTLRLRNNHNVSLFLPIPEERSCFSARIPLHYCQCDGYVKIPWNVRSIQRIAKLAVANINRLLAPYPQCEQLELLNVEDAYLRKQHKLNKTIIVRLVTQPGNGHFDATVLSKNETSLQGPITRTDQYRHQSFCAREAPIEIYCYCS

SEQ ID NO: 36013 - DNA, 4229 bp, DROSOPHILA
acacgaacacacacagcccgaaaaaaaaccagacaaaccactacagacagactcagacacacaccgatagaaacgctgctgcgccgacgcaactgcgctgcagaacttctcttcctcttctccttcttcatcttttaatttcttttacctttaactattatctattttagcataatttcattcacacaccagcttttgtttgtattgaaattagtcgcggcggctgtaattaaacaatgcggtatttcgaaactcgcgctgagaacgaccgacaataacaccaacacagacaggagcgcgcccttctcgcacgcacacaaatttattataacacgtaaacaacaacgccgcaacgccgacgcaacttatttttccggcagcgacgcgtccgcatacgtccgctcacgttaagttccgcagagagaagttgttgaaaacataaacagaatcacttgttgcactctttgagaaaagtggggctattgctgaaaaaaccaactaaaaatattgcaggttagggatactcgctcgattggcgtacggccacacttttgcgacttcactgttaacctctacttcatagagacttttacccgataaatgttatgagtttgactttctctgttaatcacaagaaaaaatattgtggaaattaaaattatctcaaatcaataaaaaataataatatatacacctatgttttatagaagtcaacagtaaataagttatttggaaaaccattgtagccgtttaaataaatctccttgagtgtgttttaaataacggtcattaagtatattacttggccctctgaatttcttgaattacaccatttttagaaataaatcaatccaaaagactactttttggtggcaaatgaactgcataaaaagtaacaaaagaaatatgtttttgaaataacagtatagctgaagtgtattaaaaaataccgtcatatgagcgacccgctgttaccgcttcgctgcgaatgacaaaacgggctgagcaagaaaatggcgtagaaggcgacgaaaattcgtttcactcgtgaagaaaacctcgataactgaggaatacagctgggatttaaagagcatattcgaactacaagcagagatgtttcctggtggaaacggaaacgccgatttgggctacaacaagcatgcccacgtccatggacttggacaacatggccatgggcacaaccataatcacaatcagttcctggcgcagcccccaccaccccccacacatttttcactgccctccgggggcggtcagggcatggtgacgcccatggtagccgccggcctgccgctcgccatgcagggtggcgttggcatcgattgggcgcagctcgcccagcaatggatccacatgcgggacgctactccggtgcccatgcccctggcccctccgccgcccatcatcagcaatttgcgagaataccaccagcagacgctagcaatgccggtgcccagtgtggtcagggcgggatttccgcaactagaggagcacggcgaggcggatatggacatggacgatgagaatgatcggggacatagcactgagacacccccaccgccagcacctttggttacgcaatcccaatggctggcgggcaccgaagtggctggtcagatcccagacgcctccaacggagcgggtttgtagaagatccaagaagatagcacaataaatcaggtcagcaactaaccctcctctccgttccttgcagctgtcacgctgggcaagcagccatggaccgggtggcaaatgcagaccgacaaatcaggcaattccacggcgcatataccatctctgctgaagctgaacgtgagcaatcccaatgagccgcaccaacagctgcagttgcagttgcaagcgcatcagcagcagcagcagcagcatgctccccaaccaacgcatccacaccatccaccagcacatcagccgcatgcacatccacaccacctaacaccacatacacacctgccgccacagcacacacagcagacgcatgcggaaagcggaagtagcggggctagcagtgagatcgatgcaaacaaacggaaaatgttgccagcttggataaggtatgagtgtgcaaagaaccacaataagatgcacaaaagatagatacttgtaataatttccttaatctttcagagagggcctggagaaaatggagcgggaaaagcagcggcaactagagcgccagcaatcctccatgaccacgccagatgttgaggtcaaccatgttaagcaagtatcaagcaaaacactaaccacacctggtaatcttttgaacatcgcgaacgtggtaagtaaggtcgatgggcggcagggttaactgactctcaatacggacagaaaagtgccgaaagcgtagcacacaccatctcacacaaattggttgcacaaaatttagacgggactgaaccaaactgaaaacgatgtttcgtcgttgaaagcacacaaaacttaaaaacaatccggacagtagagcagactgcaggcttgagtgcaggctgtcgattaaacattcccttgaaattcaggctagcgacagcgaagattccattgacgtgcctgtggaggcgcgtggagaactaaaggtgcagcaaataggtaatgaattgattagtaaggacgacgatcgaagcagcagcagcagcgaagagccagagtcggagctgcatggagccatcgaaaccggcaatcggacagtggcggagcacgtgagaatggctaccgtaaacgatgtcaatggtaaaaactacgaagaaagactggcggatctggtaggcatcaccatttgacccggatgtttgctcagccaggcgatgaaatcgagtgagtctcagaggcgaaggaactgcggaattctgacaacactttactggctgctctgcagttcgttcactcttcactagagtttcattccctggccatcggcggcacatccaaaaaaaaaacccatttgtatagttgcaaacaatgaatatgaacacccaataccacccatctgtagatgcttgtggtgcgtcggacactaaccgaaatcctgctggaaaccacgaacgaagagattgcagccattgcaggcgagactctaaaagcacaccgtgcgaaaggtacattatgcattatacttaagtttatcccaaaccgatttcttccagcgctcgcgctcgtgtgtgtgtgtgtaagtagttatagatcgtaagacggcgcggatatatcgcggatcgattgtagcttggatgaccggatgtttcggccaagcgattggagtcgtgttttttccggcttcacagcgcgttaccaactcttttaatcctatgtctatgctaataatctttaaatccctaataatgaattgatatatcgaacaccacacaaaccaatgaaatcacttgctgaattttttaattttaatatataatatatataattatatatatatatgtatgtatgtgtaaatcaaaagcgtcatcagcccaagtgattcgcaaaagcgccttgtcctccattaccggcaacttgggtaagtaaccaaattccagtttagttcatacatattctttgcactatttttgttcagaggtagtctgagttatgcttggtcatcctgtctttctataccccaaatcctaatcacaaaacgaaaagatattacaaagaattggattactcctatggccgagatttaacattctatgcttcctgtaaatttaagccatggccaaatgatttcgaccccctcggcgcagtttggtctttctagcccgcttcttcgtcctttcgcttccccatttccccttcctttcacctttccgtaaattcttgcgaagatattgaaaatcagttcaaaatataccaaaatctgcgcccgatctacattgaagcctggtagcaacaattagcacttgactgatttgaattataggtttagctgcctatggcgattcttccagcgaaaccgaggatgatgaggatgatgaagatgagcgtcaagcgggcgctggaaaggatgccgaaaaaagcgcgcagctaagcgcggaggagttgaaagtaagttagccacacgttcattatcaaaagatatcaattctcaatattatttggcttttaggctcgcataaggcgcagcaaacgatccttcgagaaagtcattgacgacattgaggatcgagtggccaagcaagagctgcttgatgagcaaa

SEQ ID NO: 36014 - DNA, 1616 bp, DROSOPHILA
gctgagcaagaaaatggcgtagaaggcgacgaaaattcgtttcactcgtgaagaaaacctcgataactgaggaatacagctgggatttaaagagcatattcgaactacaagcagagatgtttcctggtggaaacggaaacgccgatttgggctacaacaagcatgcccacgtccatggacttggacaacatggccatgggcacaaccataatcacaatcagttcctggcgcagcccccaccaccccccacacatttttcactgccctccgggggcggtcagggcatggtgacgcccatggtagccgccggcctgccgctcgccatgcagggtggcgttggcatcgattgggcgcagctcgcccagcaatggatccacatgcgggacgctactccggtgcccatgcccctggcccctccgccgcccatcatcagcaatttgcgagaataccaccagcagacgctagcaatgccggtgcccagtgtggtcagggcgggatttccgcaactagaggagcacggcgaggcggatatggacatggacgatgagaatgatcggggacatagcactgagacacccccaccgccagcacctttggttacgcaatcccaatggctggcgggcaccgaagtggctggtcagatcccagacgcctccaacggagcggctgtcacgctgggcaagcagccatggaccgggtggcaaatgcagaccgacaaatcaggcaattccacggcgcatataccatctctgctgaagctgaacgtgagcaatcccaatgagccgcaccaacagctgcagttgcagttgcaagcgcatcagcagcagcagcagcagcatgctccccaaccaacgcatccacaccatccaccagcacatcagccgcatgcacatccacaccacctaacaccacatacacacctgccgccacagcacacacagcagacgcatgcggaaagcggaagtagcggggctagcagtgagatcgatgcaaacaaacggaaaatgttgccagcttggataagagagggcctggagaaaatggagcgggaaaagcagcggcaactagagcgccagcaatcctccatgaccacgccagatgttgaggtcaaccatgttaagcaagtatcaagcaaaacactaaccacacctggtaatcttttgaacatcgcgaacgtggctagcgacagcgaagattccattgacgtgcctgtggaggcgcgtggagaactaaaggtgcagcaaataggtaatgaattgattagtaaggacgacgatcgaagcagcagcagcagcgaagagccagagtcggagctgcatggagccatcgaaaccggcaatcggacagtggcggagcacgtgagaatggctaccgtaaacgatgtcaatggtaaaaactacgaagaaagactggcggatctgatgcttgtggtgcgtcggacactaaccgaaatcctgctggaaaccacgaacgaagagattgcagccattgcaggcgagactctaaaagcacaccgtgcgaaaggtacattatgcattatacttaagtttatcccaaaccgatttcttccagcgctcgcgctcgtgtgtgtgtgtgtaagtagttatagatcgtaa

SEQ ID NO: 36015 - protein, 499 aa, DROSOPHILA
MFPGGNGNADLGYNKHAHVHGLGQHGHGHNHNHNQFLAQPPPPPTHFSLPSGGGQGMVTPMVAAGLPLAMQGGVGIDWAQLAQQWIHMRDATPVPMPLAPPPPIISNLREYHQQTLAMPVPSVVRAGFPQLEEHGEADMDMDDENDRGHSTETPPPPAPLVTQSQWLAGTEVAGQIPDASNGAAVTLGKQPWTGWQMQTDKSGNSTAHIPSLLKLNVSNPNEPHQQLQLQLQAHQQQQQQHAPQPTHPHHPPAHQPHAHPHHLTPHTHLPPQHTQQTHAESGSSGASSEIDANKRKMLPAWIREGLEKMEREKQRQLERQQSSMTTPDVEVNHVKQVSSKTLTTPGNLLNIANVASDSEDSIDVPVEARGELKVQQIGNELISKDDDRSSSSSEEPESELHGAIETGNRTVAEHVRMATVNDVNGKNYEERLADLMLVVRRTLTEILLETTNEEIAAIAGETLKAHRAKGTLCIILKFIPNRFLPALALVCVCVSSYRS

SEQ ID NO: 36016 - DNA, 3281 bp, DROSOPHILA
ttcatttcgagtattttcaatttcctagaatcattttctgtttaaactgcacctagagcgtttctggcaatgtcctacctgtatttgctagccaggtgtagtgcgcacttggaatttccgatattcccgtaacctctaacacccatcaatcactgtggtgtctggtcggttccgccttattaggagtctcctcatattttgaaactgttccgatcggtttttattgttttgtataaacaagatgtcagcttgtagctacatgtgtagatgaaattgaatttcttggaactgttagaagactttataatgtgttcttatatttgattgctcattgttttgattttagtcaatattagatgcccgttttttacttattaccaaagtcaagcaaagtatgttgttattgaaaaaccatgaaaaatcgtaatcatccgtttctgaaataaatatttattcattatttacaatatttatttgtgctattaatgtaggtgtatatatattttgtatacgtagatgtaccacaactgaaatgtatctttaagtatattcgttttaaatatatttgttttaaataaataattactttcccacttttctgtttatcttgtgcatttgaacttcttctagtttaattttcatcataattttgattaaaagtttacacttagatatgcaaatagtacaattgaatccacacactcatcgaagcatctcattcaatttcaaataaattcccaataaattattcgcaagtctcgttatacattaagctgaaattttgtgtcgacaaacagagcaaattcttagccgtgtgttttttgtgtgtccgtgtttgaaataatctccagcccagtgattatttaaaacactcatgtgatccattttctgtttccaaatctgctctcccggtcccctgtgtccatctactttcgcatttcctagttttgtagctctaagaggaacttccatcaagatctatcaaatcgctcaacatcgcctactcgaaaagtgctgtgtcgatgaaaggaagagaataatcaaaatctataattaattgggtataaaattgggtttccccccattggcgagcaataaataataaatgtattaatttaaaactttattcagcttccttaataataggttgccaccttaagcttgaaatacaacagctttttaaccaaatacattttggttaaatgaatttgtgaatatgtacctggccgtttgcctcgcattcccaggaatccgttgggcgctcgcttttctccccacaggtagagccatggatgcaccagagcttgctcatgatcgtcaccaatcccgactccgttgccctccagatcgctcttcttgccacgcaccgccacaaatttgctgttgaagtcggcgaagcgctgctgttttcctctcaagtcataggactttttaaaaaaagtgtgccagaactggggtcgattagatcttcacatatgtatagatatgcaattcaatggtttcttttatgtattattcaaaaaaagactaacactctgatttgcaatggggttttagtgttttaataagcgcatcaagagaaaccactgtacttgccaccaacaactaactgcaaggtaagtcgacttacatcggagagagctgcacgcttgtagtgctggtgggagacgtccttcttgccgcgcatccccacaaaggaattgaccggcgcccgcttttgttgcagctccgtggcctcgtccgcctccgcgtcatcgtccccggccagcagggcgggtcgcttacctcgcatgcccgtgaacccggtgggcgctctcttgcccaccgcggagccatcacgcccagccacgcgatcgaagaagtcctgcagcaggctatcccgcaggcgctcctcctccaggctctgcaggacatcggacaggcggttgttgattgggatgaatttcttgccacgcaggccaacaaaggccagcggtgccttcttcagtcgccgcccgttctccgcgtagctgctgtccgcctcctcgtcggcgtaatccagcggatcgggtcccgatcccagccagttaccctccgaggtgtcgtgctcctcgtccttcttgccgcgcatcccaatgaagctggacgtgggcgcccgctttaccacccgacgcggctcttcggcgccgggcgtcagcgggctgccggaggactccgtctccgtgtccgccgcactcgatggtgccgtcagcaggagcagcagcagcagcgccagcgctatcaaaccgctcagagggcgcattggatgtggcgagcttttaggcgggcgtggaaatcgatgcgctgctggaaaagcgaaattggggagaaaatcgatgatttattacaatgtgtaattaggaaataatgttaatgtcagataaatatctagatattttattacatattatcacaactaaatgttgatacatcttcatttttagctggaaaatagttacatagggtattaaaaagggcttataactacagaagaggttaaatataatcactctgccacatttttatttatgtcaatttaatttgactctactcagctgttttatataaattaaatgaatttagcttgtttataaatacttagtaatattttctacctcacatatgcaattacagaaatacaaaaattactacagatattataaagaaaacgcgtatgaagtgtgtaaccctttaaaaatgttttccatttcatttcctgctttgtttgttttgattttccttttttatttttttttgctattcgcatatacttgctttagtgcacttagactcgcaaattccccgcggcggcgtctacttgacctttttgtactcgtgttctacggttcgcggagtggtgtgaataggttaaggagcttggtgggaaacagaatggtttccaacatacacacttatgcaacattgtatttgagaaaataataatacaaactatgtataatactaaatattaaattagtatcgggcttaaaaaacacaaaaataatacttaaattctatgcaaatgtaagatcataaccaatgaaattccctatttttagtggcaccaatatctgcggaagtatccatatacatttggatgctcatgagtactggcctttagtcgagatgcaatcgagtgcaagtgcaacgtcggctgatgctgcaactcatgatgcaaaatgcaaacacaaaggacgaagtggggcaaagtacactgaggaattgaaatcccatgaatttgatttaaggttacagctgtgtag

SEQ ID NO: 36017 - DNA, 870 bp, DROSOPHILA
atgcgccctctgagcggtttgatagcgctggcgctgctgctgctgctcctgctgacggcaccatcgagtgcggcggacacggagacggagtcctccggcagcccgctgacgcccggcgccgaagagccgcgtcgggtggtaaagcgggcgcccacgtccagcttcattgggatgcgcggcaagaaggacgaggagcacgacacctcggagggtaactggctgggatcgggacccgatccgctggattacgccgacgaggaggcggacagcagctacgcggagaacgggcggcgactgaagaaggcaccgctggcctttgttggcctgcgtggcaagaaattcatcccaatcaacaaccgcctgtccgatgtcctgcagagcctggaggaggagcgcctgcgggatagcctgctgcaggacttcttcgatcgcgtggctgggcgtgatggctccgcggtgggcaagagagcgcccaccgggttcacgggcatgcgaggtaagcgacccgccctgctggccggggacgatgacgcggaggcggacgaggccacggagctgcaacaaaagcgggcgccggtcaattcctttgtggggatgcgcggcaagaaggacgtctcccaccagcactacaagcgtgcagctctctccgattcctatgacttgagaggaaaacagcagcgcttcgccgacttcaacagcaaatttgtggcggtgcgtggcaagaagagcgatctggagggcaacggagtcgggattggtgacgatcatgagcaagctctggtgcatccatggctctacctgtggggagaaaagcgagcgcccaacggattcctgggaatgcgaggcaaacggccagcacttttcgagtag

SEQ ID NO: 36018 - protein, 289 aa, DROSOPHILA
MRPLSGLIALALLLLLLLTAPSSAADTETESSGSPLTPGAEEPRRVVKRAPTSSFIGMRGKKDEEHDTSEGNWLGSGPDPLDYADEEADSSYAENGRRLKKAPLAFVGLRGKKFIPINNRLSDVLQSLEEERLRDSLLQDFFDRVAGRDGSAVGKRAPTGFTGMRGKRPALLAGDDDAEADEATELQQKRAPVNSFVGMRGKKDVSHQHYKRAALSDSYDLRGKQQRFADFNSKFVAVRGKKSDLEGNGVGIGDDHEQALVHPWLYLWGEKRAPNGFLGMRGKRPALFE

SEQ ID NO: 36019 - DNA, 4220 bp, DROSOPHILA
aacttcgaaatgacttttgttgcttccttgtggcagtctgtaagttgccactctttttttatacaactcttatacatttttgttttttttttttgcctttccgtgaccacatgtgccaggctgaaagaaagttttccttctctcaccagattcatggcccaaacgccatcataaagtaatttatgtgatttgaccattcttctggtgaccaccccagtccggccatccagatctgaacctcctgctacaatatatctgattgcaagtgcagcgacatatggtcaagtccgagtttgagtccgagcccgagtccggatccaactcgaagtccagccaattatcctggcgcgtcacatagaaaattactctattatatttcgctctgatgatggataaagttattagtccccaagggggcaagtgtgtcggctgtgggttgtgtgttctgcgatgaactgcgaaacaaagagcaaatgaatgtcctgacccgctctgataaactaatccatcattgtcagatgtcagttgtcgggacgggaaatggggcttcctcgcatggaacgtacgtacgtttgtacatacgtggccaggtaggtgggtaaaaacgagcgaactgcggaggaaaacaatacgagatccacctgttgcctgatggaaggtggcaaattaatggcttttcagtgcagtctcagataccgatgcaattgcctcaatcatcgccgataagtgtgttggcgtgtgaattgagcaccgatgggttgaacgatgcatgcgaaaaggtatttatcagtgcccgggtttttacgtaacatagtgacacccagttgcaatttaagcacaaatgggtgtgcagcttaagagggacatcagtatccttgcattgaatcagcattccatttattaatatttcaaaaactacagcccatatatgacgaaaagtgggcgtgttaacttaaatctaaaatgatttagttcagtctaaactttcaacatatgcatacatcaatcaaaattttaagtaattttttttagactatttattattttatttttcgcgataccaactaaattgttgaagtaaaccatgctggataagccagccccagtgggggcctcatggtacaccaatctgtccgacttccaggtgcaggccgtcgaggcactggccttctcgattcgggatgacaatgcggagggtactgtgtaccgcacccagttctgtctcagtcgcttgggagtcacgcccatggtaaagacccggatgttgcggaagctaattgggatttgtcgcggcagcgacttggcattcctttactttctgatggaggcctgctataagggcacaggatctgcgtacagtgaacggatcctgatgtccgccatcacctttttggatctggagatgaccatgagggaactggacaaaatactgccgccgggagtggaacggctgaataagaaagagtcgatagctccgccagtggattatcgctccatgtcgttgccaacacctttaccgaccaaacgggaatcggatctccgaaaggtccgctcgccctactttaccccgttgcccaaaccaaagctacccaagggtggcgagaagttcactgccaagagaccctgcctcgtggtctcctttccattctggcccgctggcgagaggcccaactacaaggtgaacgaggagaaccgctggttcgccgcttacaggttccagccggtgaagcggatgctcttcaagatggtcggcgacatcatgaccgactactggacaaagatagatggtactcaaccggcggagaacgaagcgatgcccatgtgcgagttccacaaggaggcactgcggcaggagcagctggtgaaggatgcagctgtggtcaaggcccacaaacagtgcttggctctcgtggatatcacttcacggcaggatgccctccttaagaaacgtatcgtggcccagttggaaagggacattgaggaggtcacgctgcgttggaaacgacttcgtgagcgccaccatacggatgtcatgttgttggaggatcacgatcagatgtgttcggtgggcaaagtgcctacggctgtgcaggatatcaggataaagtacctatcccaggaagcggacatcgggcgtctgagtgccaaacccaccttgggtatccatgtgatcaccggcaggggtaacgtgagtcggttaagtaaagtgcgggtctcggatcccgatgatgacatcccatgccccacggtacccgtggagcaaaagctggccaaatgtccaccccctatactgggacacatcaaacgtccgcggaaggtgtccatcacaaaatccaaattcggcgacgataagcagtcttcctgcaagaaaccatcgaagccaggacgcttttttgaagctcctcaccagcacagtccctttgtgttcaaataccatgcggttgcaccgcaggatcaaaatccagataccaaggatgtgattcgtgcccaggccattcgcaccttaaaggagcaaagttgcccctcaagcgaggataactacaacggacggatcaatccccgagaccaggtggtggcggccatcgttgagtgcgcccaaaacatgtggtttggctccctggaggctcatcaacggcgcctgtcatctggccaatccgaaagaccaacgactattgaagtgccagccaaaaatgagccggaagaaatctgcaaaacaaatgatgccctagattggacaaagacaatcaagaagttcgaccccaacaaccaacatttaatggagcgcctgctgcgggatggattttccgtactgaggcaggatccacgctgcgtcttcgccgcttttcccgactcgcacaaatcctttgtgatggtcgagtggattaagcgtcgatatgggaagacctactgccacgaagagattgttgatacgattgaaaagggactggccacatttgtgcatgttgagaaccaactaaacgaagcacccagcgccaagcgcgaaggattctcggcaaaggacacttttgacgactttaaacgtctggaggcgttgtgcaagaaattaaaaaccgaataccgaatgccgctcaacgacaagatcctgaccctgacaagaatctgctggagtgccctgagtccccacttggccagaagctcatccatgctcaaaaccttcttcgcctatctgccagttcgatacgcagacatgctgaaataggatgaagatcattatttggattacaaactaattgttgctaaattgtttgttgttaaattgtttgtagtgtttagttttaatgtttattgatattgcatatgatataatcgtatatgtttaccccgaaggattgaaggttttttttttatttcgacatatttaattgaataggaatggaatatgtattcgcttttaaagtaagaagatattctatttaatcaatttcaattaaattggaaaatgagagaagtaaactatttacagtacagattttagataatagtgtaaatataaattagccccgctgccttctaagaagaactattcaaactaaacatattcaatataagcgagaaaatttaattaatgaccggcatacaaataagtggatagcgtgccgtggcatggcatgtccttcagaatccccgcaaaattcattgaaattaccaagcgtgaaatgagcagctgtcacagcggcacaaaggacaccctgaacaaggcgacttgagtcgactcctgtccgacatgcaaagcccacgatgaaggcgtagaagaacgatattccgatattcacactcgccgattctggtttttcgattaattccactatttgtgaaataagaatcctagcttagttctgccacaagttgctgccaaagtgataggatttcatataataagaaccttaagcatgatagatgcaataataaatattagtaagagggcggtttattgttcattcaccaaattgttttgtttaattttgaaatcaaaaacgtgactttgtggctacatcagtttatttagttaaaattaaagagctaatgctaatgagaccctctcgaaagaatcaatagttagctccattaaaggtgtaaactttttagaagtttggtccaaaattttcgaagagaaatccggaacgaccgcttgtagctgtgacaagacgaagcggagtcgaaagcatcctgagatctagacagaaggcgaatggcaattt

SEQ ID NO: 36020 - DNA, 2220 bp, DROSOPHILA
catcaatcaaaattttaagtaattttttttagactatttattattttatttttcgcgataccaactaaattgttgaagtaaaccatgctggataagccagccccagtgggggcctcatggtacaccaatctgtccgacttccaggtgcaggccgtcgaggcactggccttctcgattcgggatgacaatgcggagggtactgtgtaccgcacccagttctgtctcagtcgcttgggagtcacgcccatggtaaagacccggatgttgcggaagctaattgggatttgtcgcggcagcgacttggcattcctttactttctgatggaggcctgctataagggcacaggatctgcgtacagtgaacggatcctgatgtccgccatcacctttttggatctggagatgaccatgagggaactggacaaaatactgccgccgggagtggaacggctgaataagaaagagtcgatagctccgccagtggattatcgctccatgtcgttgccaacacctttaccgaccaaacgggaatcggatctccgaaaggtccgctcgccctactttaccccgttgcccaaaccaaagctacccaagggtggcgagaagttcactgccaagagaccctgcctcgtggtctcctttccattctggcccgctggcgagaggcccaactacaaggtgaacgaggagaaccgctggttcgccgcttacaggttccagccggtgaagcggatgctcttcaagatggtcggcgacatcatgaccgactactggacaaagatagatggtactcaaccggcggagaacgaagcgatgcccatgtgcgagttccacaaggaggcactgcggcaggagcagctggtgaaggatgcagctgtggtcaaggcccacaaacagtgcttggctctcgtggatatcacttcacggcaggatgccctccttaagaaacgtatcgtggcccagttggaaagggacattgaggaggtcacgctgcgttggaaacgacttcgtgagcgccaccatacggatgtcatgttgttggaggatcacgatcagatgtgttcggtgggcaaagtgcctacggctgtgcaggatatcaggataaagtacctatcccaggaagcggacatcgggcgtctgagtgccaaacccaccttgggtatccatgtgatcaccggcaggggtaacgtgagtcggttaagtaaagtgcgggtctcggatcccgatgatgacatcccatgccccacggtacccgtggagcaaaagctggccaaatgtccaccccctatactgggacacatcaaacgtccgcggaaggtgtccatcacaaaatccaaattcggcgacgataagcagtcttcctgcaagaaaccatcgaagccaggacgcttttttgaagctcctcaccagcacagtccctttgtgttcaaataccatgcggttgcaccgcaggatcaaaatccagataccaaggatgtgattcgtgcccaggccattcgcaccttaaaggagcaaagttgcccctcaagcgaggataactacaacggacggatcaatccccgagaccaggtggtggcggccatcgttgagtgcgcccaaaacatgtggtttggctccctggaggctcatcaacggcgcctgtcatctggccaatccgaaagaccaacgactattgaagtgccagccaaaaatgagccggaagaaatctgcaaaacaaatgatgccctagattggacaaagacaatcaagaagttcgaccccaacaaccaacatttaatggagcgcctgctgcgggatggattttccgtactgaggcaggatccacgctgcgtcttcgccgcttttcccgactcgcacaaatcctttgtgatggtcgagtggattaagcgtcgatatgggaagacctactgccacgaagagattgttgatacgattgaaaagggactggccacatttgtgcatgttgagaaccaactaaacgaagcacccagcgccaagcgcgaaggattctcggcaaaggacacttttgacgactttaaacgtctggaggcgttgtgcaagaaattaaaaaccgaataccgaatgccgctcaacgacaagatcctgaccctgacaagaatctgctggagtgccctgagtccccacttggccagaagctcatccatgctcaaaaccttcttcgcctatctgccagttcgatacgcagacatgctgaaatag

SEQ ID NO: 36021 - protein, 711 aa, DROSOPHILA
MLDKPAPVGASWYTNLSDFQVQAVEALAFSIRDDNAEGTVYRTQFCLSRLGVTPMVKTRMLRKLIGICRGSDLAFLYFLMEACYKGTGSAYSERILMSAITFLDLEMTMRELDKILPPGVERLNKKESIAPPVDYRSMSLPTPLPTKRESDLRKVRSPYFTPLPKPKLPKGGEKFTAKRPCLVVSFPFWPAGERPNYKVNEENRWFAAYRFQPVKRMLFKMVGDIMTDYWTKIDGTQPAENEAMPMCEFHKEALRQEQLVKDAAVVKAHKQCLALVDITSRQDALLKKRIVAQLERDIEEVTLRWKRLRERHHTDVMLLEDHDQMCSVGKVPTAVQDIRIKYLSQEADIGRLSAKPTLGIHVITGRGNVSRLSKVRVSDPDDDIPCPTVPVEQKLAKCPPPILGHIKRPRKVSITKSKFGDDKQSSCKKPSKPGRFFEAPHQHSPFVFKYHAVAPQDQNPDTKDVIRAQAIRTLKEQSCPSSEDNYNGRINPRDQVVAAIVECAQNMWFGSLEAHQRRLSSGQSERPTTIEVPAKNEPEEICKTNDALDWTKTIKKFDPNNQHLMERLLRDGFSVLRQDPRCVFAAFPDSHKSFVMVEWIKRRYGKTYCHEEIVDTIEKGLATFVHVENQLNEAPSAKREGFSAKDTFDDFKRLEALCKKLKTEYRMPLNDKILTLTRICWSALSPHLARSSSMLKTFFAYLPVRYADMLK

SEQ ID NO: 36022 - DNA, 3542 bp, DROSOPHILA
aaataacttcttaatttaatttaaagttagaaaagttttgagtggataaggatatgatgtgttcctcaataaaatataccaagtactctactcttatttaaattaatacatatttgtaagcatttattatatgttttacccccttgggcgtagtgttttaccttattttgtattatgtagcactctgctaattagtcccatatttcaaatgaaaacaagaatcatgaattttcttatggcaccaaagccgccgattacatctctgcccaatatgtatttccattagcttccgatccctcatctcatatgctgaaccttttcccctgctgtcaccgatgaattctgtggaaaaatgtggcttgcttataagcagagtaatgtgcacttttggtgtttttgcgggtcgacagtgaatgggttgcagtagagcttttctagctggaaaaaagtgaaatttatgagctcttgcgggttatgtgcaattcaacacccccttcttatttgctcgaattttccgcacttgcatggcgaaaataaatgagaatattcatggtggtatatccggggtcttcctgggtcaaatattttatttcgtagtataagctttgaatgaaacatcatacacactagcaacgtaattttttttttttactagaattaattatcaaaattggcgttatgaatgatcaaaacgaaaggaaagatgcggcaactaattcagagatgagtaaacatgaccaaaagattccccccaaggaatttaagcgaccttcagctgatggtggacctaggcccccaccgagtcgatatattcaaacctgtatgagcaatctaactaaatgtcctggttctttcctataagccagcatatttttcagctgaggacaataaggattccacgttcgagaaggttgccatcggaatatgctggttccttgtgatcataaccttccccttttccatgtgttgttgcctaaccatagttcccgagtactctcgaatgattatccttcgcctaggtcgtcttaggtggacttactcagacattaccagcttctaatggctaatttgacttctatctctcacaggaaaggtcttcgaggtccaggattggtctttatccttccatgcatcgacgagactcacagagtagatatgcgaaccgacgtgaccaatgtccgcccgcaggatgtgcttaccaaggattcggttacgattaccgtaaatgccgtcgtgtactactgcatctacagtcccattgactccattattcaagtggacgatgcaaaacaggccacccagctcatttcccaggtcacgctgcgtaatatcgtgggatcaaagacgcttaatgtcctcttgacctccaggcagcaactctcaagggaaattcagcaggcagtagctggaatcacatatcgctggggagttcgcgttgagcgggtggatgtgtaaggatatgttattttaacttaaaatctaattgatgtttgccagaattgattaatgattacgtattttaaaaacagaatggatatcacattaccaactagtcttgaaagatccttggccagcgaggctgaagctgtaagggaagctcgtgccaagataattctggccgaaggtgagctaaaggcttccaaggctctaaaggaggcctccgatgtgatgtcggagaacaagattacactacaggtaacaatttgggatttatgaagcttttgatttaattaattttttgtggtttagctgaggcatctgcagatcctatcctcgatcgcctcggagcgaagagtaaggataatttatcctattcctctggagattatggagccctttatgtctggcaaggaggggcaaaaaaaagatggtggaggtggaggtggtggtggcaaggaaactaagaaggaagatgtggccggaggtagcaaggaaacccgaaaggaaggtggtggttctgatagtttcagtggcggaagtagtggaggacttttgtccaaatttatttttgctggtaaggaagagaagaaccaaactacaagagcaggtgacaaatcaagtgacataaatgaaccctgttcctcaaagagttttataaaaggtactggtgaagccttagcattaaatcaagaaaccgacgaaggcctggaagttagaaaagatgaggaaaatcggagacctacatgtatgtaaataaaacatcctttattaagggtttaatctgatttttctaataaaattttccagttgtggcctacgaaatggagtgtgttaaacagagtcctgcgagtatggcttataacttaaaattttccacacccaaatgatttaataaatcgaggaaactatttttctaaaaatacacatcaaaagtagtcaccatcccaatcacagtttttggcgtgtgcctaattaatgtcttcggctatataagatttattaaagctttttatttattctttttttttaagagtttgccgatgacgttgacgctgccgagacgaatcagaagcgcgctgctccacgtcgaccaggcaagtgatatagaaatacaaagtgatttgtggtcccaccatctctaaccgtcgccatgtctcgaaatttcttttccaacaggaggcctggcgtttatggacctgcaatcttatcgggacttcctacgaactcgttggtaatcagccggcgcgctggctggcagcctcctggcagcaggacaatgggaaggccaagcgtgaaatgagcaacagtcacgtcagccgatggggccacaaacttgattgaagggcattatccctgttccccgttccactggagcgacattgacactgccattgaatggcctccaagcagttttttttggaacacgataaaaaatagctgaacactgggtatttttcattcgtggtgagaatggatctcgtgtggcaatttatctcctttaataaattgggagttttcgagtcgatacttcaatggcgtgataaaatatagttaatcctctatcccaaacggattattaagtgcccaaggtcttcttcttcttcaactattacctaaatcataaattttgaaatgacaattatattttactactttccaagttctttgaatatcttgctctcataattccgtaattatcaagcgtaaccaattaactcgcaattatcccagacagcaaaaatgtactcaaaagtcactcaacaatttcgtagtaacattataaatttgctcaactttgtgccatatttaatttggacaaggcaaaaagttgccacaaaagtgggctgtgggcgtgccaggatgttaatgcactttctgtgtgtgtgggcacgaattccgagcgtatgtgtgtgtgcaacgtaacgtagcaacgaatgttcttcagctaatgtgcaagaaattgggaagaaatcaaaggaaatgtgagcttgacaacaagggcaacaacccaccaaaatgtcagaagctagacatctgaacagcaacatctaaactattcaattttactagttgtaataaataaattgtattccatattacaa

SEQ ID NO: 36023 - DNA, 1107 bp, DROSOPHILA
atgattatccttcgcctaggtcgtcttaggaaaggtcttcgaggtccaggattggtctttatccttccatgcatcgacgagactcacagagtagatatgcgaaccgacgtgaccaatgtccgcccgcaggatgtgcttaccaaggattcggttacgattaccgtaaatgccgtcgtgtactactgcatctacagtcccattgactccattattcaagtggacgatgcaaaacaggccacccagctcatttcccaggtcacgctgcgtaatatcgtgggatcaaagacgcttaatgtcctcttgacctccaggcagcaactctcaagggaaattcagcaggcagtagctggaatcacatatcgctggggagttcgcgttgagcgggtggatgtaatggatatcacattaccaactagtcttgaaagatccttggccagcgaggctgaagctgtaagggaagctcgtgccaagataattctggccgaaggtgagctaaaggcttccaaggctctaaaggaggcctccgatgtgatgtcggagaacaagattacactacagctgaggcatctgcagatcctatcctcgatcgcctcggagcgaagagtaaggataatttatcctattcctctggagattatggagccctttatgtctggcaaggaggggcaaaaaaaagatggtggaggtggaggtggtggtggcaaggaaactaagaaggaagatgtggccggaggtagcaaggaaacccgaaaggaaggtggtggttctgatagtttcagtggcggaagtagtggaggacttttgtccaaatttatttttgctggtaaggaagagaagaaccaaactacaagagcaggtgacaaatcaagtgacataaatgaaccctgttcctcaaagagttttataaaaggtactggtgaagccttagcattaaatcaagaaaccgacgaaggcctggaagttagaaaagatgaggaaaatcggagacctacatttgtggcctacgaaatggagtgtgttaaacagagtcctgcgaagtttgccgatgacgttgacgctgccgagacgaatcagaagcgcgctgctccacgtcgaccaggcaagtga

SEQ ID NO: 36024 - protein, 368 aa, DROSOPHILA
MIILRLGRLRKGLRGPGLVFILPCIDETHRVDMRTDVTNVRPQDVLTKDSVTITVNAVVYYCIYSPIDSIIQVDDAKQATQLISQVTLRNIVGSKTLNVLLTSRQQLSREIQQAVAGITYRWGVRVERVDVMDITLPTSLERSLASEAEAVREARAKIILAEGELKASKALKEASDVMSENKITLQLRHLQILSSIASERRVRIIYPIPLEIMEPFMSGKEGQKKDGGGGGGGGKETKKEDVAGGSKETRKEGGGSDSFSGGSSGGLLSKFIFAGKEEKNQTTRAGDKSSDINEPCSSKSFIKGTGEALALNQETDEGLEVRKDEENRRPTFVAYEMECVKQSPAKFADDVDAAETNQKRAAPRRPGK

SEQ ID NO: 36025 - DNA, 2825 bp, DROSOPHILA
ctaaagttaccatttattttttatgtttaattttcctctagggcacaaagtcgaaaacataaaaaggaaaagtttaaaagggaaacagaaaccggcagtgggaaaaggaaaaggcagccaaagctacaaaaacaagcaacttttagcagcaaaaatgtgtggaaaaaagtaaaaaaaaaaattaaaagctaaaaggaaacagagagccaaatgaaataaaagccaccacaggcggtgacattaagcggcaaatttttatgattttaattagcataaaagcgtaattgaaaattaactgaaacgaaatatgtacatgtgccgcaggaagtgtgagtgtgtgtgacatcgtttccacatccaaagagaggggaaacgcatttgttttaccggaatttcaattcattcaccttgcataagccgattgcaataatttttctcaatttccaagcgctttgatgttcgccgcaatacatttataacatttatttatttaggacttaatgcgtgtcaagcgaacgcacgcatatccttgataattgttattatcataatatcaggcaaaagcgtagaaacgaattaagaaaacaaatttcgggatccacatccggccacagtcttccttctgacaaaaagctaaattttaaagtacactttaaattttatttacccttttcttgttccttacatatttttatataattatctaatttaattgagtcttgagttctttgatgttatattacaaacttaagttacatatttaatttcttttctggatattacgaactttaattacaaaccactctaattagcagttcctttgcccaagcttgctatttactaacgtgctcagctttatttctcttccacagaagtagtcacctgcagcaatccggaactaggagcaagtgctccagatccagtggatttaacatggggagggaaaaacactgagggacagcttacgacggccacaagatccactctgccagatagtccaatgacaacacaaaacgatctaattacgacagccagcaacttagcgacagcaaaaaagccagccacagcagcctcagaggcagtagtagatacggcagaaacagcagaaacagcaccaccgactgaggcaaccagctcatggagctccacggccgtagcccggggcatgtcatcagcagatggagcaggggaggcgatagcaaccagccagtcagcacaaattgggctaactactcaggccacagtacggcaaacagaagcgcagacagcatcaacagcgacacaagccgcagcagcaacatcagcagcaacatcagcggcaatagcatcagcagcagcagcaacagagaccgcagcagagatgctcatatcaacaatttatccagcatcaacggaaacggatttgcacaactccattgagcgagtagaggggcaacgtggaaagatggcgaacgcgtttcatccgggtgtccctgattcattgaccaagggcttctccattccgaccttcctgcctccatttcccgttttcgcggctgcggatttgccagcttaccgcgccgctgctgatgcagccgaggcggccaagttggcggcagaggcggcggcccaggcagcggccgccaaaacatcctcggaagcggtgacaatgtcgccggaggagcagcgccgtcaaatgtttaatgagcagcactcctacctggccgcccaccgcgatggtggcgatggggcggggtcggcggtgcggcgcaacctgacaatgcccgtgctaaacatcaccgctcagatgggaaaccacgcctacatgccgtgccaggtgagttagaagtgcactcgaaaaatgtctagtccaaataagtgtgctacgaaagttagttgaaaaccagttaattcagagtagtatttaccttttaattttcattatcaggattacaaatttagttttcagatttgggtatatagtttcagtaacaaaaatagttttgaaaattaagtttcgtatttaatattagtcctcttttaggaaatcttttgttcagtgcactgttttgttgtgtgtagcacaatccgttcgacttgtttgcctgtaggtcgcggaacatcgtgtgacgtaagtcggttaagccttaaaggttcgctggggaaaaaagggttttattacgagattacgtttaattgcgaatattatatttgaattaaatgtcacgtgttataaatagctgtcagtcagttaagcggcttatgggtttatcccgttaaggaagctttacaaataaggagaataaacatacattaaaggtaactggaaaatatcgtatttctacagcttagaaaaagtcaatttaaatatatataaatacaaagattcagccataatttaaaatttgggcaacaacgtaatacagagatgaaatttccgccagctgagtttaagaaattagctaaatcttaagaccacacacgtcaccaaggatttaattcgagcattaagactttaaccactcaaggcaaacgaccctgactgacttacgaatttctcgaaacttaaaccaaacgaagacaagccagcgacagactgactggctcagtgtcccccatctgcttcagaattcctttttaatttcaacggaccggagataaaactagcatttacatattgcacacagacacgccttcacacatccgcagatacagatacagatacatatacacatacagatacagctggatagaagaagcgaaacacttatttgcatgcatacatattgcacagtgtattttccatacggctacaacagacatcaaatttacatgcgttcgtaggt

SEQ ID NO: 36026 - DNA, 825 bp, DROSOPHILA
atgacaacacaaaacgatctaattacgacagccagcaacttagcgacagcaaaaaagccagccacagcagcctcagaggcagtagtagatacggcagaaacagcagaaacagcaccaccgactgaggcaaccagctcatggagctccacggccgtagcccggggcatgtcatcagcagatggagcaggggaggcgatagcaaccagccagtcagcacaaattgggctaactactcaggccacagtacggcaaacagaagcgcagacagcatcaacagcgacacaagccgcagcagcaacatcagcagcaacatcagcggcaatagcatcagcagcagcagcaacagagaccgcagcagagatgctcatatcaacaatttatccagcatcaacggaaacggatttgcacaactccattgagcgagtagaggggcaacgtggaaagatggcgaacgcgtttcatccgggtgtccctgattcattgaccaagggcttctccattccgaccttcctgcctccatttcccgttttcgcggctgcggatttgccagcttaccgcgccgctgctgatgcagccgaggcggccaagttggcggcagaggcggcggcccaggcagcggccgccaaaacatcctcggaagcggtgacaatgtcgccggaggagcagcgccgtcaaatgtttaatgagcagcactcctacctggccgcccaccgcgatggtggcgatggggcggggtcggcggtgcggcgcaacctgacaatgcccgtgctaaacatcaccgctcagatgggaaaccacgcctacatgccgtgccaggtgagttag

SEQ ID NO: 36027 - protein, 274 aa, DROSOPHILA
MTTQNDLITTASNLATAKKPATAASEAVVDTAETAETAPPTEATSSWSSTAVARGMSSADGAGEAIATSQSAQIGLTTQATVRQTEAQTASTATQAAAATSAATSAAIASAAAATETAAEMLISTIYPASTETDLHNSIERVEGQRGKMANAFHPGVPDSLTKGFSIPTFLPPFPVFAAADLPAYRAAADAAEAAKLAAEAAAQAAAAKTSSEAVTMSPEEQRRQMFNEQHSYLAAHRDGGDGAGSAVRRNLTMPVLNITAQMGNHAYMPCQVS

SEQ ID NO: 36028 - DNA, 3452 bp, DROSOPHILA
cattaagactttaaccactcaaggcaaacgaccctgactgacttacgaatttctcgaaacttaaaccaaacgaagacaagccagcgacagactgactggctcagtgtcccccatctgcttcagaattcctttttaatttcaacggaccggagataaaactagcatttacatattgcacacagacacgccttcacacatccgcagatacagatacagatacatatacacatacagatacagctggatagaagaagcgaaacacttatttgcatgcatacatattgcacagtgtattttccatacggctacaacagacatcaaatttacatgcgttcgtaggtgctttctttaaccccccccccctatatatatataaatatatacatatatacaggggtatctggtgaatggaatttaacaaagcccaagaaacaggttctgaaaggaggctgggctaaaagaagtgaatatatatatttataaattgtgcggaattgtaaatggcaaatagaagcccaagtcggggcgcttgtgtacgtcataaaaaataaacgtaaacagaatgaattgttgatatgcaaatgaaattatgctgatctgtgccggaccacaagcgaaggcagaatcagggctaaaacaggagccctgcgaaaatagggccaaagcaaagcgccaactgtgagaatattttagcccaaagatgcgcacccccattcccagaatccgccttcagatccgacctcatttccatttccgggccccagacattcacttggatctcagattcaacgtccgttgacgtcgtttgagccatcacattttttgctcttccttttttgtgcaaactaacaccgaaacgacaggcaaacgtggccggattagtttgccgggccggggtaattattcatgtatggattagtcaacatcgaatgcaatccgggtaatgtgaaagctcattagcggcagattggcagcgattaacataataatagttatgtaaatgctggctgccttgagctttgatgcccgaatagttgactggttttcggagaaaggtcaccatgggtctgaggttaattaatcactgatattcatatgatattaatatattaaattcatagtacattaaatagatagtatctcatatttaggaattactattaacaatatattgcattttcagatacatcgattgtcggataaacccgtttcatgggtgcgcatgcgcgataaccacattatcagcgtggacgaaacgacctttatagcggatgagcgattccaatcgatatatcaggaggatcacgactacacctggtccctgcaaatcaagtacgtggagccaagcgatgccggatggtacgagtgtcagatggcaacagagccaaagctgagtgccaaagttcacctgcagatagtcagtgagtgtttatgaaaaagccgcactttgaaaatataatatatgtagctaccttgcaagtcaaataaaattagtgactttgcaatagtattaaacgatttttttgttttttgtttacagaacccaagactgagctgattggtgatcagagccgcttcgtgaaggcgggcagcaaggtggcgctgcactgcatcgtacggggcaccctggatccgcccaagtacataatctggttccggggccagaagaagattagcgatagtgacgagcgaactggttggtatacgcagctagatcggaatatatttggaaccgtgggcgataatcaaaacacggttagttgggtgtttacgagcggagcggcggttaatgaactagttgagtgtcactgaacataaacatttattacagatcggctcattaattataccgctcgtgcgaaaggaggattccggcaattatacgtgccagccatcgaacagcgtctccgtgtccgtggacctgcacgtgctaagcggtaagttaacagcctccgggatgtggaatggacccatcatatcctatcccattctatcctatcctctacctgaatgtgtggcaaaatgaatgattcatattaatcgcaactgtcgccaccgcgacgaattgcgatggccaacaggtgaatattccgcatcggccatcatgtcaacggcggcaaggacgacgaaaggcgggaggagcacgtgccactcgacgctgggactcctgggaatccttggactcctatgggcgatgcagggagcgatgcacacaccgccgacccagacgtgactcgcctattgaacgaacgcctggtcgcggcgtccgacttccaattatttgtaagcttttgcgccatctgcagttacgtaatttaggttagagattaattaaaggcggccttgtaaatagcggagatgacaacagaggcagaaggtggagctggagcaggagcaggagcaggagcccagtcgaaaccgaattgacgattctgtaattaggttaaacgttgccataactctcatgtctgcgtgtctcacattatccccataccatactgcattaaatctaatgtaaaattcaatttaagcagaccccatttcaagttgtgaaatcgaatcaataattagattattgtcggagagaaatattattaaatgaaaataataaaactgaatcataaaaatccatcataaataacaggcattcaataaatcatgtgaaactttatttaaatctgtgttctctttcggtttttggtccatccaaatggtaaaccatttatgaatattatcaggcttaactaattgattggctgtattagtattctctggcgagctattgattaaaatcgaaaaagtttcatttaaatacaattcggtgctataaatctgcttttgctgctaaatgcgcaaatgcatcgaatgagttattttgctggtgctaaccaaattaatttgttgggttggcattcagaattattttcgtttcatcttcagctggcgtaaataagatttaatacgcgatttatattgcaaaaaaaaaagtgggcgatggaaatacagcattattttaagaaggaattttttgtttttgggttattttcatattataaatttctgaaaagcatcaagaaaaacacattaaatgagttctagttcttataaaagtatttgctgaaatgtaagtatttgacaacattaagccgaaaagaaaccccaagtaagtccaaccacaacccattttctgctgacccccagttgacgtgaacgatagaaggagcaaccagcaaacgaatttcctcgatggcgatatgcataaataatttaatattttatggtaatttgacagtgactccaactggcggccttgtttgggccatcaaagtgacgaaggcaaaacaaagatgagccaacactcatggcctggccaaggggaaaagccaagtagagtgcataaaaataacacaagccataaactggcgaattccaagggtcataaagcctttaag

SEQ ID NO: 36029 - DNA, 932 bp, DROSOPHILA
atgctggctgccttgagctttgatgcccgaatagttgactggttttcggagaaaggtcaccatgggtctgagatacatcgattgtcggataaacccgtttcatgggtgcgcatgcgcgataaccacattatcagcgtggacgaaacgacctttatagcggatgagcgattccaatcgatatatcaggaggatcacgactacacctggtccctgcaaatcaagtacgtggagccaagcgatgccggatggtacgagtgtcagatggcaacagagccaaagctgagtgccaaagttcacctgcagatagtcaaacccaagactgagctgattggtgatcagagccgcttcgtgaaggcgggcagcaaggtggcgctgcactgcatcgtacggggcaccctggatccgcccaagtacataatctggttccggggccagaagaagattagcgatagtgacgagcgaactggttggtatacgcagctagatcggaatatatttggaaccgtgggcgataatcaaaacacgatcggctcattaattataccgctcgtgcgaaaggaggattccggcaattatacgtgccagccatcgaacagcgtctccgtgtccgtggacctgcacgtgctaagcggtgaatattccgcatcggccatcatgtcaacggcggcaaggacgacgaaaggcgggaggagcacgtgccactcgacgctgggactcctgggaatccttggactcctatgggcgatgcagggagcgatgcacacaccgccgacccagacgtgactcgcctattgaacgaacgcctggtcgcggcgtccgacttccaattatttcggagatgacaacagaggcagaaggtggagctggagcaggagcaggagcaggagcccagtcgaaaccgaattgacgattctgtaattaggttaaacgtt

SEQ ID NO: 36030 - protein, 260 aa, DROSOPHILA
MLAALSFDARIVDWFSEKGHHGSEIHRLSDKPVSWVRMRDNHIISVDETTFIADERFQSIYQEDHDYTWSLQIKYVEPSDAGWYECQMATEPKLSAKVHLQIVKPKTELIGDQSRFVKAGSKVALHCIVRGTLDPPKYIIWFRGQKKISDSDERTGWYTQLDRNIFGTVGDNQNTIGSLIIPLVRKEDSGNYTCQPSNSVSVSVDLHVLSGEYSASAIMSTAARTTKGGRSTCHSTLGLLGILGLLWAMQGAMHTPPTQT

SEQ ID NO: 36031 - DNA, 3694 bp, DROSOPHILA
gttcagtctgcacgccggattcattcttattactcaggtgaatatatattgggaaagtacatatattttaatctttacatttcatttttccctagcttgctttatttcactcgaaaagagaaggaatttctgtaaattaaattagtaatttaattaatttccaacaactaatcattgtgggctttcagtttctgattgtttttttcgattgcgcctaatcaagttggaccacttgattctgtatttcctttttggactacagaagggtgatcctgccaaagcctgactggtagatagaatcgtttccttgctatcagtttttggtacagattcggtggctctttgtgttgattcgccctccgtttctaagactggagatatggaaacagccgactttccccttaaactcattaaatgacagaagttcgccttaggaataccttgattggaaccggtgtacttcaatggattaccatcccagtcagccagttcatcaaagtaactaactttttggcttttgcattttggagttgaacctcctggaaagcgacgtacttccctgctcttaaacgcaaccggctcgctttgcgaaaagaggcagctacgcgatattaaccaaatccagaagccgatcaggaaaagcaacaaggtcagcataaggcacaggatcatcggactaacctcaaactcatctggcctctcggcttccagctcacgcttcagttgcatgcattcctgggaggtgatcagtttatgttccggtagcttggatatgatctcttctgccttccatttcggctcagctccaccgcaaacttgattaaggactgacattgtatttgatgtattaaggaaattttaaattgatagggctcacaatgaaattaaattcatgacgcgttatttatgtgaaattttttgataagccccgctaaagattctttgctcgaaagatattttagtcattttcatacaaaagttaaattgttaaatcgatatcttaaaagtaataatttttgtcggcctttgatacttttggatccttttctggcggagtcgatgtggactttggaggcggtatgggccgttccggaatgggtggtagagttgggtgtggaggaattggaggaagtgtcgggtgaggcggcaccgggggcagtgagggatgatcaggacgcggaggaatgggaatggatgaaggcttagtaggagaactcgaacgtgctgggggcttggtcagaagtggatagggttcgattgcatcatcggttcgattggatctaggcgacggctgaccactttgcgggcgaactcttcgactgctagttggttgttcaccatcctgggcagatcgcgagggtctgaaaaatggtggccatagccacgaacgcgccggtttgttttcttccacactctcagtggtttttccaacttcgggtttttcagttgtgctatctgtttgggcatcattaaagaaatcaggtggtgtacccgagatgtaaacttttggtgaaaataaatgtaaataatcgtaatcgtcatcgctatccctccggtcatcatcatcttgtgctgcatccgacgaatcctttccatccataaaaggtgccataatttccaagggtatggggaaaagtacattaacccgacgttccgatgccatggaacagagaatctgcagatgccttagctaagttggttagaaggagtcaggactgtgatgttcaaaaacatgattagtgtaagtcattacttgtagggtaatttggttttccgacataacatctgagcattcttttaaagccttcgaggctttagcctctccttctgccaaaatgatcttggccctggcctcccttgtcgcctccgcttcgctggccaatgatcgctccagactacttggcaaggatatctccatcctgaggaaggagtaccaacatgttcagatcagttaaacatctaggattagcttacaagtccactcgttccactcgcacgccccaacgttctgtgatctttgcaactgcctgctggatttccagggaaagttgctgcctggatgccagaagttcgtggagtcctttcgaaccaacaatgtttcgcagggtgacctgtgagatcctttcggtggcatccctggcatcgtccaccttgatgatcgagttgatgggatcgtagatgcagtagaacaccactgcgttcactgtaatcgacaccgaatccttggtgagcatctcctgcggatccacattaaccacatcggtgcgaatgtccaccgtattaaacgaatcgatgcagggaagaagaaaaactaaacctggtcctaagcaactcctgaaaataaaatttaaattatagatcatacttttaagggtagcgaataggtttacctaatacgacccaatcgaaatatcacaagtcgatggaattcgtaggctatagtcagacaacaacacagcgaaaatggaagtaaaatcaacactaaaatccatgatacgaacaccgctactttttcaacgatataattgctgttatcttcaagggaaaaaattaaagtaaataaatcatatatatgcggttccttgaggtcctgcaatacttaccatcttccggggtgggttccacattatcttgcttctctgtttcgactgcatatcgctccctcattacaagaaatttttggatgacagttaaaatatatcgatttcattgaatgttttttcaaatgtaagttatttccggtatttaatccactcaatccacttattgcacttttccaggtttaaataaattcgaatttaatcatttgcatattgcgctcgcagtggcaactgaagaacttaaattttatttgaaatttttgaaattacatttttcctgcaagctcctcgagtggctaacttttttcggcagcaaaaacagaatggtgagttacaaataaaaattgtccacaaaataaaatagaaggcagaaactttatcgcagagcgaagctggccaaagttcatagggcaaaaggaggaaaacttttgttttctcgccttctttgctgtatgttccttttttcattttcatgaagcgacaaacaaatggaaactgactggacctggctttaatactgcacaatggtttgtggagcggggtaataacttcgaaatgacttttgttgcttccttgtggcagtctgtaagttgccactctttttttatacaactcttatacatttttgttttttttttttgcctttccgtgaccacatgtgccaggctgaaagaaagttttccttctctcaccagattcatggcccaaacgccatcataaagtaatttatgtgatttgaccattcttctggtgaccaccccagtccggccatccagatctgaacctcctgctacaatatatctgattgcaagtgcagcgacatatggtcaagtccgagtttgagtccgagcccgagtccggatccaactcgaagtccagccaattatcctggcgcgtcacatagaaaattactctattatatttcgctctgatgatggataaagttattagtccccaagggggcaagtgtgtcggctgtgggttgtgtgttctgcgatgaactgcgaaacaaagagcaaatgaatgtcctgacccgctctgataaactaatccatcattgtcagatgtcagttgtcgggacgggaaatggggct

SEQ ID NO: 36032 - DNA, 1452 bp, DROSOPHILA
ttaactgtcatccaaaaatttcttgtaatgagggagcgatatgcagtcgaaacagagaagcaagataatgtggaacccaccccggaagatgataacagcaattatatcgttgaaaaagtagcggtgttcgtatcatggattttagtgttgattttacttccattttcgctgtgttgttgtctgactatagcctacgaattccatcgacttgtgatatttcgattgggtcgtattaggagttgcttaggaccaggtttagtttttcttcttccctgcatcgattcgtttaatacggtggacattcgcaccgatgtggttaatgtggatccgcaggagatgctcaccaaggattcggtgtcgattacagtgaacgcagtggtgttctactgcatctacgatcccatcaactcgatcatcaaggtggacgatgccagggatgccaccgaaaggatctcacaggtcaccctgcgaaacattgttggttcgaaaggactccacgaacttctggcatccaggcagcaactttccctggaaatccagcaggcagttgcaaagatcacagaacgttggggcgtgcgagtggaacgagtggacttgatggagatatccttgccaagtagtctggagcgatcattggccagcgaagcggaggcgacaagggaggccagggccaagatcattttggcagaaggagaggctaaagcctcgaaggctttaaaagaatgctcagatgttatgtcggaaaaccaaattaccctacaactaaggcatctgcagattctctgttccatggcatcggaacgtcgggttaatgtacttttccccatacccttggaaattatggcaccttttatggatggaaaggattcgtcggatgcagcacaagatgatgatgaccggagggatagcgatgacgattacgattatttacatttattttcaccaaaagtttacatctcgggtacaccacctgatttctttaatgatgcccaaacagatagcacaactgaaaaacccgaagttggaaaaaccactgagagtgtggaagaaaacaaaccggcgcgttcgtggctatggccaccatttttcagaccctcgcgatctgcccaggatggtgaacaaccaactagcagtcgaagagttcgcccgcaaagtggtcagccgtcgcctagatccaatcgaaccgatgatgcaatcgaaccctatccacttctgaccaagcccccagcacgttcgagttctcctactaagccttcatccattcccattcctccgcgtcctgatcatccctcactgcccccggtgccgcctcacccgacacttcctccaattcctccacacccaactctaccacccattccggaacggcccataccgcctccaaagtccacatcgactccgccagaaaaggatccaaaagtatcaaaggccgacaaaaattattacttttaa

SEQ ID NO: 36033 - protein, 474 aa, DROSOPHILA
MRERYAVETEKQDNVEPTPEDDNSNYIVEKVAVFVSWILVLILLPFSLCCCLTIAYEFHRLVIFRLGRIRSCLGPGLVFLLPCIDSFNTVDIRTDVVNVDPQEMLTKDSVSITVNAVVFYCIYDPINSIIKVDDARDATERISQVTLRNIVGSKGLHELLASRQQLSLEIQQAVAKITERWGVRVERVDLMEISLPSSLERSLASEAEATREARAKIILAEGEAKASKALKECSDVMSENQITLQLRHLQILCSMASERRVNVLFPIPLEIMAPFMDGKDSSDAAQDDDDRRDSDDDYDYLHLFSPKVYISGTPPDFFNDAQTDSTTEKPEVGKTTESVEENKPARSWLWPPFFRPSRSAQDGEQPTSSRRVRPQSGQPSPRSNRTDDAIEPYPLLTKPPARSSSPTKPSSIPIPPRPDHPSLPPVPPHPTLPPIPPHPTLPPIPERPIPPPKSTSTPPEKDPKVSKADKNYYF

SEQ ID NO: 36034 - DNA, 2621 bp, DROSOPHILA
tggaacactgcactcacattggccatggtctttgggactgagaggcagcgggcaggtaggtggccagccattccatcagagattcagaccaggccaagtagtaggcgtcaataaagccaaattcacgtctcggtggcccccttctccacattaccgtcgtattcaaccagatttggggacaggcagacgaattcatttcgtcagttttgcgaatcatcacttatccaatttttgtcccacagatatagattggcctgcaccctcaatcgagtctcaactagaaggttgtacagacaatagaatctcctctcgaaatgcaaacaattaatgattgtttgatagcctttaagttttggtttaaattgacaaccgttactcccactccacaatcctatcaaatacaatttatcaaccatttacctccattgttatggctttcaaactttgaactgtcatctagataggttcagcctcttgggctttcaaaaacaattgcttaaataattatcacaattaaatcgttgttttcacatgactgcacttttgaactgaaccacataataggattagcaaaacctttctggcatttagcctaatcagacaaattaatcagaaatcacctgtttggagtcctttggacgtgttgactggagttggcatcacttttaattatggtcattgaatttctaattgtccttaatggagcgaaattaatttcgtatcggaacattacagcaatctggtttcatcccactcgacacaattaaggcgcacaatttaatatcaaatatttcttcaagacattggacaagccataaaattgttaattgtcataaacgtgtgatggggaatatcttaaattagaaggggacttaaagctgttaagagatacgaatggggtacattattacataattttacttaaaatttcgatatatttgtccgtatacaatcttttatcatacacagacacaaaaaagacctcccgaatactcaatggctagcttgatcctggcagggcaatgtgtgcgttgttcctgtttccaacatcgtcatcatccgagtccgttagcaggtcggatagactgagatccgaggagcgtttctcgaggccctcctccaccagttgtcgcgtcggaaggttggcgggcatggcgtacgtcttcatgcaaaggataacgtgctcgcgaaagagttgctccgagtgtttcatgatggcggcggcccggtgattcagtgagtcgtgcggattcgggtaacgcagcagctgtggcagaaaggtttcgaatatgttgaccaggtcatagctggatgaccaagcctgcttaaggacattcatgcagaccaggcccgtgatgaactcgatgtttgggtgcaggatcttggtgacaaagcgaacgcgcggtgccgtcaacggatagtcctgcggcatggtcacatttaccgtccaaatgccaccctcgtaggcactgcccagtggaccctcgaggcaaacattcaggttggtcatgtcgtcgtccacggtggtgcggtagcccgacgccaacagccggttaacatcccggtccagacggcgccccgccatcggcaacgtcgtgttcaccagcaattgctcggccatctgtattctggcgttctgtcctgtgccgccactgaatcggatctactggtattttgagtgcactcgtctgctacacagaggtaccttcaaaactatgcagctggtggataggttagttaatcaccatacgtgaagttgtaaataagattttatgcttacataaaatcaatccagaattttgctcctttttcattgaaatttaatacaaatatgaataaacctaccgcctactctaacctaccaatcaaaattagattacaaattttaaaaagcttttcttgctgaagttaaatcggatacttaaggatgacatttaatatgataaataaagaaaaccaatttcaggacctttgaacttgtgtatttagcatttttgtaaaaaatgttacaatgttattttttggatattggtcagctgccaattttcaaaaacgcctaacccaaatcgatagcctgtgaaagtgagaatttatagagttttttatttcctagttttgttttctttcggacttgtcgcattgcgtctaagcggattttggctctgggccgagcattcattaattgggcgtgggtcagatagttgggcgaaatattttggccgtaatgccaactgcttgcaattggacaccggggaaccagtcgaatgacccaaggcaatgacaattgtgcacaagaaggatgagctgtgtccttgcaaccgaaatcacccacttctataagtggacattgcaagttgaatgcttttctgactgctggcaataaatcaaagatcgtctgctggcgtttccataaaggaagctgtgataactccaatggtagagccagagtgcgagtgcattaaagttaaatggactcggactaaatgctgcaaattgctgccatagccaacagtcatggatacaaacacccgtatctaagggattgcatatgtatctgcgcatctatatttgtatctccatctgtatctgaatctgtatttgtgcatctcctacaatggtcg

SEQ ID NO: 36035 - DNA, 621 bp, DROSOPHILA
atggccgagcaattgctggtgaacacgacgttgccgatggcggggcgccgtctggaccgggatgttaaccggctgttggcgtcgggctaccgcaccaccgtggacgacgacatgaccaacctgaatgtttgcctcgagggtccactgggcagtgcctacgagggtggcatttggacggtaaatgtgaccatgccgcaggactatccgttgacggcaccgcgcgttcgctttgtcaccaagatcctgcacccaaacatcgagttcatcacgggcctggtctgcatgaatgtccttaagcaggcttggtcatccagctatgacctggtcaacatattcgaaacctttctgccacagctgctgcgttacccgaatccgcacgactcactgaatcaccgggccgccgccatcatgaaacactcggagcaactctttcgcgagcacgttatcctttgcatgaagacgtacgccatgcccgccaaccttccgacgcgacaactggtggaggagggcctcgagaaacgctcctcggatctcagtctatccgacctgctaacggactcggatgatgacgatgttggaaacaggaacaacgcacacattgccctgccaggatcaagctag

SEQ ID NO: 36036 - protein, 206 aa, DROSOPHILA
MAEQLLVNTTLPMAGRRLDRDVNRLLASGYRTTVDDDMTNLNVCLEGPLGSAYEGGIWTVNVTMPQDYPLTAPRVRFVTKILHPNIEFITGLVCMNVLKQAWSSSYDLVNIFETFLPQLLRYPNPHDSLNHRAAAIMKHSEQLFREHVILCMKTYAMPANLPTRQLVEEGLEKRSSDLSLSDLLTDSDDDDVGNRNNAHIALPGSS

SEQ ID NO: 36037 - DNA, 3845 bp, DROSOPHILA
catgaatgaatgaaaagttaagtgtttctgccgataagtgtagtaattaaaatcgtatggattttaaaaaataattttgcttaaagctattaatgaattagatcactagatatacattttaccaatatgcaacaacttagaattctctgatttgcactggctcactttatatgtaggccaaatacacatttccgttaaaaaattaatgtgaaatctaagagagtgtaatctagggatgtggcttaataatccccaaggtcttacataataaaaacaactataaaatatcagtcatagaaacaacgggccgtttcaatgaaactaaacatggaagtggaaaggggtaagccaaacaatgggagaaattgaactgaaatcaatcagttgatggaatgcttttataaaaattacaataatcatgagtacattcaatgaaattcgaagcggttggcatagagaatagcagcaggggaattgcatgcacacatttatatccttgatttgtccagattatcgaagtctctggtgagtgtttgcgtagtatccaattcacagttagcggtatctcaacaatttcaattaatttgtggccaaaccattgagacttcttctactcatcgaaagcgttcctcaactgtaattaaaatcgcttacatttaatcattttaattgtgcaaagcttggattacacgactgatttatgatccacttgggggagggggaaaccaaatgatgccgggggaaatggatataagacacgtttttgggtgaacccaacatcaaagcaatggaaatggccaacgccataattacaactctagggcaaaaataatatattccatccccaaaattatcttacatcatactcagatagaaaatgccaaatgtgagtatctcaagccaattacagcatgtcaaacgcattcggcaatggtaatgacatattaaatatgactacagcacctaacaaaatatggagtatattttaaaaatttttattggaaattttattgcacatacaaacatcggttgttatctattaagagagaaaatatttgtttgaaagtttagaataatgaaagcaaacattcaccttagttctctagcactttttcttattgttcttttttcctgcctttttgtctgcttcattgatgaatttgcagatctcgatggaggaaaatgactttggtctttcaattggggctcccaaagccctggaccaaatcagctgggacagaactccaagcgcccgagaaactccgaaaagaactgtgtagaacttcagctccttcagacagtaatgttgcagcaggacgcccgaatgggcatcgacgtttggatacggattcgctaccttgttgagcttcttgagcacctctggtatgatcttccacaggcgggtcaccagctttacgcctggatcatccttgcagtgcttcatggcaaactcgttttgcaggacgaaccgaggatcggtgtcccgaaggacagcgtgtccgtagccgggaatgacctggaatataagtataatcgaatataaagtttttactaggatcctactgtttttaaaagaaatcttcactgataaggaatttatcccgaaatcaatctcacctggccccctttcagcgtatcatcgatgaacttctttagctcttcatcggaggggtcatcgccaatggccttcctaagctttgtcagccaaaccagcacttcctgattggccaaaccatgaagtggcccagccaggccgcacatgctggccgagaaagacaggaagggatcgctgagcgccgttccgactaggtggcaagcatgggcggaaacattgccgctctcatgatctgcatgcaggatcatgtagagccgcataagatcaacgaaatccttttcgggtagtccaagcatgcggcagaagttgccggaccagtcctcctcatagttgacctcccgtgaaccttcgccatccctaaacacgttagaatagatggcagccgccacggtgggcagcatggcgatgaggttcattgaatcctcgtaggagtatttccagtagtctgcacgtctggcccctttggtgtaagcctcgacgaactggctctgcggattgagacaggcactggcggcgcacaattgggccatcggatgcacccgcttgtccatggagtcgatcatccggaggcagtagcgcggaactgagccccgcttcagccactcgttggtcacttcctgtgcctccttcttcgtgggcatcgatccgctggtcagcaggaagaaacatccttcgggagtgccctcttgtgtgccctcttgcacccgtggcagtttggcacacacatccttaagcagttttccacggtaataaatacccttgtttttgtccaagctggtataggaaaaaagggaaaaacatattgcaaataagtcaaaaccattaaactttatggcaaacatacctggatgtctcgcaaaacaaaagtggaagtcctcgcattcctccaatcacgctattaacactgatctggccaattatcttcttgccgtgcagacactttatacccaaaaacttttcacgttctataggaattttctttgccaacttggcttttaggcctgaacctttaccattcttgcagtcgggatatgaacgaaatggaacgttctgaaacaataaaatcaacgcaagttctacaccattctataaattaccttgaagaagattttgaagcttttgtagttattggttttttgcatagtgaaagaattcgcaaaaaaaaaggtaatttagattttatgttataaccaaagggaatttcggagacagataaacagctagagatttgaaacacaggctacttcatgatattcacaagcgtcaattaaaatcaaaaattaaaaatggtagctaggaatgaaaaagtgaagaaacatatatataattctttggatattcaaatcaaaaatgtaaatcaagtcgatttcttgaataagccaaaccaaaccatttaatctttagagccatattccataatttacagctgcagctttctcttcaataacaaatgattttcttgtagtccctggtgagccctgatttaagtgcagtattattccatggcatttcaatgtggtcgtctaaggccagaggggttaaatagttgtccgcaatttgtcgagtgtttccagggaccaactttaagctacaaccaaaattaattcctgtttgtttgtcgcttaacgaaatttctgggtcatttgtgtgacaccagaagcccacccactggcacacgcacacacactttcgctctcgactgtgaaaactgtgtatggaattgcaaaaaattaaatatctatttgtagttttgggggcattggggaattctacgttactttggctcatctgccagaaacagagggcttttgtgcagagatgtggggaatgcgagcatgagtgagtggaattggtactttggcagcgtttttcatctgccattgcccaatgcgctgcactttggggaatttttcggtttttgccaccatagctattgccactgctgctgcccagcaaatttatatttgtttgtttgccgttctgattttgtccagctttggggcaatcagcaagcgctcaaaaggggcccagcgagaaaaactccataaaacttttcttttaattaaaacatattttacatacacatacaacaaacacaaaaatcataaaaaaaaaaatttgtttttgaaaataaaacgtataaatataaaaacatttttgcactgcttcactaacagccatcaaatggaaattaaaacttcatcgcgcggtagatctcgccacgcttttt

SEQ ID NO: 36038 - DNA, 1561 bp, DROSOPHILA
aaatctctagctgtttatctgtctccgaaattccctttggttataacataaaatctaaattacctttttttttgcgaattctttcactatgcaaaaaaccaataactacaaaagcttcaaaatcttcttcaagaacgttccatttcgttcatatcccgactgcaagaatggtaaaggttcaggcctaaaagccaagttggcaaagaaaattcctatagaacgtgaaaagtttttgggtataaagtgtctgcacggcaagaagataattggccagatcagtgttaatagcgtgattggaggaatgcgaggacttccacttttgttttgcgagacatccagcttggacaaaaacaagggtatttattaccgtggaaaactgcttaaggatgtgtgtgccaaactgccacgggtgcaagagggcacacaagagggcactcccgaaggatgtttcttcctgctgaccagcggatcgatgcccacgaagaaggaggcacaggaagtgaccaacgagtggctgaagcggggctcagttccgcgctactgcctccggatgatcgactccatggacaagcgggtgcatccgatggcccaattgtgcgccgccagtgcctgtctcaatccgcagagccagttcgtcgaggcttacaccaaaggggccagacgtgcagactactggaaatactcctacgaggattcaatgaacctcatcgccatgctgcccaccgtggcggctgccatctattctaacgtgtttagggatggcgaaggttcacgggaggtcaactatgaggaggactggtccggcaacttctgccgcatgcttggactacccgaaaaggatttcgttgatcttatgcggctctacatgatcctgcatgcagatcatgagagcggcaatgtttccgcccatgcttgccacctagtcggaacggcgctcagcgatcccttcctgtctttctcggccagcatgtgcggcctggctgggccacttcatggtttggccaatcaggaagtgctggtttggctgacaaagcttaggaaggccattggcgatgacccctccgatgaagagctaaagaagttcatcgatgatacgctgaaagggggccaggtcattcccggctacggacacgctgtccttcgggacaccgatcctcggttcgtcctgcaaaacgagtttgccatgaagcactgcaaggatgatccaggcgtaaagctggtgacccgcctgtggaagatcataccagaggtgctcaagaagctcaacaaggtagcgaatccgtatccaaacgtcgatgcccattcgggcgtcctgctgcaacattactgtctgaaggagctgaagttctacacagttcttttcggagtttctcgggcgcttggagttctgtcccagctgatttggtccagggctttgggagccccaattgaaagaccaaagtcattttcctccatcgagatctgcaaattcatcaatgaagcagacaaaaaggcaggaaaaaagaacaataagaaaaagtgctagataacaaccgatgtttgtatgtgcaataaaatttcc

SEQ ID NO: 36039 - protein, 407 aa, DROSOPHILA
MRGLPLLFCETSSLDKNKGIYYRGKLLKDVCAKLPRVQEGTQEGTPEGCFFLLTSGSMPTKKEAQEVTNEWLKRGSVPRYCLRMIDSMDKRVHPMAQLCAASACLNPQSQFVEAYTKGARRADYWKYSYEDSMNLIAMLPTVAAAIYSNVFRDGEGSREVNYEEDWSGNFCRMLGLPEKDFVDLMRLYMILHADHESGNVSAHACHLVGTALSDPFLSFSASMCGLAGPLHGLANQEVLVWLTKLRKAIGDDPSDEELKKFIDDTLKGGQVIPGYGHAVLRDTDPRFVLQNEFAMKHCKDDPGVKLVTRLWKIIPEVLKKLNKVANPYPNVDAHSGVLLQHYCLKELKFYTVLFGVSRALGVLSQLIWSRALGAPIERPKSFSSIEICKFINEADKKAGKKNNKKKC

SEQ ID NO: 36040 - DNA, 9894 bp, DROSOPHILA
tattaaatcacttaagacctctgttactgttcgaacccacagcccactaattcgaatgcccatctttaacaaccgaataataatgggaatccaaattagaaaacccgatactgctaaaaggacttaaccctagggacattctaaggcaaatgtaggctttgattctaaaactctatttaggaacacagacgtgtggactcttctatgtgtttgttgtgtctttgttgggggtagtatatggtatatagcatatagcattggactttgagacgagagttcgttcagctatttgtagataagctactctgatcggtggcaagcaccgcagttatattggctaagcacacagcacatatttaagcaattaagtacactttcagtttcccaaagacagtataaacttaatataacctattctaagtcctcaaaaccaaccacacaatcaatcattcagggggctcactctcttaaatgcagtcaacgatgatataaatacgcgagaagggatttttgtgcttttttgaggagtttgggtataatggtactggattgtcacaggaaaggatatgaccttgctataatattaggggatgtaaaggtgatgaaattcttattgattaagtgagttctgaaggggagattattcgttataataaataggcttcttatgacattgtacgatgatttacgggcttctagttgaaatacttttaacataattactgaggaaattaattaaaaagcatacgatgcaccctcttaagaagctgaaatacggagaatgagcatgcgttcttcataatacttgttcaattttggttttttggctcacactcacacagatctaaatgaattactcccttgctaaattcaaaagctactgataacattttaaaaataaaacttaaatccttatcttagtgttcgctaacttaaattccctatagtttttggtgtttgttactaaacccgctaccgatccagcacctgcatctaaagcttagagattaatcgtatccaggtcctggcagggagcacgaggactcatatcatctgagcctccacttcctctgccatcatctcccccattgccccgcccatcggccgttatgtctgccatcgacgagtggttttggttctgattatgtcgcatatttgtgttgttgttgaccatatgatggccagtcacattgttgcccttagaatttggtccatcggccgagttcaggttgttgtgtagcacctgtgtcttcttggtgcccaagcccagaggaaaagcaaagtcctgcggcagcttgtgcataattttgccggaggttatcagacgaccaaagccctcctgaaagttcaaagatcaggtataggttaattgagttcaataaaatgatatattgatatatacctgatgggcaaaggcataacccgaacgtacggagcgacgtccacgacgtgatgaggccgttcgcctgacatcacttgaagctctggagtggatcttcttcagagatttttgccgaatctattcgtggtgttcgtatttaacatcaaaaagttgggattaccttaatgatacttaccttatccgacaggctcggatgtacatctagcaaatagaacttgtaggccaacacaggagccaccaacgccatcaccgtgatcaacatggtaacccaaaaggtcaggtccttcatagcttgagtcaaggagccaacgtaagggccaccaatcacatagttgtagaagtagtccagcacaaagtaccaaactagactaccccaaatggtcacatgattcacaacggtccaataggaggtgtacaacgatatctaaatgaaaattgaaaaattaaaagaaacccaccgattaatagatttaattgtaattttctaatataccgagaataatttatttacttacctgcgctgtattatccactataagtatggtggcgacaacagcgcccagggtcatgtgatcgctcacaacaaatccgtttgccgaaacgccatccttgtagacgccataaggaatcaggaacaggaccagtgaggtgaaggcgccgtgcaacacactgtagatgaactctcgaatgttgaacaactcgctctttagacccggagtgtagaggcgcggaaactctagactgttcttgtccgagacatcctgttcgaagacgcccaaagccaaaacgggtagcgatgtgtaaaatagattatacactgatatgaacatcgggtcgaaaaccgtctgtggaggaactaaaattagttggggcactggaaaacatatgtcggtcaacttacctgagcgctgaagccgcagaagagcgaataccagcaatggcacagtgtaaatgcaaagttcttgtagaaaaagtatctgaggaacttgcacatgcggtagtaggaccatcgaccatgtaccagtaacaatcgctcaaggtatcgaaactgggcaatggaatagtcgctggagaggacagcctgaagaccctcctgtcctgagattccaacgcctatgtgagcagctgcaggaaaaacgatttcaaatattacatttaaatatttgttatggcatcacccaacctttaatcatggacacatcgttggcaccatcgccaatggccagagtgactgcgtttttggcacgctttattagctcgacgaccagcgccttctgaagtggcgttacccgacaacagatgaccgccttgcactgcgaggcgatgtccaggaatctgtacattaagttaaaatatgtcaatgatggcgtcttgaaaattacataaaggccacacacttgttctccaattccggcgaaagacagtgcaccagggaatgaccatttaccaccagagcgaatcctgtattttcatccaccacaatggaggcagtgcctccatcttcgcttcccttttcatcaccgaacaagttattgcactcagcactgtttttgaaaaacaagagcaccagattagttcgacataacaacatgattttgaacaattaaatggaaatgtcagtgtacagagtggtaaagctgaatgagttatatgtacagagttttagttaagcaactattttggaaaatctattttggtaatgaacaaaactggacagtgactgtttgttttcgtggttctggaactggtatttgtttgaaattatttcttaagattggtatttgtacaaggaatgaggaacagacagaacgtaaacagatgttgggtgtttttaatttgtaaaaaatatttagtttgaaaaatatgtgaatatagtttacttgacgggcggaacaagcaccaatagagggttacatcctttggtgggtactactaaactgttctctttctgaggtatttattttcttacaactttatttaaaacgaaaaaaatattttgctattgaagtcaaacagtccttcaagacgaaaataaaaagaatctcaagtaaggttttaaaataaagttttaaaagataggtgaaattaaatagagttaaacatataaattaaaaaattttagatacaacgaaaaatacatgaagaagtattagacatttagctaaaatagattttgatataagaaagatattctagcacctagaagaagattaggtttaacttcagctagaaatatgtttggaaaatcattcaattttaacagctaatctatttgagatagttttaaggattgccctctacctgtccggtccgcccttattatccttatttttctcatcccacctaaaggtaaccaccgaaatagcgggcggcggaggcggcgtgggcgggaggttcgtctcctgcatgaaagccgatgtttgtgtcatggtcacgcttagcggatccatgttgctgtcgctgtttaagcgatcaaatggatcaaatcctggaaaaataacacgaaatataaatacaatcttaacttttttaaatacaaattcattctcttgtacttaccgcctggtcgaaaccggttataaatcttaatagattccttaaactgccttagctgcttttccacttcctccaccgaattgccgtccacgataaagacatccgccagttcatccgtaagcagttggcaggagtagccgatattgatggcagtttctgttggtaaaatagcaaacaaatgctagtgaaaccacgagaatttttcccttcatggcttaccctgcttgtcgccggttaggacccatatctttatgcctgcattctgcaaattagcaattgacttgggcacgccgtcctgcagtttgtcctcaattgcggtcaccccgaccagctgcatctcgctctcgatctcctcgtaaatggcattcagcttctgctccctcgagtccatcgaaagggctgcctcctgttgccgactcctccagtcgttgtagtactgctctgttaaacgccgttcagccagcgctaaagtacgtagtccttcgccggcaaatttctatgagatggagtgtgccacaaatcaaatcggggtcaggaaaatcattaagttctctcacattaaggtggtcctgggtgcgcgccttaaggtcctcctgtccgccatgcagacgatcatatatcacattgtccgctcctttgcagtagagaaccatggagtcaccgcgccggagaatcacagacatccgcttgcggacgttgttaaagtcgaggatatttaggagttcgtactcctataatattttatttaaattatgtatatttttatatgtataacaattactcacctccgtttgtcccatcacctcgatggtaatactattcggtgttcgtgtgcgaaagacaaagccaaaatttcgagcggccgaaacgagggcagcttcgtcgggactttgggcctggtactccaacttaccatcaaccgtttcggccatgaccgtgtggcagagggccaggaggcggaaaaacacatgggagtgctcttcatccgaccggacggcatccagcaacgtgcgatcgtaccagcggaagtcactctcgtgatgcggattggccgaaaagtcaacactttgaagggcctgtgaaaaacaaatagtttgctttacactcggcgaagatgaaggcatttctgagttactgtacgataagcttggctgtatacaattttaagccaggttagcatagtgtcccaaagtatataatgcttagtaaattattgtggtgttacaatggaagtatttacgattccaaagcggaaaattttctcttaaaagcgatacgcaactggcttcaacgttgaaacgttgatcatgggtagaatatgatgtaaaatacggcctcatgttacataaaggtaaaaacaagtaatgagcggtactttttacattataaacataaaaacgtttcttaaaaaataaatatttttatattttatttgcacaataacgaattcacgactctgctgtgggtatattgtgtgtatcagaaaaaagggttgtgtacatcatactttcaaaataataaatacgttttatcgtgttaaagccaaaaaaattcgggtcgggtgaaagcggcatacatacatggcggaaacatataagcaacacataacaagatactaattgataatagtgaatgtgaattgaaggacatgcagcatgcatacgtgcactctgtgaggcgacgaactccaattggtggcgaatgccttggatcgatggtggtggtgcttggtggtgctaagtgtggatgtggattgtggctcctcgtcgaggtggtgctcgagctgggagatgacaacacccagcgtggccgttgatggcgcttttttaaaccggatcttgactaatcgcttgcgattgtgacttgaatggtgcatgttgtgtgtttctgtctgttggctgtcatgcaaaatctttactttgtcgcaactgctagtgcgggacaattggcgctgcatacatccggctccactccttttgaagccgccactaattcgtcgctcctcattgcctacgggtggactaagtcctccacttccatccaacctgggtgacaaacgaccagcgtctgcatcctgacttctactgggagccgagtatcgcacatgcttgagtcccggccgcttctcgctggcgtccatcggcggagcagagcgctcgatatccgatctgggtctgtctggcagcacttgcgcctccccgctggatgtgaccaccatggaagtcttcttcgcatggacctcggccttgtgcactaggatgatggggggtggtgctgcaggtggtgctacgatagctccacttaaggggctgggtctgttgttggtgttgctattttggaaaattgtttgctgctataacgagtaatgtgagttgttgtttcttctctttttttttcttttcttttttacattgtcagacacacaattaaacaaagacccacacggttggcgggtcaagggggaatgtcatagttgaagtttgatttgaagaaacagcctcgttcgagactgaaattttttgggcagactgtgcaagaaacggacaccgacacacacaagacaacattccctcaaccaagatagaggttaaattggccttttggacccgaaaccccgacaattcgccactcacctccgtaatctcgaccaactcgccggtgcgcaggtcaatcacatcgccatagctgcgcccattgatgctgcacttgttgaaggtcatgatgttctgggtgagggtgcccgttttatccgagaatatgtactggatctggcccagctcctcgttgagcgtggtggtgcgggctttggcataggtattggtggtcggatagtacatctcctcatcccagttgatgaggaacgactgtacaaagcgtataacctgtacggaatattggtgtttgtttctcagaatggaatttaataaactggttgacattgtatacagacctctactgaaacgtagagtgagattggcacaactgtgtttaagactatggcatacgagaagaagaccagcaatccaatgactgttgctcccgtgggtatgtaatctttgggtatgatgtgctcccaaggcagatacagctggaagtgctggccaatcaggccctcccagatggcacagccaatcgcaaaaagggcacaaatcgacaccagaaagaggacgatctgaaattggtgatgcagtatatgttaattataagtaggattaatagaagtcgaaaagaactctaccccaatgataataaagttgagcaggcgatccacgccagtgctcttgaactgcgtctttccggagttctgcatcaacttggtgtccactccggcgaagaccaccacgccatagcaccactgcgtgttccggaggacgcagcccctcagcaggatcttctcgttgtccagggcgaatctctggccccgccaaatcaaggtgccatcgaatttgttcagcaggttgttgggccgctcgcaaatgatctcgccattgaagttccatagcgagtcatggcgatcacccagctcgatggtttcggtcaggcattgctttgccttgagattcgtctccccatccagttcggctgtctcgatgaaacacagaccatttggctcggatgtggacagcaacagggtgtcggcggccacgaactgattgttgtccagccgaatgacatcgcccacctgtacctccgaccacttggcctccaccaacttgccattgcgcagcgttttcgacttgcgattgtttacctgcgagtcagaaatatgacgttgctgaaaggaaaatacagattggcaattatgaagttacagcgtagtattttgtactcacaatatcatcatacgcatccttaacagccgtcagagtaagtactcctatcaggggaattgctgtggtcactggggtgagtgaggatatcgcgggtatcagctggaggaccagcaggcagaggaaatagaagttggccagccgctgaaattgctccagcagattgaatggcagaaacgtgaacagcgaatacttggaggtcttgatgtagttgttctgtaaattaatgcggattataaataatagttaaacaaatagaaaaactttatttagtgtgcattctagatgaacggttaatattgtatttacttacatgatatttgaactgggcattgaactctttatcgttggctcgaattctacgttcgttttctgtgaatataaaaataatatcttagctaggattttttaataaacataatgtggttaatatatgattaataatcctaattacagttttctatactacaaataactatactcttccaaacaattttttccttaaagttattttccattcttaatctctttttacccgaaaaatagtacgagctgcgacgccttctaatctgggaaagacgtctcaaacttggcacggactttgactccgaggtcacggaaggatctctctgcttatacagttcctggtcatcggatttgttgggtggtggattgcctcctcccggcgccaagctgtagaagctatctcctatcattaggggtgtggcaatggtttgcgtagagctgcctatattcatgccctccggttgagcgaggcaagccctcggactgccctccaaatcggaattccttctttccggctgcttaacatcctcatcttcattacagtgcaatcgtttccttcgatttttggagctcctggcgaactgaaaccatcgggttcttttgctgggcgcagagcacgaagcttcaggagcttctattccgggctcatccacatttccggctccctttgttggggtccgctcattgtcctcctggagttcagtttcgataggttggccccccagaactgaaagttccagagtgtcaggacgcctccttagccgccgggcggcctcgctgcatctcctgcccccgatcatgaccagcttaggctataggtggaacaataacgatatggggcgtccgcattactcttcattctacgaggaaaatcgaaagtttaacgtgttgctaactcccgaaagattaaaatgcaattgaaaacccatcggcaccgaacaaacttccctggagggctggctcaataagactgttccatccatcattttgatagactgctacccctcccattgacaaagagccccagacagctggaaacgattctcctcacacattgagtgtttgcacgcatatgtctgggcaataaataaataaacaaatttcttctgtgattctcggatacccagggggaatcgtcttcaaagggtatatcaaatacttgttgagatttttaactaggactgagtttgggactgaatgcgtcacgaaatatatgtacacccacattttaaagcaattaaggaaaatttactcgcgttacaatattccaaataaataggctctcatagttctatcgatttttcttaaacataaacacagtttaccctttaagcccacaatttatatcaataaaatttttgattggcttccaaaaagcattgtaggttgtcctaaactggctgatgccccgtcattccttttttgttctccacaaggcaaatatagttcaatagctgtggtgcagttcaattaaaagttcttacaataattatttattgtgtgagattttaatttgaaactcaaacaaaccgattgtaacaaaaactggtaattaatttggaattgcttttcagtggtttttaattatactggttgctgtacggtctggtgtatgaaagatttcaatttaaaaaaactttgaaaagtatctgaatgttcttgataataagcataagcttgatatcatcattggggcaatattaagttgcaagaaaaaacttttcaagaatcgcctttctggttcccttgccgttgcttttaatggttcattttataaagcacgcactgtatttactgcca

SEQ ID NO: 36041 - DNA, 5157 bp, DROSOPHILA
atgatcgggggcaggagatgcagcgaggccgcccggcggctaaggaggcgtcctgacactctggaactttcagttctggggggccaacctatcgaaactgaactccaggaggacaatgagcggaccccaacaaagggagccggaaatgtggatgagcccggaatagaagctcctgaagcttcgtgctctgcgcccagcaaaagaacccgatggtttcagttcgccaggagctccaaaaatcgaaggaaacgattgcactgtaatgaagatgaggatgttaagcagccggaaagaaggaattccgatttggagggcagtccgagggcttgcctcgctcaaccggagggcatgaatataggcagctctacgcaaaccattgccacacccctaatgataggagatagcttctacagcttggcgccgggaggaggcaatccaccacccaacaaatccgatgaccaggaactgtataagcagagagatccttccgtgacctcggagtcaaagtccgtgccaagtttgagacgtctttcccagattagaaggcgtcgcagctcgtactatttttcggaaaacgaacgtagaattcgagccaacgataaagagttcaatgcccagttcaaatatcataacaactacatcaagacctccaagtattcgctgttcacgtttctgccattcaatctgctggagcaatttcagcggctggccaacttctatttcctctgcctgctggtcctccagctgatacccgcgatatcctcactcaccccagtgaccacagcaattcccctgataggagtacttactctgacggctgttaaggatgcgtatgatgatattgtaaacaatcgcaagtcgaaaacgctgcgcaatggcaagttggtggaggccaagtggtcggaggtacaggtgggcgatgtcattcggctggacaacaatcagttcgtggccgccgacaccctgttgctgtccacatccgagccaaatggtctgtgtttcatcgagacagccgaactggatggggagacgaatctcaaggcaaagcaatgcctgaccgaaaccatcgagctgggtgatcgccatgactcgctatggaacttcaatggcgagatcatttgcgagcggcccaacaacctgctgaacaaattcgatggcaccttgatttggcggggccagagattcgccctggacaacgagaagatcctgctgaggggctgcgtcctccggaacacgcagtggtgctatggcgtggtggtcttcgccggagtggacaccaagttgatgcagaactccggaaagacgcagttcaagagcactggcgtggatcgcctgctcaactttattatcattgggatcgtcctctttctggtgtcgatttgtgccctttttgcgattggctgtgccatctgggagggcctgattggccagcacttccagctgtatctgccttgggagcacatcatacccaaagattacatacccacgggagcaacagtcattggattgctggtcttcttctcgtatgccatagtcttaaacacagttgtgccaatctcactctacgtttcagtagaggttatacgctttgtacagtcgttcctcatcaactgggatgaggagatgtactatccgaccaccaatacctatgccaaagcccgcaccaccacgctcaacgaggagctgggccagatccagtacatattctcggataaaacgggcaccctcacccagaacatcatgaccttcaacaagtgcagcatcaatgggcgcagctatggcgatgtgattgacctgcgcaccggcgagttggtcgagattacggagcagcaaacaattttccaaaatagcaacaccaacaacagacccagccccttaagtggagctatcgtagcaccacctgcagcaccaccccccatcatcctagtgcacaaggccgaggtccatgcgaagaagacttccatggtggtcacatccagcggggaggcgcaagtgctgccagacagacccagatcggatatcgagcgctctgctccgccgatggacgccagcgagaagcggccgggactcaagcatgtgcgatactcggctcccagtagaagtcaggatgcagacgctggtcgtttgtcacccaggttggatggaagtggaggacttagtccacccgtaggcaatgaggagcgacgaattagtggcggcttcaaaaggagtggagccggatgtatgcagcgccaattgtcccgcactagcagttgcgacaaagtaaagattttgcatgacagccaacagacagaaacacacaacatgcaccattcaagtcacaatcgcaagcgattagtcaagatccggtttaaaaaagcgccatcaacggccacgctgggtgttgtcatctcccagctcgagcaccacctcgacgaggagccacaatccacatccacacttagcaccaccaagcaccaccaccatcgatccaaggcattcgccaccaattggagttcgtcgcctcacagagtgcacgcccttcaaagtgttgacttttcggccaatccgcatcacgagagtgacttccgctggtacgatcgcacgttgctggatgccgtccggtcggatgaagagcactcccatgtgtttttccgcctcctggccctctgccacacggtcatggccgaaacggttgatggtaagttggagtaccaggcccaaagtcccgacgaagctgccctcgtttcggccgctcgaaattttggctttgtctttcgcacacgaacaccgaatagtattaccatcgaggtgatgggacaaacggaggagtacgaactcctaaatatcctcgactttaacaacgtccgcaagcggatgtctgtgattctccggcgcggtgactccatggttctctactgcaaaggagcggacaatgtgatatatgatcgtctgcatggcggacaggaggaccttaaggcgcgcacccaggaccaccttaataaatttgccggcgaaggactacgtactttagcgctggctgaacggcgtttaacagagcagtactacaacgactggaggagtcggcaacaggaggcagccctttcgatggactcgagggagcagaagctgaatgccatttacgaggagatcgagagcgagatgcagctggtcggggtgaccgcaattgaggacaaactgcaggacggcgtgcccaagtcaattgctaatttgcagaatgcaggcataaagatatgggtcctaaccggcgacaagcaggaaactgccatcaatatcggctactcctgccaactgcttacggatgaactggcggatgtctttatcgtggacggcaattcggtggaggaagtggaaaagcagctaaggcagtttaaggaatctattaagatttataaccggtttcgaccaggcggatttgatccatttgatcgcttaaacagcgacagcaacatggatccgctaagcgtgaccatgacacaaacatcggctttcatgcaggagacgaacctcccgcccacgccgcctccgccgcccgctatttcggtggttacctttaggtgggatgagaaaaataaggataataagggcggaccggacagtgctgagtgcaataacttgttcggtgatgaaaagggaagcgaagatggaggcactgcctccattgtggtggatgaaaatacaggattcgctctggtggtaaatggtcattccctggtgcactgtctttcgccggaattggagaacaaattcctggacatcgcctcgcagtgcaaggcggtcatctgttgtcgggtaacgccacttcagaaggcgctggtcgtcgagctaataaagcgtgccaaaaacgcagtcactctggccattggcgatggtgccaacgatgtgtccatgattaaagctgctcacataggcgttggaatctcaggacaggagggtcttcaggctgtcctctccagcgactattccattgcccagtttcgataccttgagcgattgttactggtacatggtcgatggtcctactaccgcatgtgcaagttcctcagatactttttctacaagaactttgcatttacactgtgccattgctggtattcgctcttctgcggcttcagcgctcagacggttttcgacccgatgttcatatcagtgtataatctattttacacatcgctacccgttttggctttgggcgtcttcgaacaggatgtctcggacaagaacagtctagagtttccgcgcctctacactccgggtctaaagagcgagttgttcaacattcgagagttcatctacagtgtgttgcacggcgccttcacctcactggtcctgttcctgattccttatggcgtctacaaggatggcgtttcggcaaacggatttgttgtgagcgatcacatgaccctgggcgctgttgtcgccaccatacttatagtggataatacagcgcagatatcgttgtacacctcctattggaccgttgtgaatcatgtgaccatttggggtagtctagtttggtactttgtgctggactacttctacaactatgtgattggtggcccttacgttggctccttgactcaagctatgaaggacctgaccttttgggttaccatgttgatcacggtgatggcgttggtggctcctgtgttggcctacaagttctatttgctagatgtacatccgagcctgtcggataagattcggcaaaaatctctgaagaagatccactccagagcttcaagtgatgtcaggcgaacggcctcatcacgtcgtggacgtcgctccgtacgttcgggttatgcctttgcccatcaggagggctttggtcgtctgataacctccggcaaaattatgcacaagctgccgcaggactttgcttttcctctgggcttgggcaccaagaagacacaggtgctacacaacaacctgaactcggccgatggaccaaattctaagggcaacaatgtgactggccatcatatggtcaacaacaacacaaatatgcgacataatcagaaccaaaaccactcgtcgatggcagacataacggccgatgggcggggcaatgggggagatgatggcagaggaagtggaggctcagatgatatgagtcctcgtgctccctgccaggacctggatacgattaatctctaa

SEQ ID NO: 36042 - protein, 1718 aa, DROSOPHILA
MIGGRRCSEAARRLRRRPDTLELSVLGGQPIETELQEDNERTPTKGAGNVDEPGIEAPEASCSAPSKRTRWFQFARSSKNRRKRLHCNEDEDVKQPERRNSDLEGSPRACLAQPEGMNIGSSTQTIATPLMIGDSFYSLAPGGGNPPPNKSDDQELYKQRDPSVTSESKSVPSLRRLSQIRRRRSSYYFSENERRIRANDKEFNAQFKYHNNYIKTSKYSLFTFLPFNLLEQFQRLANFYFLCLLVLQLIPAISSLTPVTTAIPLIGVLTLTAVKDAYDDIVNNRKSKTLRNGKLVEAKWSEVQVGDVIRLDNNQFVAADTLLLSTSEPNGLCFIETAELDGETNLKAKQCLTETIELGDRHDSLWNFNGEIICERPNNLLNKFDGTLIWRGQRFALDNEKILLRGCVLRNTQWCYGVVVFAGVDTKLMQNSGKTQFKSTGVDRLLNFIIIGIVLFLVSICALFAIGCAIWEGLIGQHFQLYLPWEHIIPKDYIPTGATVIGLLVFFSYAIVLNTVVPISLYVSVEVIRFVQSFLINWDEEMYYPTTNTYAKARTTTLNEELGQIQYIFSDKTGTLTQNIMTFNKCSINGRSYGDVIDLRTGELVEITEQQTIFQNSNTNNRPSPLSGAIVAPPAAPPPIILVHKAEVHAKKTSMVVTSSGEAQVLPDRPRSDIERSAPPMDASEKRPGLKHVRYSAPSRSQDADAGRLSPRLDGSGGLSPPVGNEERRISGGFKRSGAGCMQRQLSRTSSCDKVKILHDSQQTETHNMHHSSHNRKRLVKIRFKKAPSTATLGVVISQLEHHLDEEPQSTSTLSTTKHHHHRSKAFATNWSSSPHRVHALQSVDFSANPHHESDFRWYDRTLLDAVRSDEEHSHVFFRLLALCHTVMAETVDGKLEYQAQSPDEAALVSAARNFGFVFRTRTPNSITIEVMGQTEEYELLNILDFNNVRKRMSVILRRGDSMVLYCKGADNVIYDRLHGGQEDLKARTQDHLNKFAGEGLRTLALAERRLTEQYYNDWRSRQQEAALSMDSREQKLNAIYEEIESEMQLVGVTAIEDKLQDGVPKSIANLQNAGIKIWVLTGDKQETAINIGYSCQLLTDELADVFIVDGNSVEEVEKQLRQFKESIKIYNRFRPGGFDPFDRLNSDSNMDPLSVTMTQTSAFMQETNLPPTPPPPPAISVVTFRWDEKNKDNKGGPDSAECNNLFGDEKGSEDGGTASIVVDENTGFALVVNGHSLVHCLSPELENKFLDIASQCKAVICCRVTPLQKALVVELIKRAKNAVTLAIGDGANDVSMIKAAHIGVGISGQEGLQAVLSSDYSIAQFRYLERLLLVHGRWSYYRMCKFLRYFFYKNFAFTLCHCWYSLFCGFSAQTVFDPMFISVYNLFYTSLPVLALGVFEQDVSDKNSLEFPRLYTPGLKSELFNIREFIYSVLHGAFTSLVLFLIPYGVYKDGVSANGFVVSDHMTLGAVVATILIVDNTAQISLYTSYWTVVNHVTIWGSLVWYFVLDYFYNYVIGGPYVGSLTQAMKDLTFWVTMLITVMALVAPVLAYKFYLLDVHPSLSDKIRQKSLKKIHSRASSDVRRTASSRRGRRSVRSGYAFAHQEGFGRLITSGKIMHKLPQDFAFPLGLGTKKTQVLHNNLNSADGPNSKGNNVTGHHMVNNNTNMRHNQNQNHSSMADITADGRGNGGDDGRGSGGSDDMSPRAPCQDLDTINL

SEQ ID NO: 36043 - DNA, 2772 bp, DROSOPHILA
atatgttcaatatacttatattacaactttaaacaagtctatgcaaataataaaaatcagatattatacataagaaagtgcgatggagattaaatggcatatctgtgctgattaacttttttttaggttgcccatagtctccaattaaattacttccctagacccataatcaattctaccgttccttggtttatctccctcattcaatcttcctgttcttccctttctgcatacattagcgctttcaatcgccttctgggccatttctttccgattgaaatccgccaaaatctctcttggcctaggctatcaccaccatcaattcgcgttgcatctataaatagcatcttgttgcactgtccgtatccgtgggattcgcgagtgagccgtgggattaccgacgtattgccttccattggccgcagaccagaaatgcgagaggtggccaatgtcaatgccatggccatgggcgcatatggccaaatgcaaatgcgaaaccgaaacagaaacagaatcgaaatcgcaatcggaagcaaagagccaaaaagcgatggaggagaagcactacaaaataatccaacggtcgccgcaagagaaacacttcccatttcttccggccgcaaagagaggtgcccgggcggtgattaaatcagttaagagccattggccattgcagccaggtctcctctacccggagccaaatccccctggtcatcgcaatcaacccattcccctctcccattgccgcccaaattcattggcgcctttcccttccgcctttggctgttgcgcattttgtgttttgctctcaacgttcattttggccttctttttctggccaaatgatttaatttcatgtatttcgctgtgcggcaatggcgatgcttattagttgcaatttgccagctctggcataagtttactctagccaaagccaacagcaagcaccgcaaactaaaccaaataaataaaataattgccttcccaagaagttgatagaatgggcaaaaataagggtggtggcggcggcggtggaggaggaggtggcggtggtggaggcgggggcaatgtaagcaatatttgtgttatgcaacttgcgttctaattgtgagtctaactacttgtaatcctcatcttagtgccagctcattcagctcatggtcccaccaaacttccaagtagcaatttaacaatatttaactttatccctactttccaacaattttaaaataattcgttgaccaactttctaaacataaatttataaaagcattgccaaattaaaaaaaaaaactttagtgcactagaactattaactttgagattaagccttgcatacagttttttaggaaggtgtttcgtgctacctgtattaatacgttattgtagaccacaaataatggttagattacattttatcatgcggataatagctgctgctgtatgtaattagagaactcctggtgctttggaacaagggtccccccattgcaatcctggcacaactaacctttttctcatttactgacttcgctgggcaaccttaaacaaccgtggctcgttatttgctcggtcccagctcaaagcgaaatctttccgtgtttctttgcccacagaaaaagggcggcggtggtggcggaggcggcggcggaggtggctccggaaataaaaacaaaggcggcgatggaggcggcggtgacaaaggtggagccaagaaaggacaagaccaaaaggcagccgcaggcggtggcaagaagggaggcaagaaatagcaaccgtggcaacatcaaagcgcattaaaaattacaaatttagagttaagttgaaattaaaagtgatatcagggtgtatatacgagtatctctataatgtatgtgactttcttacaatttactgggcgctgcccgcctcttctactacaagtacgttcggatatatttatgtaggttaagcttaacaatagaagagcatcccatccgcattccgctcgaatgcacttcacaggccacttgatttgaatcctctagcgaaaccactcctgggacatcccaaagaaggaagctgcgctcgatttggatttgctgctgtctcccttgcgggctccattgccacccgacttcctcgtcggcgtcgttgtcgccgtctgagatagagggataaaatgggagatgttattaattaattagtactattaattggtagtttgtctgattaatctgttaatttgccgctggactctcagatttatagcgagcagcgaacagcaacaaatggaaagcaaacataattagagaacgatttataccggcggagatcgcagctaattacaaaacatgcgagtaacggccaagtagccactgccataaattaacatttgcccagcgatttgatttcaataattgcagcgattcattaattaccatctaaggcactcgtatacgcgcccgtaatatatacataatcattctgccgatgttctggccatccacttggaaatttcgggttgggtttcaagcgaaacttttgccaaccacttgcggacgaagtagggaggagtggttgggaaatggcggcagaaagttgcacctaattaaaatttgtcttgcggcattctggtttatttattgctggatggaccaaattagtttaattaaactgctgcttcagcttgaagaggttttcaaatttggaaatgaagcacttaataagagcaatgcggctattttgctcactcttaataagtattggctaaacaatcaatatcatgcagca

SEQ ID NO: 36044 - DNA, 225 bp, DROSOPHILA
atgggcaaaaataagggtggtggcggcggcggtggaggaggaggtggcggtggtggaggcgggggcaataaaaagggcggcggtggtggcggaggcggcggcggaggtggctccggaaataaaaacaaaggcggcgatggaggcggcggtgacaaaggtggagccaagaaaggacaagaccaaaaggcagccgcaggcggtggcaagaagggaggcaagaaatag

SEQ ID NO: 36045 - protein, 74 aa, DROSOPHILA
MGKNKGGGGGGGGGGGGGGGGGNKKGGGGGGGGGGGGSGNKNKGGDGGGGDKGGAKKGQDQKAAAGGGKKGGKK

SEQ ID NO: 36046 - DNA, 2333 bp, DROSOPHILA
cgaaatcgaaatcagaatggggctggaactgggaggcggacaatgggaaacgatactgataccgagtcgatcgatcgacgcttccccttggcagacaaactgatttatggcaatgcaaacggggacacatcagacatgaagacagacagttcccgaggagtaagagatcaaagcaaatcagactgtctggaaagctttatgccctggtaattttatatgcttgtactgagagctgatcatcgatcactgatcactgatcacccaacaccgatcgtgtgaccaaactggggtatttccagtcaataaaaaagtaccgccctgttgttgtttacataataaagaatcgagatgattctatcagcttaataccataccttctggcttccgcatgtctgagtttttgctcgaaaaacaatatatgtttacaaacggcgagatgactaactattcacacctcccattatggccaaaaactcgtttctagctaaattcataaattcagcatcacattgcgctagatacaaacgttataagcctacctaacaactttaaaattataaatctcttagtcgcaaattgtactttccaatgaaaggaatccccttcgaatctggttaattctttaaacaaatattgaatacaactttgcattaattgggtttgatcggaaattcacgagatgttcccctgaacctgtttatagatttgtttgctttcgtcatcgaatttgggaatattttgtgaaatgcacaaaataaaaccgcaaaagccggtgggaatctcaatcttctacctttcgtatttagtcacctgcgtagaacgggttccatatttggacatcgtattttgtttagattgttcttgaatctcattaatatcaagacgataaatgttcgattctgcgttccaagtcgagtataaaagctgatctcaagtgccggctaaatcagttaaccctgaaatatcatcgtcattggatgttcccgtatcgaaagtgaaaatgcgttccgcgattttgttcggccttattgtttgcctggcttttagccttgtcttgtccctggaggagtccatcaatcaatccaatgatctgtcgtcggtggaaaaggatattggccaggctgtggagtccgatgtgcgtgctaagcggcagtttggctttggtggtccctttggcggatttggaggacctttcggtggatacggcggctacggaggacttggaggctttggttatggacgtcccttctatggaggctatggccgtcccttctatggaggtttcggaagacccttctacggaggcggcttcggaggtcctttctttggttaaatctactaatacttatattgttttaccaataaactaagactgaaaacgaaagttgtgtgcgtttttcctagtgttcgggatctgcagagtcccaaattatctggcaacttgacctcgagcaaatgaatgtgtgtgacccaaagcgacgacgtgttcgaaacgggcctctcatgggggactcgggtatattttaaaaataaataacagaaaatctccatttatttattagttcgttcgccaggtcttgctcctgagccatgctaattataagtccaggagggtgtgtttgtttatgctccacgagctgtcacgatctgtttgctttcttttcgggcactttggagctcctcctctccagattaggaggcttgtgtgggagtttgtcggggtttgcggcaattatcacgtacgaatgtcataattatcatttggactttattagctggacctctgggccaatctctgtctgtctgcctagatgcgatggttctttgttctgcagaagaaatttcgagtagcccagtgcaaaagaattatgtaaatatttaagggatgtcatcagacttttttttgcgctttcaacttttctgcaatgctgcagccattaatcaagttaacaattaggcatttagcagtcagctaatcaaatttgcagcatatgcgttaaataccacataaagttttattggaccatcgcaatgatgtactaatccccttctaatcaacatgaaagccacggaaattatcctccgctcacttgtgcatatcaatttgcggccaaaaccaccaatagattccaatcaaaggttcgaggggttcgcgcaaacaaaacgcccaactcgatgacttaccccaaaacacagtacgccctcgattcgaggattcaggacagtggcataggaatggagtggagtgggtctgggtggtgctgtcattgtttaattgtcaatagacatcggcctctatcaatatcataaaagctaataactctcggttggct

SEQ ID NO: 36047 - DNA, 333 bp, DROSOPHILA
atgcgttccgcgattttgttcggccttattgtttgcctggcttttagccttgtcttgtccctggaggagtccatcaatcaatccaatgatctgtcgtcggtggaaaaggatattggccaggctgtggagtccgatgtgcgtgctaagcggcagtttggctttggtggtccctttggcggatttggaggacctttcggtggatacggcggctacggaggacttggaggctttggttatggacgtcccttctatggaggctatggccgtcccttctatggaggtttcggaagacccttctacggaggcggcttcggaggtcctttctttggttaa

SEQ ID NO: 36048 - protein, 110 aa, DROSOPHILA
MRSAILFGLIVCLAFSLVLSLEESINQSNDLSSVEKDIGQAVESDVRAKRQFGFGGPFGGFGGPFGGYGGYGGLGGFGYGRPFYGGYGRPFYGGFGRPFYGGGFGGPFFG

SEQ ID NO: 36049 - DNA, 2543 bp, DROSOPHILA
ctggccaatcgagttcgtctgcacgcgctccaagtccgtggtaccgtagaacttcaccaaatccacctcgggtatcacctccatgccctggacacctttgcccaggcgaagcacacccacaatggtgagcgtcagcagaagattgccaacggtcagcaccagcagcaacaccacaatggtccagaaggcgaacgtgttgcgtccctggtgacccggatgcaggcgggagcagctgtcgctgttgtacttctcatcgaagtaatcgcccgtatccgttttcgagtcgtcgcgacaaaagtccaagtccggcacaactcctccaatgggcagcgtcacagagagcgcgttctccgagttggcgtcgtcggaatatgacggcgatggtccacggatgaaggtgttctcgaatgtgtgcatcattggattgaattgaattcctggcgagttgaactcaaaaaaccgtttgcacaattgctgtattcagtgcaaggaaattgggcatgtacatgtgagagattcaattgttggacatgcgcagtgcgttctcagccgcaagtttcgaaaaatccgatatattcgaattttgaatactttcgaaatatgaaaaagtggtttccaaattatctttacaacgagaaagtcaattttcaaaagttaatataacattttcaactgctagaactcagttaccaatatatattttttaatggagagcagaacaaaaaaaaaacaatcaattaaatgtaaaacactggttttcataatccatttaaactttcaaaaattgaattttaaaagtgtaaccataaaaagtcaattggaaccgaaccagttccgtatgattgcagcacgcagccctggcttcaagggggcttgactttggcatttttcgaagttgcgcccacagccacaccgcacatctccattttgcaaagatgtcctttaaggtgagcttttgtccaaaaactgattgccattggctaaacaagagtctcccgcaatgacacagcccattgacccgaagcgcgacgagatccggcgctatctagagcgcggcagcgtcctggactcgctgaccaagctcttcatacgcgtgatcaaggagcggcccgagaatcccatggactacatccgtaaccacatcggcgtggtgcgccaccagcacgacaagtacgagcgcctgcagcaggatctgcagctggccaacgaggagatccagcgtctgcgcgccatcatcaacggcatcaatcccgacgtgctccagggtcatcagccagtggcttcaagtgaagtagtggtcgcaacggaggcgccacagaccgtggccgagtccactgaggcggcggagcagcagcagcagcagcagcagcaggagaacggcgagactgagctggagaaacctaacgaaagttcggcggacgttgcggagataactgccgctgtggaggcctgccagattgaggggaactcggtggtgaccaccgatgaagccgcacagccaagcccaaccgtccaagctgaagccagtggctccagtgagtagatctcagatgacagcagcacgtgccagcacacaccaaacgtaaaaacaaaaacatcccatttagaacgcattcatttagaagaaatgttaagtattttccggaatttacatgtaaataaagcgaaataaagcatgagcgcatgcagcgtattatggatttttcaaatgtgtttattgaaatcagtttcataattcatacacgttttatatcatttgtttattaatacaaaggattattgataatacatattaataatagttaatttttaaaaaacacatccttaaaatgacgggaagcggacgtttgaatagctgatgaatggtaaggagttttagggacaaactaatatatttcgctgattttcttgcagatatttctctggctggctggctggctggtccattcggtcggactgcattgtggacgaacaaaaaaaaaactgattcaaggtcgaaacttagtgcttataattcctctttatacttcttggcaagcattcgcctccacctcctcggttcaacgatttcccctcttcgattttttgtttcttgttttgttttcacttgctctatactcttaaggccaacgagcactacagggcccccacatctgtatgctttgtgaccgactggcgtccagtcgctcctctgctgctccgtttccatctaatctgcatggttatgcgcttggtgctctgctcgaacggtcagttgattaacctagtgtttaaattttggacaaaacctataaaagcgctggtgttcaaatgtgtgtacatgtgtgtgcgtgggtgaatggttggtcggtcggtagatatacatatatatatatatatacgggggctattacaaataaatatgtggcttttaatcatggtatttgtcaatgtgtttgtaattgcgatttaaatctcaatgggtgtggggtggaaggggaaaactgcagtcatctgctggaagggatgtctctggggatgtcctttgatcgtggcgctgctat

SEQ ID NO: 36050 - DNA, 543 bp, DROSOPHILA
atgacacagcccattgacccgaagcgcgacgagatccggcgctatctagagcgcggcagcgtcctggactcgctgaccaagctcttcatacgcgtgatcaaggagcggcccgagaatcccatggactacatccgtaaccacatcggcgtggtgcgccaccagcacgacaagtacgagcgcctgcagcaggatctgcagctggccaacgaggagatccagcgtctgcgcgccatcatcaacggcatcaatcccgacgtgctccagggtcatcagccagtggcttcaagtgaagtagtggtcgcaacggaggcgccacagaccgtggccgagtccactgaggcggcggagcagcagcagcagcagcagcagcaggagaacggcgagactgagctggagaaacctaacgaaagttcggcggacgttgcggagataactgccgctgtggaggcctgccagattgaggggaactcggtggtgaccaccgatgaagccgcacagccaagcccaaccgtccaagctgaagccagtggctccagtgagtag

SEQ ID NO: 36051 - protein, 180 aa, DROSOPHILA
MTQPIDPKRDEIRRYLERGSVLDSLTKLFIRVIKERPENPMDYIRNHIGVVRHQHDKYERLQQDLQLANEEIQRLRAIINGINPDVLQGHQPVASSEVVVATEAPQTVAESTEAAEQQQQQQQQENGETELEKPNESSADVAEITAAVEACQIEGNSVVTTDEAAQPSPTVQAEASGSSE

SEQ ID NO: 36052 - DNA, 2663 bp, DROSOPHILA
tcataattattatgttgttgctatctatctatccaggaccatgaatcctacccagaatgcctttgtatcggccttcacctttggcgaggggtggcacaactaccatcacgcgtttccgtgggactacaagacggccgaatggggttgctactccctgaatataacgacggccttcatcgacttgttcgccaagatcggctgggcctacgacctgaagacggtggctcccgacgtgatccagcgacgagtgctccgcactggcgacggtagccacgaactgtggggctggggcgataaggacctgacagcggaggatgccaggaacgtgctccttgtggataaaagtagatgacgattgatctagtactcttaaatgaaaaacttattaagtacaaactttaagcgatttcggctaagattaaatatattgatcggtaatattctaaaaggaaacttctattgccaatttatcttgcccgtctgaaaattgaaatccaagcacaatgggtagctggtctcttatcatatatttatgacggttgctaatagtgtgtgcgaattataactgatattgcttatcaaaaaagggatttctgcgagtgatcacgaccaggcttgaggcttgagttgatcaggtcgtacgtgataagactaatcagcaggtgtctgtaggaaagtttcaattttatggtgtctaagaataaatcatttcgcatcattcttgcagttcagtatgtacaggactatgtccgccaaggccttcgacttgacacccgcctccatcaattccagacagagatcgaatgcgttcttcgacaaacgcgtgtgggtgagggccgacatgccgtgcagggcgatgtggaggggcggcgatgtgtgcaggcaaaaaaaatcggcagtgatggttggctcatatttcagctccggtacgagacttggttccggatcggtttcttgcgacatcatatataggggtgttgtttctgaatggactgacagtttaaaacatgatatgcagatgtccattcacgacaataaagataaatccgccagccacggatactttgtgccagaaactttccctcgaggccaaagaaggatcatccaagatttgcatgcccacatgctgtaggcccatcagtcccacggggtcctttttctgatgacccaaaagctgctccccgaaattataaaagacgagccacaaatgccgctccatatccttccagttcacgaaggtaagcagcaggaacgcgacaacggcggtgcgtcgagacctcagcattatgaccatcaaggcactgatcacattgcacacctggaagtacttggcgaggtttcgctgcgtcggattgagggctatccgaaggtaacctgccagccaaagcagtcctgtccccgcataaatcctctttccggtcacaatcagcacggagccaacaaattgtccaatcgccatcaggttgatgcacactccagccgcaatccgcccgcatccacagttaatgttcaaaatgctctgctccagtcgccagttttggcagatgtgcatggcatccgccagaaagctggacacgatcagcatcctggccagagttgaaagcagcatctttaccacacgcttgtggtatacttggaatattataggatcaatgctcaccatcctaatcaacttgacaaatttctgtagctctaacaatctaatattcgatagccgaatatttgattaaagatttttgcaagtcggcaatagaaaaataactttcctatttattttaaatgctttgacaacttgaatgtcaaaactagagtggcaagcctttaaaacgagttaataagaacttttaaaattacaagatatctttttaatttaatcactcacagaaaggttaataataaacttaattatttacagaaaatttccgttaaacgttaagatttatatttgtatgtatcgtgtgtacaaacatgtaaattaaaatcgacagttcacactaattttaaacatagaactacttcgaagtaaaataattttgatttgcaaaatgtagcaataaatgtttaattgattggccaatgagtagtaataaccgctataaatataatcattaaagccgctgtaattaaaaagactagacagacatcgataagatacgataaaatacgctatcgatacttatctaacgcattactagttggacggaccgctttgccatcactaaaccaggagaatattgtttcgttgaaaatttgagttataaatcttaaaactttagttattctcagaatttggataacatttacgtaagttataaacaaaccaacaaagattagataaagcattacacattttaagcaattgttgacatgcacgtgatcgctaatcggaaacatcgccggcgtctgtttgaaaactgattagaaatatgcccgattatcaactaatggaaatttatttaatagattatagttttgcaagtagcacaatgcaccgaaagttgtttacatgtgaccttagcgcgcgcacgccccggtgacgtcacgcctcatgtgcctaatccccaagcgatttaacccttttgagtggcattcagaacaacgcataccggactccaattggaatctgattaataagttcgagttagtaatactcttactgagag

SEQ ID NO: 36053 - DNA, 663 bp, DROSOPHILA
atggtgagcattgatcctataatattccaagtataccacaagcgtgtggtaaagatgctgctttcaactctggccaggatgctgatcgtgtccagctttctggcggatgccatgcacatctgccaaaactggcgactggagcagagcattttgaacattaactgtggatgcgggcggattgcggctggagtgtgcatcaacctgatggcgattggacaatttgttggctccgtgctgattgtgaccggaaagaggatttatgcggggacaggactgctttggctggcaggttaccttcggatagccctcaatccgacgcagcgaaacctcgccaagtacttccaggtgtgcaatgtgatcagtgccttgatggtcataatgctgaggtctcgacgcaccgccgttgtcgcgttcctgctgcttaccttcgtgaactggaaggatatggagcggcatttgtggctcgtcttttataatttcggggagcagcttttgggtcatcagaaaaaggaccccgtgggactgatgggcctacagcatgtgggcatgcaaatcttggatgatccttctttggcctcgagggaaagtttctggcacaaagtatccgtggctggcggatttatctttattgtcgtgaatggacatctgcatatcatgttttaa

SEQ ID NO: 36054 - protein, 220 aa, DROSOPHILA
MVSIDPIIFQVYHKRVVKMLLSTLARMLIVSSFLADAMHICQNWRLEQSILNINCGCGRIAAGVCINLMAIGQFVGSVLIVTGKRIYAGTGLLWLAGYLRIALNPTQRNLAKYFQVCNVISALMVIMLRSRRTAVVAFLLLTFVNWKDMERHLWLVFYNFGEQLLGHQKKDPVGLMGLQHVGMQILDDPSLASRESFWHKVSVAGGFIFIVVNGHLHIMF

SEQ ID NO: 36055 - DNA, 4320 bp, DROSOPHILA
cagcccagggagtccatgtggtagttctggacgctctgcagcacggcgttgcactgggcacgggtctcgcagtaggagccggcggtgtggtggatgatggcgtagctgaggtagttgcccaggcctacggtccatttggcgccgcgaccaccccactccgccttggagacgacatagacgccctgggccatatactggctgcagaccaggacggcgaggaggagagccactttggaaaccatgattaccagctgtaatagttgacgatcgcttgatggagatcgtgggtctccgaggcgcttataaagcaaactgtggtcagaaatcgctgcttatcgggtagcgtaaaattgatttacgacgttaatcgatggcactttctcagattcgcgttgggggaagcaccttacttagagcttcgtcacaatctggtgattttgatttatacaattacttttttttggtgggtccttatcacctttgacggattggctcgcgcataatttcccagttacaattgtcgatcttctcacgaaactaagccaggaaagtattttttggaaaattaaattaaattatatttagcatattccaacagtggttcagaattatgtaaaggtaaaggaaagttttcaaataagtggctacttatagcgataattgcatacttccaggcaccattttcaaatagctattctccgaactactcgcagtttgaactgaaatcgaaaaatttacaagttggttttacgatctatgtcaagcagtcttttatgggttaggaaataatatctgaaaaccactatgtccttaaaatatttaataaatacgagcccctatagtaagtacgatgttcttctagtgagattttaactgacatacttttgaattaacaggcttccttaatgagagcgatttcatgcaaaatgtgagtatgctaaagaacgcatttttttcacccacaacatatacaaaattccaggtgagctgtttggcggtgatgcacttcagttacctccatcgttgcgagatggccacaaaaatcgacgactgcaaatatatcaccaacttcttcaactactatgttatgatgtactgctccttcaagatcgacaataaaatcaccgaaatagtggtgatgctcttgtttgcactaatctactgcttcttcctttgcatcctctatgagggcgtcaacagctagtaagtttatgagcatgcagtgtcatccgggatctgttgacccccaaacctcgcagctttgcaccaacactcaagatcgctgctctcaaaatgaggatcaacgagtacatggcgggcgtagtgctcgtgggcgtggccaactccacacccgatctcctggtcaacctgtcgccagtcaggatggagggtctcaccttcaacatagccatggccaatgccctaacgataatttgcttgagcggaggagcggtgtgcttcattcggccctttaggatgaatggtcacagtatcttccgggatctattgttcctcctgctcatcatcgagctggtgagattcttcatgaatgatactgctctagcgccatggataaagggtgccagtgagtttacttgataaccattaaaacccattaaaatttcatttatatttgccgtttccagtcctactgagtatctatccgatatacctgctaataaacatagtcgatctgatcctcctacgatacgcaattagaagtgagtagaagtgagtggccaatgactacaagtaatattttaaacttacattttttaagaacttcgtgcggatattgaagtgttgagacaatcaccgtcatcccgggaacatgatcttatattgactgaaaagattgttcgcttgaacaatttgcagcaggacgatgaaatccaaatccttgaatcgaaattatatcgcaagcgaacatacaacgcaggcttctttgttacacccaagcccttgattcatcacaaggaggttgacgtggaaaccaatagaagaattctccacagcaaagccaatccgaaaaatctgttcctcttcagcgagttcctccaagccatcaatccgatcgactcagagggatggtacctcagtggtacctgtgcacgcattttgcaaatcctcaaggccccggtcacgctaatgctccatttggtggttccattggtggactaccagctggtcaagcacggttggagcaagatgctcaactgtttacagatcgtactaactccattcgtgatcttcgcactagttgagagtacgtaggcgcagaaaaataggcaatgagttgatgcttacttaactgtactcaaatacattatacctacatagcttatattttagttaatgtattcctatttatttaaatttaaaataatttaattctaaattcatgttattttaccatcccctagctatgctggtgcacaaatacgcggaatggtattacgttcctcaattccggatggcaatatggtcactactggtaacgatgcccctggcaatagttgtattcttgcactctcgcactgacatcccgccattttatcactcggtaagatcgatttctttagagaaagcaataaattacccttaaacttcgacagtcttactgcgcgcttacaatctccaccgtgattatattcttttggatttgtgcctgggaaatggatgcgctgatatccataattggggtcgtctttgatctggccccgtcctacatgagcatcaccttcaactcggtgtccgctgccacagctgacttaatagcctacgcacatctcgccaagcatggatacggaaagatggcttttggagccatcatcggtggttctgtttatagttagtggtaaaagtcgataattgcgtgctagactatccaatgtcaattttcagcatctaaaattgttttcaaatctcagaaaaccagtttctctaggaatcatgctcatcaatcatcaatcaatgatttggcttctgctttaaggtcattgtagaggtcataagtaaaacagtcttttcccgcaggtttggcagtcaatgtgggcatcgaattggtcttacagaagaaactcaactcccgcggtcaagtagtcttgtatggagatgacggtgtaaccatctacatattcctggtgataaccatcacaaccaccttgtggtggtgcctcaccttcaactttgttgcccgccgatccgctgggctgttcatgtggtccctattcgtgttgttcctagtttacactacggccatagagttgcagtgggtccatggcttccaagacaatattcagattcgcccgactgcctaataaaccaatgtattgccaagacaaaaaacacgattatggtgcgtttaactttatttagcgtggtttgtgtcaaggacctagccagaccagtgggaccagccgcggatctcgttccagatgtgggtgccggggcattcggtggcgctgacctggcgatgaccgtacaggatgtagccggagctgagctggccacggttgacggcgtcgttgagcagctgctgggcggcggagatcatgttcggctccagggtgtcccagttgtagttgcccaggaagctgatgccgatgctgtaggggttccactcggcggcgtgggcgcccatgttgttccagccacgcccctcgtacacgttgccgtctccgccgatcaggaagttgtagccgatgtcgggccagcccagggagtccatgtggtagttctggacgctctgcagcacggcgttgcactgggcacgggtctcgcagtaggagccggcggtgtggtggatgatggcgtagctgaggtagttgcccaggcctacggtccatttggcgccgcgaccaccccactccgccttggagacgacatagacgccctgggccatgtactggctgcagaccaggacggcgaggaggagagccactttggaaaccatgattaccagctgtaatagttgacgatcgcttgatggagatcgtgggtcgccgtggcgcttatatagcatcagttatgcgtatgggttgccatcttatctggtggttcatggctaatttacagccctcgtcgatggcacatgtttaggttcgtattaggggaagacccttggcgtgagcctcgtcacaatcgcaatcttcgggtgttgatttattcagcgttttatgaatgtggttcttctaaataaatgctttatcaatgtgctggggtcgacacattggccggtcacctgaatgtctttgtagaaaaagtcaaggagtgttgttcgattctcgtcagttctaaatttaattctcagcatattct

SEQ ID NO: 36056 - DNA, 1749 bp, DROSOPHILA
atgcacttcagttacctccatcgttgcgagatggccacaaaaatcgacgactgcaaatatatcaccaacttcttcaactactatgttatgatgtactgctccttcaagatcgacaataaaatcaccgaaatagtggtgatgctcttgtttgcactaatctactgcttcttcctttgcatcctctatgagggcgtcaacagctactttgcaccaacactcaagatcgctgctctcaaaatgaggatcaacgagtacatggcgggcgtagtgctcgtgggcgtggccaactccacacccgatctcctggtcaacctgtcgccagtcaggatggagggtctcaccttcaacatagccatggccaatgccctaacgataatttgcttgagcggaggagcggtgtgcttcattcggccctttaggatgaatggtcacagtatcttccgggatctattgttcctcctgctcatcatcgagctggtgagattcttcatgaatgatactgctctagcgccatggataaagggtgccatcctactgagtatctatccgatatacctgctaataaacatagtcgatctgatcctcctacgatacgcaattagaaaacttcgtgcggatattgaagtgttgagacaatcaccgtcatcccgggaacatgatcttatattgactgaaaagattgttcgcttgaacaatttgcagcaggacgatgaaatccaaatccttgaatcgaaattatatcgcaagcgaacatacaacgcaggcttctttgttacacccaagcccttgattcatcacaaggaggttgacgtggaaaccaatagaagaattctccacagcaaagccaatccgaaaaatctgttcctcttcagcgagttcctccaagccatcaatccgatcgactcagagggatggtacctcagtggtacctgtgcacgcattttgcaaatcctcaaggccccggtcacgctaatgctccatttggtggttccattggtggactaccagctggtcaagcacggttggagcaagatgctcaactgtttacagatcgtactaactccattcgtgatcttcgcactagttgagactatgctggtgcacaaatacgcggaatggtattacgttcctcaattccggatggcaatatggtcactactggtaacgatgcccctggcaatagttgtattcttgcactctcgcactgacatcccgccattttatcactcgtcttactgcgcgcttacaatctccaccgtgattatattcttttggatttgtgcctgggaaatggatgcgctgatatccataattggggtcgtctttgatctggccccgtcctacatgagcatcaccttcaactcggtgtccgctgccacagctgacttaatagcctacgcacatctcgccaagcatggatacggaaagatggcttttggagccatcatcggtggttctgtttatagtttggcagtcaatgtgggcatcgaattggtcttacagaagaaactcaactcccgcggtcaagtagtcttgtatggagatgacggtgtaaccatctacatattcctggtgataaccatcacaaccaccttgtggtggtgcctcaccttcaactttgttgcccgccgatccgctgggctgttcatgtggtccctattcgtgttgttcctagtttacactacggccatagagttgcagtgggtccatggcttccaagacaatattcagattcgcccgactgcctaa

SEQ ID NO: 36057 - protein, 582 aa, DROSOPHILA
MHFSYLHRCEMATKIDDCKYITNFFNYYVMMYCSFKIDNKITEIVVMLLFALIYCFFLCILYEGVNSYFAPTLKIAALKMRINEYMAGVVLVGVANSTPDLLVNLSPVRMEGLTFNIAMANALTIICLSGGAVCFIRPFRMNGHSIFRDLLFLLLIIELVRFFMNDTALAPWIKGAILLSIYPIYLLINIVDLILLRYAIRKLRADIEVLRQSPSSREHDLILTEKIVRLNNLQQDDEIQILESKLYRKRTYNAGFFVTPKPLIHHKEVDVETNRRILHSKANPKNLFLFSEFLQAINPIDSEGWYLSGTCARILQILKAPVTLMLHLVVPLVDYQLVKHGWSKMLNCLQIVLTPFVIFALVETMLVHKYAEWYYVPQFRMAIWSLLVTMPLAIVVFLHSRTDIPPFYHSSYCALTISTVIIFFWICAWEMDALISIIGVVFDLAPSYMSITFNSVSAATADLIAYAHLAKHGYGKMAFGAIIGGSVYSLAVNVGIELVLQKKLNSRGQVVLYGDDGVTIYIFLVITITTTLWWCLTFNFVARRSAGLFMWSLFVLFLVYTTAIELQWVHGFQDNIQIRPTA

SEQ ID NO: 36058 - DNA, 4050 bp, DROSOPHILA
aggaagctgatgccgatgctgtaggggttccactcggcggcgtgggcgcccatgttgttccagccacgcccctcgtacacgttgccgtctccgccgatcaggaagttgtagccgatgtcgggccagcccagggagtccatgtggtagttctggacgctctgcagcacggcgttgcactgggcacgggtctcgcagtaggagccggcggtgtggtggatgatggcgtagctgaggtagttgcccaggcctacggtccatttggcgccgcgaccaccccactccgccttggagacgacatagacgccctgggccatgtactggctgcagaccaggacggcgaggaggagagccactttggaaaccatgattaccagctgtaatagttgacgatcgcttgatggagatcgtgggtcgccgtggcgcttatatagcatcagttatgcgtatgggttgccatcttatctggtggttcatggctaatttacagccctcgtcgatggcacatgtttaggttcgtattaggggaagacccttggcgtgagcctcgtcacaatcgcaatcttcgggtgttgatttattcagcgttttatgaatgtggttcttctaaataaatgctttatcaatgtgctggggtcgacacattggccggtcacctgaatgtctttgtagaaaaagtcaaggagtgttgttcgattctcgtcagttctaaatttaattctcagcatattcttttgactttgagggaagaatttgaatacaatgagtgggcgaacgaaaaggactaaatttaacataacagaactggaccacgaatttcactacttcatcaagaatgtaagatattgtgagaatacagtgagaaattggtggccatagcatttgttggctcttacagatgagttgtagggccgtgatgagacttccgtacaactatcgctgcaggatggccacccaagtgagtgactgcaagcgcattataaactttttcaattacttcaggatgatgtactgctcaattgacatcgatgacaaagcaacagaggtcctgttcatgttgctgtttgccttcatatgtgtggcgtttctgtggctgatgtccttcaatattggtacctagtaagtttttggataaagtgcacattcctctgattgctcattcgaaatcctgcattaagtttttctccagtcctcaagatcatctcgctaaagctgcacatgaatgagtacctggcaggagttacctttctggcttttggtaactgcagtccagaaataatagctaatctgatgcccgtgagggccgatgcacccatctttaccataactgtgggtaatactctggccatcattctgctgagtggaggtacagtgtgttttctgagaccctttaggatgaacggacattccactctgcgagatctactgtttcttctcctgggtgtggaggtcctgaggtttgtgatgatcaaggagggagcagtgaccctgggagagggtataggtaggaatctattttggatttgcctcaactcactgatctttaaaacctactttcagtgctcttcttaatttacgttgtttacgtggctattaatatagctgatttggcgttgctgcggtactacatcagaagtaaggaatattcccccaattttttaattactctagttataatagcaactaattacatttaccattcagaacttcgaagagaactggactatttggagggcctaactcctccaccaataacagaaataaatgcaaagataagaaagctaatatcttgggaagagcaggatgacattgggattaaggacaccacaaagtaccgtcggtccagagacacgggaaaccacttctcaaatatgaccagtagtggctactttgtaacccccatcccagaaagacgatccgaacacgttgactacgagttaaatcgcacagcgctccatgactcggagaatcctaaaaacctacaacttttcacggagttcttccagtctctcaatcccgttgatgcagaggcgtggcagctgggtgggtggagcaatcgaatatacctgattgccaggtgccccctggtgttcgtactgcagctcttcatacccgtggtggactacgaaaagatcaagcacggctggagtaagctgctcaactgcacgcagatcgtgacgaatcctttcgtggtcattaccctggtgcactgtaggtatgcgggagtacatcagaagtgcatttgattcctaaacctcgctgaccctcagctggggtgtccagcgtctacaaaacctggcacataaccctcgacttcagcatctccatgtggtcgccgtgccttacagtcccgctagccattgtgatcttcctgcactctcgaacggatgtgccgcccagctatcaccacgtaagaagatccaaagcagcaccactgcgtgctgattagactcgaatgggtatcaaccttccttcctagctgtttattatcctcacgtttttcagttccatggtgacgctctggctcgccgtcacagaactggaagtgctctccgagattgtgggcatcgtattcaatctgtccgagagcttcatggcggtcacctttgaggctgtctccaatgccactccggacattatagccaattaccagctggccttgcagggctatgggcggatggccttcgccgccataataggaggtccagtttttggtaagcaaaagttatattttccattaatggttacctgatgtattcgatatttcagcgattttggttagcatgagcttggcctttatattcaatcacagagtacgtgaagtgggcgccaattcgtgggtgtacggcgatctgggcgacaactgctacctctttctggtaataaccattgtgaccacaatgtggtggagcgtcaccttcgatttccacgctcgtagatccgctggagttttcctgtggctcgtttacttgcagttcctcttatatgcggtctgtgtggagtgggatgttgttcatgaattttccagagatcagcactttaagccaatatgatttggaatatacatatggtcttgatatgagatatgttattaaaaatgaaacaagtgaaggaagctccttaaccagcatagctcctttcaataatatttaatcacgtatcgtttacactaagtatatttcatggatttatctcagctttgatctgatccctggtactgccaaatatgattgctttgaaaatataccagcataattgggattttgcgtcagcaaaggtactgactaattaagtgaatgaagaggaaatgctttcgaaaggcgtcggcaaaaggcgaaacactgacagaggtccattgaaatgcagaaggagactcccttggcaatctgtcctgccccgacgctccacttctccctgcatttttccacagaataaaagcgtattgcataatgaagggaaactgatggcaacgaaacgatggggaaagctccgtgttaattacggttaaagtgtctggaggaggttggtgtcccgtcaactttcatgggacggacgagtgatttgtgcgccaaagatactccaactgatacttcagctttgtagataaacaaagacaatcgatcagagaatgttttaacggagtgcaaagatattactgccaaatatattcctagcttaaactttaaagttatttaacaaatatagactacttggatttgtacaatagttgatgcccaaggttgggaaaatgtgaatattttttttggagttttcaaagtttaccctgcaccggaagatatctaaagcattctttcgatgcttcgccggagcagtattaatatcgactgcagatgtagattccacttgattccggccattatggcaactgcagctgaaacataaccattggatttaagtacaattgcataaacaagagctgctggctcaagtgtagggaaaaagacaaggcgaaagccaacttgcagcttcaactaccaaggcaaatggcacgcagaattccggcagcaataaaagcactcaacttccttcaga

SEQ ID NO: 36059 - DNA, 1683 bp, DROSOPHILA
atgatgtactgctcaattgacatcgatgacaaagcaacagaggtcctgttcatgttgctgtttgccttcatatgtgtggcgtttctgtggctgatgtccttcaatattggtacctatttttctccagtcctcaagatcatctcgctaaagctgcacatgaatgagtacctggcaggagttacctttctggcttttggtaactgcagtccagaaataatagctaatctgatgcccgtgagggccgatgcacccatctttaccataactgtgggtaatactctggccatcattctgctgagtggaggtacagtgtgttttctgagaccctttaggatgaacggacattccactctgcgagatctactgtttcttctcctgggtgtggaggtcctgaggtttgtgatgatcaaggagggagcagtgaccctgggagagggtatagtgctcttcttaatttacgttgtttacgtggctattaatatagctgatttggcgttgctgcggtactacatcagaaaacttcgaagagaactggactatttggagggcctaactcctccaccaataacagaaataaatgcaaagataagaaagctaatatcttgggaagagcaggatgacattgggattaaggacaccacaaagtaccgtcggtccagagacacgggaaaccacttctcaaatatgaccagtagtggctactttgtaacccccatcccagaaagacgatccgaacacgttgactacgagttaaatcgcacagcgctccatgactcggagaatcctaaaaacctacaacttttcacggagttcttccagtctctcaatcccgttgatgcagaggcgtggcagctgggtgggtggagcaatcgaatatacctgattgccaggtgccccctggtgttcgtactgcagctcttcatacccgtggtggactacgaaaagatcaagcacggctggagtaagctgctcaactgcacgcagatcgtgacgaatcctttcgtggtcattaccctggtgcactctggggtgtccagcgtctacaaaacctggcacataaccctcgacttcagcatctccatgtggtcgccgtgccttacagtcccgctagccattgtgatcttcctgcactctcgaacggatgtgccgcccagctatcaccacctgtttattatcctcacgtttttcagttccatggtgacgctctggctcgccgtcacagaactggaagtgctctccgagattgtgggcatcgtattcaatctgtccgagagcttcatggcggtcacctttgaggctgtctccaatgccactccggacattatagccaattaccagctggccttgcagggctatgggcggatggccttcgccgccataataggaggtccagtttttgcgattttggttagcatgagcttggcctttatattcaatcacagagtacgtgaagtgggcgccaattcgtgggtgtacggcgatctgggcgacaactgctacctctttctggtaataaccattgtgaccacaatgtggtggagcgtcaccttcgatttccacgctcgtagatccgctggagttttcctgtggctcgtttacttgcagttcctcttatatgcggtctgtgtggagtgggatgttgttcatgaattttccagagatcagcactttaagccaatatga

SEQ ID NO: 36060 - protein, 560 aa, DROSOPHILA
MMYCSIDIDDKATEVLFMLLFAFICVAFLWLMSFNIGTYFSPVLKIISLKLHMNEYLAGVTFLAFGNCSPEIIANLMPVRADAPIFTITVGNTLAIILLSGGTVCFLRPFRMNGHSTLRDLLFLLLGVEVLRFVMIKEGAVTLGEGIVLFLIYVVYVAINIADLALLRYYIRKLRRELDYLEGLTPPPITEINAKIRKLISWEEQDDIGIKDTTKYRRSRDTGNHFSNMTSSGYFVTPIPERRSEHVDYELNRTALHDSENPKNLQLFTEFFQSLNPVDAEAWQLGGWSNRIYLIARCPLVFVLQLFIPVVDYEKIKHGWSKLLNCTQIVTNPFVVITLVHSGVSSVYKTWHITLDFSISMWSPCLTVPLAIVIFLHSRTDVPPSYHHLFIILTFFSSMVTLWLAVTELEVLSEIVGIVFNLSESFMAVTFEAVSNATPDIIANYQLALQGYGRMAFAAIIGGPVFAILVSMSLAFIFNHRVREVGANSWVYGDLGDNCYLFLVITIVTTMWWSVTFDFHARRSAGVFLWLVYLQFLLYAVCVEWDVVHEFSRDQHFKPI

SEQ ID NO: 36061 - DNA, 2555 bp, DROSOPHILA
ctgtttttagaaaaacgaaacgcaaacaagttttcgctattagccatcgctcattattgttgtttaacgtacaactaagacgctctagttgctgctaatttagtaaacaaaagcattaaagccaaaaacatattgtgatgctggcgaggaaagcatcaattccttttcggccgcatctgacccgattttagctgcaacaatctgttagaacgtttttcatttggcccgaactagcctgagaagttcggatattgtaggcccaagtagttgttaccagagagtgtcgctggcattgtagacacctttacgatgttctttgttttaagttatctcgtaagactatgcatattgaataccgtgtactgaattcagagcacaggcagtcataatccattaattatgatgatattaccagcaacagtaaagttttatgtgtgtacaatatctaaatgtatactgtgtactaaatatgcaaagatattcgaataaaaattagtttatatttaatttgtgtttgcgacttcattttaatttaaagaacattataatataatttccaatttcagctgataccctaattctatttggaaattggtttcattttcaatagagttggaatgttgactttttagtttatagtgttaatcctttaacagagttgatgatatttattttaattggggaaagaaacaaaataactttgttctctactattaagtttaaaaaagagaatattctttgatcaactgacttccatagagattccatttttacattttctttttattgtttattgaggaaagaagctacataaaaattcccgatcattacatatatgtatgcatatacaaagtgatgactaataataagatttgttggtgttcccaagaaataattccccggagaaaaatacccgagactatattattgtgtgcgattgtattcttaagattttattggaactgatttttattttttttactgcatttccttagtgctcttaggccttccagttggaccaggtgcggatctcgttccagatgttggtgccggggcactcggtggagccgacctgccgatgtccgtacaggatgtatccggaaacgatctggccgcgactgaccgcatcggagagcagacccttggcagcggtgatctgagcagaggtgagggtgttggtattgtagttgcccaggaaggagatgccgatagacttggagttccagttagtggcgtgagcacccataacgttccagccgcgaccctcgtacacgttgccgtctccgccgatcaggaagttgtagccgatatcggcccagcccagggagtccatgtggtaggcctggatgttctgcagctgtgtgatgcaggcggccttggtgctgcagtagtttccagcggtgtggtggatcacggcgtagctcaggtagttggccagcgaggtcttgctcgtggcggaacggccgccccactccgacttggagatgatggtcacgccgagaacggcttgggcgcagaagagtacggccagaaggatgagagctttgtttgccatggttgcggatcgattgtgcggcctgtcgtccgatcggaccttttatactccgaacggcccagcttatcgcctgcgagccgatgtgtcaggttcgggctacggtccgggtcgtgtgcttccatctgataggagggctatctgccggccagatcctgatacgtcgatgacggagacccaatctcgcttctaatcagcccaagtggcattaattaatttgtccaagaagaggcaatatattgtgcagcctaagacctatcaaagcattgggaatacctgtccggagtagaattacctgatccgcacagcgtttattgttgtctaagagctttttgaaaattccacggctgaggttatttttaattttaattaggaacgtattactttcgacaaaccaagaataggtaaaacatttagctgtctataatttatgattattggaaactctacttgttaaattataaatacaagaagaaagaatgttgaagtcgagtatctaacagatactcaaccaaaagtgaacattttaaaattcttttggaatagatagaaattgggaagaatataaaagcttgtgcttgtgggttttaaagtgggcgtggcaaagttctgaacaaaaaacttgcacattcttgcttctatatttcctgagatctcgacgctcttgtggacatgtccaggtcgactgggttagagaatctggtttctttcttttacctttttactttattttcaacgaatcctgtacgcccttttactccagattaaacggttatatgacatttgacattttttatgaattatgacattatgatgcgtatgttttgattaatcgctttataacttttatttatcggaagaaatagtaaaacattctttacattatttactaatgcttacatttgaaaattcgcaccaagttcgaagctttagagctttatagcatttgaaacttaacaggacgtggcattaaatggtctttatagaaagtgtatattcagat

SEQ ID NO: 36062 - DNA, 555 bp, DROSOPHILA
atggcaaacaaagctctcatccttctggccgtactcttctgcgcccaagccgttctcggcgtgaccatcatctccaagtcggagtggggcggccgttccgccacgagcaagacctcgctggccaactacctgagctacgccgtgatccaccacaccgctggaaactactgcagcaccaaggccgcctgcatcacacagctgcagaacatccaggcctaccacatggactccctgggctgggccgatatcggctacaacttcctgatcggcggagacggcaacgtgtacgagggtcgcggctggaacgttatgggtgctcacgccactaactggaactccaagtctatcggcatctccttcctgggcaactacaataccaacaccctcacctctgctcagatcaccgctgccaagggtctgctctccgatgcggtcagtcgcggccagatcgtttccggatacatcctgtacggacatcggcaggtcggctccaccgagtgccccggcaccaacatctggaacgagatccgcacctggtccaactggaaggcctaa

SEQ ID NO: 36063 - protein, 184 aa, DROSOPHILA
MANKALILLAVLFCAQAVLGVTIISKSEWGGRSATSKTSLANYLSYAVIHHTAGNYCSTKAACITQLQNIQAYHMDSLGWADIGYNFLIGGDGNVYEGRGWNVMGAHATNWNSKSIGISFLGNYNTNTLTSAQITAAKGLLSDAVSRGQIVSGYILYGHRQVGSTECPGTNIWNEIRTWSNWKA

SEQ ID NO: 36064 - DNA, 2558 bp, DROSOPHILA
attcatgttattttaccatcccctagctatgctggtgcacaaatacgcggaatggtattacgttcctcaattccggatggcaatatggtcactactggtaacgatgcccctggcaatagttgtattcttgcactctcgcactgacatcccgccattttatcactcggtaagatcgatttctttagagaaagcaataaattacccttaaacttcgacagtcttactgcgcgcttacaatctccaccgtgattatattcttttggatttgtgcctgggaaatggatgcgctgatatccataattggggtcgtctttgatctggccccgtcctacatgagcatcaccttcaactcggtgtccgctgccacagctgacttaatagcctacgcacatctcgccaagcatggatacggaaagatggcttttggagccatcatcggtggttctgtttatagttagtggtaaaagtcgataattgcgtgctagactatccaatgtcaattttcagcatctaaaattgttttcaaatctcagaaaaccagtttctctaggaatcatgctcatcaatcatcaatcaatgatttggcttctgctttaaggtcattgtagaggtcataagtaaaacagtcttttcccgcaggtttggcagtcaatgtgggcatcgaattggtcttacagaagaaactcaactcccgcggtcaagtagtcttgtatggagatgacggtgtaaccatctacatattcctggtgataaccatcacaaccaccttgtggtggtgcctcaccttcaactttgttgcccgccgatccgctgggctgttcatgtggtccctattcgtgttgttcctagtttacactacggccatagagttgcagtgggtccatggcttccaagacaatattcagattcgcccgactgcctaataaaccaatgtattgccaagacaaaaaacacgattatggtgcgtttaactttatttagcgtggtttgtgtcaaggacctagccagaccagtgggaccagccgcggatctcgttccagatgtgggtgccggggcattcggtggcgctgacctggcgatgaccgtacaggatgtagccggagctgagctggccacggttgacggcgtcgttgagcagctgctgggcggcggagatcatgttcggctccagggtgtcccagttgtagttgcccaggaagctgatgccgatgctgtaggggttccactcggcggcgtgggcgcccatgttgttccagccacgcccctcgtacacgttgccgtctccgccgatcaggaagttgtagccgatgtcgggccagcccagggagtccatgtggtagttctggacgctctgcagcacggcgttgcactgggcacgggtctcgcagtaggagccggcggtgtggtggatgatggcgtagctgaggtagttgcccaggcctacggtccatttggcgccgcgaccaccccactccgccttggagacgacatagacgccctgggccatgtactggctgcagaccaggacggcgaggaggagagccactttggaaaccatgattaccagctgtaatagttgacgatcgcttgatggagatcgtgggtcgccgtggcgcttatatagcatcagttatgcgtatgggttgccatcttatctggtggttcatggctaatttacagccctcgtcgatggcacatgtttaggttcgtattaggggaagacccttggcgtgagcctcgtcacaatcgcaatcttcgggtgttgatttattcagcgttttatgaatgtggttcttctaaataaatgctttatcaatgtgctggggtcgacacattggccggtcacctgaatgtctttgtagaaaaagtcaaggagtgttgttcgattctcgtcagttctaaatttaattctcagcatattcttttgactttgagggaagaatttgaatacaatgagtgggcgaacgaaaaggactaaatttaacataacagaactggaccacgaatttcactacttcatcaagaatgtaagatattgtgagaatacagtgagaaattggtggccatagcatttgttggctcttacagatgagttgtagggccgtgatgagacttccgtacaactatcgctgcaggatggccacccaagtgagtgactgcaagcgcattataaactttttcaattacttcaggatgatgtactgctcaattgacatcgatgacaaagcaacagaggtcctgttcatgttgctgtttgccttcatatgtgtggcgtttctgtggctgatgtccttcaatattggtacctagtaagtttttggataaagtgcacattcctctgattgctcattcgaaatcctgcattaagtttttctccagtcctcaagatcatctcgctaaagctgcacatgaatgagtacctggcaggagttacctttctggcttttggtaactgcagtccagaaataatagctaatctgatgcccgtgagggccgatgcacccatctttaccataactgtgggtaatactctggccatcattctgctgagtggaggt

SEQ ID NO: 36065 - DNA, 558 bp, DROSOPHILA
atggtttccaaagtggctctcctcctcgccgtcctggtctgcagccagtacatggcccagggcgtctatgtcgtctccaaggcggagtggggtggtcgcggcgccaaatggaccgtaggcctgggcaactacctcagctacgccatcatccaccacaccgccggctcctactgcgagacccgtgcccagtgcaacgccgtgctgcagagcgtccagaactaccacatggactccctgggctggcccgacatcggctacaacttcctgatcggcggagacggcaacgtgtacgaggggcgtggctggaacaacatgggcgcccacgccgccgagtggaacccctacagcatcggcatcagcttcctgggcaactacaactgggacaccctggagccgaacatgatctccgccgcccagcagctgctcaacgacgccgtcaaccgtggccagctcagctccggctacatcctgtacggtcatcgccaggtcagcgccaccgaatgccccggcacccacatctggaacgagatccgcggctggtcccactggtctggctag

SEQ ID NO: 36066 - protein, 185 aa, DROSOPHILA; identical to SEQ ID NO: 4494

SEQ ID NO: 36067 - DNA, 3463 bp, DROSOPHILA
taaatcatctatatactttgtataccacaattttggggctttttatatatggcctacttaaagcgtttatgaacagcacttaaacgcttacaattggttgttaaaaccggcttgataattttttaagaacctttacgagcattatctttggttataaaagagtgcttctatgagcctttgctcgggctattgaatcattcccgtagtaatgtaaatcattgggatataaaatatacaatttttccatcactttaaagtgggattctaggattctatttagaacatacatttctcggtgattgggtacaccgtataatacgaatatgtataaggttccaatatcatgcaactccagattaaaatgaaatttaattacacccttagttaattggacaacttaacaattttgtttttattattacaactattgtaatcacaaattcctggacatagtgtgctcatgtttaagctactgactaaaaattaatttgaatttcactactttggaaacattcaaatattctaaatgaggtaatttcttggaaaagagcataccaatctaataaccataggctgggggccaatccatcaagcatgtcagcccacaaacaccgcagagcaatgtgttttgtttatggtttgacctttttgaattattcatgcactgacaaaaattctatgggtcaccacccaagtgcgccccaccggcacgcaaagttaataaaattcaaattcaaatccaaatccgaatggagaacaaagccagcgaacaatcgaaaagagacaattgcagagtcaataaaactaacctaccgtagagtggacgaagtggagcaccagcggtggccttgaaagtgcaagtggggtgacgcaattgtttaggagccaaaaggagtagggggtggagttgcttaactgccagctgaaccttttgtaattgcgatctcgcatttggcatcttgcatcgacagactgcttcgagcggattgcactggaggcgatgctgccatttgagaagaccttccgcaccgaagacaccaactcgctgaagatgtgcaaggagaagtgcctgcaggcgggcgagaagtgtcaggccatctcgttcgggtgagtcgtcttccacctgtcaccccttgattgcccaatttccatcttatgtatatatgtgttttccttctccttctttttttttggaattttgcagtgttcatcgacgcggaaacggcacttgtcagttgtcatcggagcagtacggctcggggggcggcgggcgtccggggggcgtgattttcgatcccgactttgatctgtacacgcgcaagacgaactgcttcgacttgagcgacaactcgattgccgctggtccgcagcccgtgcccggtcccagtcccatttcacccggaccgacgccactggatctgccgaacaggcccttggatgtgggcaatacgccagtgctggtggtcaaccccacgccacacacttcggggagtccaccgcctccgttgggaccgtccctaccgccacctggcgttggcgatcggctgtacttctcgcacgatctgtatccgctctacaagtatcccacgctttacgagagcaactatccgtcgcccaacgaggaggcctacattcccggcggctatgcagccaatgcccccgaggtggacgagcggtatcgtccccactacggacccatagaaccagcggaggatgaaggtattcggcccacgccacatagccctccaagacccatctttggattgggctacgggaatggttatagctacggatccccggagagatatacaccgccgacagggaggccatcgagtggttcttcggaggagcgacccagctatgccgcaaggccacctcgtccgacagccgatcgtccggaatatccgcccggacctccgcgtcctacggccgatcgtccggagtatccaccgcgcccctacgaaggctccacaccgccctcctatggaccacggccgagtcccagctacgatcccgatcgcgaaccacggccggactacaccaatcgaccggatccgccatccctatcgccgcaagtaggttacggaatgaatggcccatcggcacgtccaccaccaacctcttacgacggtccacctccaccacgagatgagtacgttcggaggaacggcagtgccatgaggcctggagacggatacggtggttacgacgatgacaaaacgattgctacatacttcaatccggatgactatatgcaagggaataacagtaagttttagatataaaagcttgtaaagattttgtagcttccttgctaaataatgatcttgcattaagcacttgcacttaaaatcaattaattatatattttttgttatagaccgaccaatgcccagcgatagagatagagaccggaatagggacagacttggttatcccatggatgaaatgaaaggtgagtaaacgcgtagtggttaaactcctggattccctacattcaactaattcatggattcgcgctgtccccttggctaaccccttcaccttagaggcctgtgcctataaccatataaatagacaatgacacgggtcacttgagagttgcaacaacaataaaacaactaaaatttagaattagcatggcgcacaactaaaacccattagcttttggggcccacggcgaccgactggtcaagtgacagatgacagacgcccgctcgattgacccacattcccttgcttttatttgcgtaacaaaactaaacccattagcctggcataatgctcatcggaactgggaatggggggtgtggggcggttgcagtaagcatcggcggcattattcacaatcgcataaaatacacagtggagccgaaagctccactaactaacccacccacaaaaacggtataataaataacgctgtggccaaagttttgataaatggcaagcgcaatagaatggaaatgcaggaattggggtcacccaaatggaatattaggcatttcgattctcttagatcattttgcacagaaataaggtgcaaatgttttttatttaaagttctaaccaacatttgtagtctgagtataagttccagagaaaaagcttttatctcatggagttttaaatattgaaaattgattatttatttaaagcttgatattttgtatagagttaaaactaccccgtcatattatctaaaagcatttttatttatctaccatttctaaaggtcatcgcatttaaatagtatcaggctaattaccacatttttgccagatgatccaacgaaaattaattcaaccaactattttccggtctcttcatttaatatgatctcattactttacagaagaaattgagttgtcaaatgcagaagatttatgacatttctgaaactaccaagccagatcatcaaagaacgatttgtgttttgatttcgacgcgacttcctttcggg

SEQ ID NO: 36068 - DNA, 1254 bp, DROSOPHILA
atgctgccatttgagaagaccttccgcaccgaagacaccaactcgctgaagatgtgcaaggagaagtgcctgcaggcgggcgagaagtgtcaggccatctcgttcggtgttcatcgacgcggaaacggcacttgtcagttgtcatcggagcagtacggctcggggggcggcgggcgtccggggggcgtgattttcgatcccgactttgatctgtacacgcgcaagacgaactgcttcgacttgagcgacaactcgattgccgctggtccgcagcccgtgcccggtcccagtcccatttcacccggaccgacgccactggatctgccgaacaggcccttggatgtgggcaatacgccagtgctggtggtcaaccccacgccacacacttcggggagtccaccgcctccgttgggaccgtccctaccgccacctggcgttggcgatcggctgtacttctcgcacgatctgtatccgctctacaagtatcccacgctttacgagagcaactatccgtcgcccaacgaggaggcctacattcccggcggctatgcagccaatgcccccgaggtggacgagcggtatcgtccccactacggacccatagaaccagcggaggatgaaggtattcggcccacgccacatagccctccaagacccatctttggattgggctacgggaatggttatagctacggatccccggagagatatacaccgccgacagggaggccatcgagtggttcttcggaggagcgacccagctatgccgcaaggccacctcgtccgacagccgatcgtccggaatatccgcccggacctccgcgtcctacggccgatcgtccggagtatccaccgcgcccctacgaaggctccacaccgccctcctatggaccacggccgagtcccagctacgatcccgatcgcgaaccacggccggactacaccaatcgaccggatccgccatccctatcgccgcaagtaggttacggaatgaatggcccatcggcacgtccaccaccaacctcttacgacggtccacctccaccacgagatgagtacgttcggaggaacggcagtgccatgaggcctggagacggatacggtggttacgacgatgacaaaacgattgctacatacttcaatccggatgactatatgcaagggaataacaaccgaccaatgcccagcgatagagatagagaccggaatagggacagacttggttatcccatggatgaaatgaaaggtgagtaa

SEQ ID NO: 36069 - protein, 417 aa, DROSOPHILA
MLPFEKTFRTEDTNSLKMCKEKCLQAGEKCQAISFGVHRRGNGTCQLSSEQYGSGGGGRPGGVIFDPDFDLYTRKTNCFDLSDNSIAAGPQPVPGPSPISPGPTPLDLPNRPLDVGNTPVLVVNPTPHTSGSPPPPLGPSLPPPGVGDRLYFSHDLYPLYKYPTLYESNYPSPNEEAYIPGGYAANAPEVDERYRPHYGPIEPAEDEGIRPTPHSPPRPIFGLGYGNGYSYGSPERYTPPTGRPSSGSSEERPSYAARPPRPTADRPEYPPGPPRPTADRPEYPPRPYEGSTPPSYGPRPSPSYDPDREPRPDYTNRPDPPSLSPQVGYGMNGPSARPPPTSYDGPPPPRDEYVRRNGSAMRPGDGYGGYDDDKTIATYFNPDDYMQGNNNRPMPSDRDRDRNRDRLGYPMDEMKGE

SEQ ID NO: 36070 - DNA, 6583 bp, DROSOPHILA
tggtcaggcatgattgggaaatgcagtaaagcactgataaattggccaaacacatcttgacaaaaaacaaaagacttaggaaagaaacttggtggtacaggaataagttatccttttcaatataatacacactttaactatttgaagttaaatatttttgatattacactattattgcaatacttttgaattttgtcaaggcaggcttaataactccgaggccttatacataatatatagctttaaatatagtccatccttgagcagaaaataattaaatagccataatagacccttataagcccgtaatttattggactataatctagcgtctaactgttcaggtatcacttttcctagtgcctcattaagaccgctcttattgaaacgaaataataagcatcatatcaagttgcggcatccttgagctgggtctgttaacggttggctgccccccatcagcatcgcatctcgcagcgatctgtaccctcgtattttcatctgaatcattggcgaagataggcatcttccaccgaaaaaagccccactgaaaatgctcattataccgcagaatccaaggcttctgggcaatgcgaagtgctctccgctgggcgttgggaaaaagaatccactgaaagtgggagtaattttctgagattttctcagcggcggagcgaaaagctcccggctcagaggcgcagaagcgaaaagctcggaaaacgcgcgcgattttctaatgccgtataaaaccgcaagcttgaccacagccgctgttcattcgcgattagaatcgccagcgccgcgcatccaaaatttcaaattcgtctacggaaatcgtgttcgcgtctgcgtgtcctgtgtgcgagcgggatggccagctggcccattgtttcgagcgcttgactttgcacagaaattaattagctcagaacgtaaattaagccattacgtaatcacgcccaaatcaccgcttctacacaataaactacaaaaatataaaatgggtagtatctatgggcttctgccgctgcttctgcttttgtgtcgcctccacgacggcggatcaaagttcgttagtcctacgcgacacaccgatctcagcagcaccattatcattgtggaggacgccaaaggtaaggtgccatgcttgtgggtcattccacctgggtccaagctctaggccgagtttcggagtgcgtattaaagtaatttgcataatttccatcgttctgcgtgaaaaacactccgtcttggctggcaattttcccggagattatcttcggtggagtacacggcatccaacatgactcgaacataatttactcgaaacggcagcggatgtgccgcaaaaacatggcagagagaagtaattcgatcgcaacagaaacagaaaacgacttggacaccaatgcacttgggaaaagaattgttcctcttcctgcgaatcaattttaaaaattacaattcgtgttagaaagtgaaatggctctgacaattattctgatggttttataaatgtgtatttttttatgataccaacaattgaaaagaaatcatagctttcattatcattaagtgtgcttattatttatacatcggttgttttttgttttaccaattatttagactcactgcgagggtatttaaaatgaaagataatataaagcttcaaatctataagtggttcagattttttccaagtgcagacacccataaagtaacccagccccgatcttgagttctgtcctcgcttcactgccttcgaacgttgaatggttgttatattttccgcctttttttgctgtccacaattgcgtaagacgcagcatctgcaactggcactgcaacaccaatttaatctgcctttcagcctgtttccgacgagtcctggccggaaaacggatagcaccacacttcgtgcgccgctccatatcctgcgagcgggtggaggagtgcatgcgggagtgtggtcgggagcggcgtttcatgtgcgaaggcttcaactataggctggatccctcgggtcacgggcaaggcgactgcgagctggtcgagatgccactggcccagatggacctgtactccagtccggatcgacgtgatgccaatttgctgaggcatcccgactacgattactacgagagggaccgcaatgcgccgagcagctgtcgccgcagcgcttgccaggattgttccaagggtccggttagcagtcagcctgtttacttcaagccgagtgggggagcagggggatatggcgaccgtgaccgggatcgggacagagacagggatcactatcgtccgcatagcaacacggccgtggaccattatcgtggtccatctggtcctccgggctcctcctcttacgaacaccgacctccctactcctccgagttccatggatcgcacagctcatcctcctcggcatcctcctatgaattctcctcgcatggctcgggatctagctcgggttccagttccggatactttggtcacaccccacccagtagctatggcggcgaccatccctacgtggatcgccatgactctccgcattatcgccccggaagaccggatcgttgggaaactttgccgagtagctccggttacgatagctccgcgtacaggccgccacgtccggaaacggatcgcatcgacaagtaccgtccaccgtatcgtcctggctcggattactcgccctatcgaccaccaagtcgcccgtcgcacaactacctcgatcgcgatggagcaggacctccaggtcctccggggtccaacaagaagccaaacaaatttgttccctatttgattggcggcgaggacaactggggacactacggtggtagttatggtggcagcagcaagcactcctcttcatcatcctcatcctactggggtctcaccgaatcccagaggcgcaaggatcagcacgacttcaactacttccagctgggtgcaccacatcgcgagtccaactcggtgctcagctatccaggctctggctacgaggacgattacccgcggcggcgcaacgattatcgtcaacagtggactcggcgagcgggaccagatggtaagtggcttttggggtattttaaaaattacaatagaaactttgttaccttttttcattttttgaactcgtcttaatataaattaaatgtcttaatataaattctattacttattagattctattagatcaaaaaagttcaattagacgacaaacttgtatgatgaataataattgtttatccgacagaataaatatgtgggataaagtgtagtcatttttttaaaatttcttccatctaactattgtcataaaaattgaaaatggttatatagaactcctattttattaagcctcgctcaatctcctacatcttatagtcgtggaaatcgtaaaaaattatcaattaaattaattcatacccatagaatgctcggcaaaaaccagcgagggattccggctgcacaagacggccgtgcggcacgcctacaacgtgccaaccttgacggagtgcgaacgcctctgttcggatccgcggcccagcttcgtctgccacactttcagctatcggtacaaccaggcgggcagggacaactgcatgctctgcgaccggcccatcaacatgctcgactactacgtggacatcgagccggaccgggactacgacatctactccatggcggatgatatggacgtgtgccggcagcctccaccacgacgacatgataccgctggtcctagcacagccatttctgatccgagaaacgcacgtaagttggttatcttacctattattatcctaaatatataatatattttataaatttttatattgttactatcttaaacctttctgcagaatgcttcttccgcgcaatcgatgccacacgattcttcaagtcgattgtccgcgattcgctgaccgtgcgatctgtgggcgaatgcgagatggagtgcatccgctcgaccaagttcacctgccgggcatttgccttccgatacggccagcagcgacatgccggagtcatagacaactgccagctgagtgactggccagtgcgggacatggacaaggagcggcatctcatcctggacgcagcatttgatatcttcgagcgagccagctatgggcatggatgtgaaatccagccaatagtggatgagaagcacaagaaacgtgggttgatttggggattagtaagaagtccgtaggaagtaaaagtatcatattttttctcagtctgctatttgggttacggatcaccggcgagactgcttcctccggccatcaagaaagtgatttccgtgccttccgagattgcctgcaagaaggagtgcatccgcttccgcgagacgactcccttcaagtgctttgccttcagctatgggtgagataaacgaatttcataattcaatggaagtgtaatgtcaatctccacccacattccagctcccatgccagctccttcaactgtgaactctctgacctggaccagaccgagttgaaacaggacgtgcactatgcgcacaccaaggaccgtgacttctggctcttcgcctggaatcccttcgactggacctgccgggacaaggtcaacactattgggggatcccgggtcaacaatgacaggcgcatggatatcttccgggaaccgggtaaacttaacctactaacctgttgcacctcgatccaagtgtaaataacgggttccgggtgccgttcccgtgcagcggattggcattagttgtgtattattagcattagaacttacttgtgtaacttagtttgtagcggcgatcgttgtgtaaataacgtttactagcatgtacagaggccccagtcccagcataaccgaaagacgaatccccccaaaaagctactaaccgaccgattgcatgtcaccgtttcccaatttgattccgattaccatcccctaaatcccgtgttctcgacctcactaaactcgcttcttgtccgctaaaggcgatgtggcctggcgtcactacaccgtgtccggaaagccctgccgccggagcagtccctgcgccaagaatctgatcacgggcttctactcctgcgagacggatgcctccgaggtcggctcctgggactactgctgcaaggcggaccacccgtgcggctacagcaagggattcgattatccatggtaagtggacagagctttaatgagcttaccaatctgcatgagaaagtgatacctacataatcctcgacattttccaggtgctttgtgggcgatgagtcggaccagtggcgcaagtgcagcgatcggtacttccccggaaagaacggcacccagccgacccactcgcatctgggactgcccagtgccaaggagaaacagaaacatccacatccacatcactcccagccggcgacggcggccagcagcgaatacagccagcacccacctcgacccggcggactgcagagcctcagtgacttcgccgccgcgcgtctgtggcccgtgacctacctgtacagtgagggcccgcccaatgccaccgagttcagcaacttcgtcgactgcaacaaggagtcgtgctagtggggagcgctgatttagattacgattagcagattaagacatgcttgtgtactatagataccccaatcccccattcctccaatcccgaaccctaatcccagccagatgtacttggaccgcgcggacgttgtcgttgtgatcatcattgagattggataccattgtcgtcagaatcaaatgaaagcaattaacttattaacttaactcccctgaatgttgaatgcaacccaaatgacagcttgcgtgcaggcattcttagtaccactaagctgaattgtatgtattattaataaaattagtttttacgaaaaacgcctggcacatgtttttcttgggtcgattattattttttatttagcatttaatgttaatgcgttaatgcattgcgcttcgtcactacgttcacagtgattaaaaactacaatgcagttatttaggattatttagtacgaggcatgtaaatttcttaagggaaaaccatactttcttttgaggtttttggttaactaaattactatataaacacatatttgcaattgtctttttggtgttatgttgtaagtaaaaagttttaaatcctatttcccaaaaggtgaatttgcacattcgcggtaccaatctttccgctcggagtaaaaaagctttttaagggctttgtaggcaaagcaagtaatttgttatgatagtttttaagaaattggatgtttctgcacgagtagatgtccaatgaatcagtattttaagagctacgcaactacaggcaggagcctgtatcatccgatttcattttgataataacaggtttgaaaagatgcgcatttactgagttggtaagaaactgactgataacaaacttttccagacgctatattagtcagcttttaagtgtgagtaaagctgagtccatgggtttgtccatgtcatccaccaacttgagtgctatagcaattagctttattgtcgcttaagaaatgctatggaactgtaataatgtaataat

SEQ ID NO: 36071 - DNA, 2859 bp, DROSOPHILA
atgggtagtatctatgggcttctgccgctgcttctgcttttgtgtcgcctccacgacggcggatcaaagttcgttagtcctacgcgacacaccgatctcagcagcaccattatcattgtggaggacgccaaagcctgtttccgacgagtcctggccggaaaacggatagcaccacacttcgtgcgccgctccatatcctgcgagcgggtggaggagtgcatgcgggagtgtggtcgggagcggcgtttcatgtgcgaaggcttcaactataggctggatccctcgggtcacgggcaaggcgactgcgagctggtcgagatgccactggcccagatggacctgtactccagtccggatcgacgtgatgccaatttgctgaggcatcccgactacgattactacgagagggaccgcaatgcgccgagcagctgtcgccgcagcgcttgccaggattgttccaagggtccggttagcagtcagcctgtttacttcaagccgagtgggggagcagggggatatggcgaccgtgaccgggatcgggacagagacagggatcactatcgtccgcatagcaacacggccgtggaccattatcgtggtccatctggtcctccgggctcctcctcttacgaacaccgacctccctactcctccgagttccatggatcgcacagctcatcctcctcggcatcctcctatgaattctcctcgcatggctcgggatctagctcgggttccagttccggatactttggtcacaccccacccagtagctatggcggcgaccatccctacgtggatcgccatgactctccgcattatcgccccggaagaccggatcgttgggaaactttgccgagtagctccggttacgatagctccgcgtacaggccgccacgtccggaaacggatcgcatcgacaagtaccgtccaccgtatcgtcctggctcggattactcgccctatcgaccaccaagtcgcccgtcgcacaactacctcgatcgcgatggagcaggacctccaggtcctccggggtccaacaagaagccaaacaaatttgttccctatttgattggcggcgaggacaactggggacactacggtggtagttatggtggcagcagcaagcactcctcttcatcatcctcatcctactggggtctcaccgaatcccagaggcgcaaggatcagcacgacttcaactacttccagctgggtgcaccacatcgcgagtccaactcggtgctcagctatccaggctctggctacgaggacgattacccgcggcggcgcaacgattatcgtcaacagtggactcggcgagcgggaccagatgaatgctcggcaaaaaccagcgagggattccggctgcacaagacggccgtgcggcacgcctacaacgtgccaaccttgacggagtgcgaacgcctctgttcggatccgcggcccagcttcgtctgccacactttcagctatcggtacaaccaggcgggcagggacaactgcatgctctgcgaccggcccatcaacatgctcgactactacgtggacatcgagccggaccgggactacgacatctactccatggcggatgatatggacgtgtgccggcagcctccaccacgacgacatgataccgctggtcctagcacagccatttctgatccgagaaacgcacaatgcttcttccgcgcaatcgatgccacacgattcttcaagtcgattgtccgcgattcgctgaccgtgcgatctgtgggcgaatgcgagatggagtgcatccgctcgaccaagttcacctgccgggcatttgccttccgatacggccagcagcgacatgccggagtcatagacaactgccagctgagtgactggccagtgcgggacatggacaaggagcggcatctcatcctggacgcagcatttgatatcttcgagcgagccagctatgggcatggatgtgaaatccagccaatagtggatgagaagcacaagaaactctgctatttgggttacggatcaccggcgagactgcttcctccggccatcaagaaagtgatttccgtgccttccgagattgcctgcaagaaggagtgcatccgcttccgcgagacgactcccttcaagtgctttgccttcagctatggctcccatgccagctccttcaactgtgaactctctgacctggaccagaccgagttgaaacaggacgtgcactatgcgcacaccaaggaccgtgacttctggctcttcgcctggaatcccttcgactggacctgccgggacaaggtcaacactattgggggatcccgggtcaacaatgacaggcgcatggatatcttccgggaaccgggcgatgtggcctggcgtcactacaccgtgtccggaaagccctgccgccggagcagtccctgcgccaagaatctgatcacgggcttctactcctgcgagacggatgcctccgaggtcggctcctgggactactgctgcaaggcggaccacccgtgcggctacagcaagggattcgattatccatggtgctttgtgggcgatgagtcggaccagtggcgcaagtgcagcgatcggtacttccccggaaagaacggcacccagccgacccactcgcatctgggactgcccagtgccaaggagaaacagaaacatccacatccacatcactcccagccggcgacggcggccagcagcgaatacagccagcacccacctcgacccggcggactgcagagcctcagtgacttcgccgccgcgcgtctgtggcccgtgacctacctgtacagtgagggcccgcccaatgccaccgagttcagcaacttcgtcgactgcaacaaggagtcgtgctag

SEQ ID NO: 36072 - protein, 952 aa, DROSOPHILA
MGSIYGLLPLLLLLCRLHDGGSKFVSPTRHTDLSSTIIIVEDAKACFRRVLAGKRIAPHFVRRSISCERVEECMRECGRERRFMCEGFNYRLDPSGHGQGDCELVEMPLAQMDLYSSPDRRDANLLRHPDYDYYERDRNAPSSCRRSACQDCSKGPVSSQPVYFKPSGGAGGYGDRDRDRDRDRDHYRPHSNTAVDHYRGPSGPPGSSSYEHRPPYSSEFHGSHSSSSSASSYEFSSHGSGSSSGSSSGYFGHTPPSSYGGDHPYVDRHDSPHYRPGRPDRWETLPSSSGYDSSAYRPPRPETDRIDKYRPPYRPGSDYSPYRPPSRPSHNYLDRDGAGPPGPPGSNKKPNKFVPYLIGGEDNWGHYGGSYGGSSKHSSSSSSSYWGLTESQRRKDQHDFNYFQLGAPHRESNSVLSYPGSGYEDDYPRRRNDYRQQWTRRAGPDECSAKTSEGFRLHKTAVRHAYNVPTLTECERLCSDPRPSFVCHTFSYRYNQAGRDNCMLCDRPINMLDYYVDIEPDRDYDIYSMADDMDVCRQPPPRRHDTAGPSTAISDPRNAQCFFRAIDATRFFKSIVRDSLTVRSVGECEMECIRSTKFTCRAFAFRYGQQRHAGVIDNCQLSDWPVRDMDKERHLILDAAFDIFERASYGHGCEIQPIVDEKHKKLCYLGYGSPARLLPPAIKKVISVPSEIACKKECIRFRETTPFKCFAFSYGSHASSFNCELSDLDQTELKQDVHYAHTKDRDFWLFAWNPFDWTCRDKVNTIGGSRVNNDRRMDIFREPGDVAWRHYTVSGKPCRRSSPCAKNLITGFYSCETDASEVGSWDYCCKADHPCGYSKGFDYPWCFVGDESDQWRKCSDRYFPGKNGTQPTHSHLGLPSAKEKQKHPHPHHSQPATAASSEYSQHPPRPGGLQSLSDFAAARLWPVTYLYSEGPPNATEFSNFVDCNKESC

SEQ ID NO: 36073 - DNA, 4282 bp, DROSOPHILA
ttatgtggacatgcgcgacgaggacgatccgatgaccaactgggacgatgccaagctgaaggaggtggtcgagaagaagagctccggcgaaaagcaacgtcccaccacggatattgtgggtctaagtttaaaaaactgcttaaaactcaaaactaacctcccctgtgtttcagatttgcaaattcttcctggaagctgtggaaaaatcaaagtacggctggttctgggagtgccccaacggcggaaagtgcatctaccgtcacgccttgccagctggatatgtgctgaagcgcgataagaagaaggaggaaaagcccacggaaatctcgctggtcgatttaattgagaaggagcgcgctgccctcggtcccaaccagacacgcgtcaccctcgagtccttcctcgcctggaagaagcgcaagattgccgagaagaaggccaagctggctgccgaggaagagcgcaagaagagtgacttcagcaagggcaaacagttcggcatctctggtcgcgaaatgttcagcttcaatccggatctggtcgacgacggacccatggaggagggcgacgctgctttcgacgtctacaacagggaggacgacgacgataatgccgtcgagttcaaggaactggatctggctgccctgtcgctggccgccaaggaggtggacggctcgggcaccattgcctccaccaatcgactactggaccaggcaaccgaagcagccaaaaccgccgcagccgaggacgcagcggccgacgaggatggcccatcgtcgtctgcacccgccaacgatgctgcccccatcaacaaggatctctttgttgatctggccggcgaactggatgacctagatctggacgatgaggacgatgactagtcctccgcgtagtttgtttgaaatgagtttgaaattgatttctgccttttagctacccttcaatcaataaagttgtggctcttaattgttgcatttctggaaatgaaacgtatgcgtttacaagcaagttttctctatttactgaatgaatacacgtcccattactacaataatcacttttgtttataaaaatacacacacttaacaaaactaactaaatcatcgcatgcctaccaaaatcctggaggcaaaactccgacagcctgtgcaatctgccgctcacgcaggaacttggccaggagcatttccagccgtgtcttcggaccaccttcgtcgtaggctgccagctgaggcatgtagatattctgaatgtagaccagcagcttgacgaactgcttgccgtaggtgcgccacaactcgaagccgagggtctggagaatctccatgatcaaggtagcactaatatcgggcaatggtttcacatgcaccatgtgcgctagccagagccatccctcattcagctcgaagcattcatccggtccagctgcctttcgcccttgactaatgatcacagctgcgtagagccgagcgagtcccgtttgacgcttaaggtaaatgtccggtttctccagctcgtttttatccgtcagccgatagcctatggtcttcagatactgctccggagtctgtccctgctgctggggtataacgtaaggcaccagaaagggtgactctttgtacatgtaggcgagaaaaaccttaccaaaatccggcaacagcttccaaaaagttattatcaccgaggcaaagggaaaggcggcctggggattgctgcatatggcagtctccgtttgactgacaaacttcttggccataagtagcatgcaatagtctcgggccagcggatggtcgttaatagttatggtgccattcatcaccttggtaggctggccggcaaagaagctgtacagcttgtcaaagttctgggctagatgctgcggactaactgctgaaatggcgttgaggggcaggtttattgccctctggcaaccggtgcgatactgcttaagggattcctccgtttgcagcggctttacggcatccactttggactgatacagtgctaggatatcgttgtagaacttcagacggtctgggtgaacagaagtagatgtcgccgtggccgctggtggcacatcttgggattttggctcaagcggagcgggaacattggccgcatcggccttggcagtctcggcctcttgttgtttttccttagccgccgattcctccttttccttccttagcttttcctgctcctccagcttttgttgctcctccagcttttgtcgctcttcctcctgctgctgctgcctttgtcgctcgtcttccagcttcttggcggcctccattttgagctgctgctggatctgttcggagaactcggccagctgcttaatgatgtccagctccagagcatccaggctcttgcagaactcttccgccttgattatggagcagaggaactggctctgcatctcgcaattgcccatcttaacggagctcacgagctgttcaaatttctggcccaactctttgagctgtgtgttttgcgcggcgcacaccttgaccgtttctggattcagagaaagcagaattttggcgatgccctcgtacttctggttgaatctcctttggcagcgggacacgccctccagggccaacttgtgcagcttctggtcaatctgttggcgcagtgccaattgctcgcgctgctgggcctctagttgtgccgcagtcatctggtcagctttctggataaggagactttcattgcgttcccgcagcgccttttgttgcaactggtcgcgctggcgttcctccttcctttgctgcgtctctcgcgacaggcgcatggcgtcctgtttgtcccttatcgcctttagctgctggcggacacacctcttaccctcctcctccagttcccgcctaacaatgctagcgttgatagcctgtaggtcgggaaagcaagatatattaggctcaaaatctattttgggcagcaggggaatctcgttattgggctctggagctgggctttcttcgggtaatggtggctcaggtgtcttccgactgccctccacccatataggttcccgatcctcgcccaaagtcctgcccgtgcacgttgcggacgccagagccgcgttgcgcaacgtcgctgccatatttagacagtccatcgcccgcatcatgtcgtccatgctctaaaaggtctcgaatagcgccaatcacaacccagtgtcttaatacgattactacttttaatttcgaatatgtttttacactttttaatcaacaaaaatatagcataagactgccaactcaatttaatattactcgcattgggcggcaatcaggattccgttattgttaaggggatacggtcttacttacgaattgaaatgctttggtccagcgattccgaactcgaatttttaaaatatattattagtgcaaactttatttaacttacttttaagacagtatacataagtatacagtctatataatttgctttccactttatgataaaaccaaaattaacgattattcattcaatgcaagcaagagattcaatgaacaaatttgcgataccccagtaaacatggtatattttcgcgaatgtttcacggtctctctagtcaaaacaacacataaatgaggcgattaaataatttagtgactttcttcacagccataactgccttcttcttcggtagttttctcacaaagatactcagctccgtagaccaatgtccggcgcaccgcagcagaatcccccacctggagccgcacccgaacctcttcctcatggtgttggtgctaagcgcaccgcacaatgccgatgagaggaacgcgatgcggaggacctggttggcaaatgccggccaatccatcgcacagccctacctgcccgaggaactgatttatcttccgacattcaacgcccagggccacttgcaggtggagctggtggcggagcaggcgagccggctaaggcagtacacgaattggcagcaaagcctgctgacggaaggtcctccaaggaccaaaaggctgatcaccgtgaagcacgtattttccattggcacactagatttaagcagttccgcgctggcggagctggagaaggagcagaatcaaaacaacgatctcttgctgttgaaccgccaccatgacacatacaagaatcttaccgcgaagctcatgcagtccctgtatatcctgagacgccactacgagttctcgtatatgctgaaagtggacgacgatacctatgttaagctggacagtctagttaatacgctggtttcctacgatcgcaagttgctgcgcaa

SEQ ID NO: 36074 - DNA, 2282 bp, DROSOPHILA
agtaatattaaattgagttggcagtcttatgctatatttttgttgattaaaaagtgtaaaaacatattcgaaattaaaagtagtaatcgtattaagacactgggttgtgattggcgctattcgagaccttttagagcatggacgacatgatgcgggcgatggactgtctaaatatggcagcgacgttgcgcaacgcggctctggcgtccgcaacgtgcacgggcaggactttgggcgaggatcgggaacctatatgggtggagggcagtcggaagacacctgagccaccattacccgaagaaagcccagctccagagcccaataacgagattcccctgctgcccaaaatagattttgagcctaatatatcttgctttcccgacctacaggctatcaacgctagcattgttaggcgggaactggaggaggagggtaagaggtgtgtccgccagcagctaaaggcgataagggacaaacaggacgccatgcgcctgtcgcgagagacgcagcaaaggaaggaggaacgccagcgcgaccagttgcaacaaaaggcgctgcgggaacgcaatgaaagtctccttatccagaaagctgaccagatgactgcggcacaactagaggcccagcagcgcgagcaattggcactgcgccaacagattgaccagaagctgcacaagttggccctggagggcgtgtcccgctgccaaaggagattcaaccagaagtacgagggcatcgccaaaattctgctttctctgaatccagaaacggtcaaggtgtgcgccgcgcaaaacacacagctcaaagagttgggccagaaatttgaacagctcgtgagctccgttaagatgggcaattgcgagatgcagagccagttcctctgctccataatcaaggcggaagagttctgcaagagcctggatgctctggagctggacatcattaagcagctggccgagttctccgaacagatccagcagcagctcaaaatggaggccgccaagaagctggaagacgagcgacaaaggcagcagcagcaggaggaagagcgacaaaagctggaggagcaacaaaagctggaggagcaggaaaagctaaggaaggaaaaggaggaatcggcggctaaggaaaaacaacaagaggccgagactgccaaggccgatgcggccaatgttcccgctccgcttgagccaaaatcccaagatgtgccaccagcggccacggcgacatctacttctgttcacccagaccgtctgaagttctacaacgatatcctagcactgtatcagtccaaagtggatgccgtaaagccgctgcaaacggaggaatcccttaagcagtatcgcaccggttgccagagggcaataaacctgcccctcaacgccatttcagcagttagtccgcagcatctagcccagaactttgacaagctgtacagcttctttgccggccagcctaccaaggtgatgaatggcaccataactattaacgaccatccgctggcccgagactattgcatgctacttatggccaagaagtttgtcagtcaaacggagactgccatatgcagcaatccccaggccgcctttccctttgcctcggtgataataactttttggaagctgttgccggattttggtaaggtttttctcgcctacatgtacaaagagtcaccctttctggtgccttacgttataccccagcagcagggacagactccggagcagtatctgaagaccataggctatcggctgacggataaaaacgagctggagaaaccggacatttaccttaagcgtcaaacgggactcgctcggctctacgcagctgtgatcattagtcaagggcgaaaggcagctggaccggatgaatgcttcgagctgaatgagggatggctctggctagcgcacatggtgcatgtgaaaccattgcccgatattagtgctaccttgatcatggagattctccagaccctcggcttcgagttgtggcgcacctacggcaagcagttcgtcaagctgctggtctacattcagaatatctacatgcctcagctggcagcctacgacgaaggtggtccgaagacacggctggaaatgctcctggccaagttcctgcgtgagcggcagattgcacaggctgtcggagttttgcctccaggattttggtaggcatgcgatgatttagttagttttgttaagtgtgtgtatttttataaacaaaagtgattattgtagtaatgggacgtgtattcattcagtaaatagagaaaacttgcttgt

SEQ ID NO: 36075 - protein, 677 aa, DROSOPHILA
MDDMMRAMDCLNMAATLRNAALASATCTGRTLGEDREPIWVEGSRKTPEPPLPEESPAPEPNNEIPLLPKIDFEPNISCFPDLQAINASIVRRELEEEGKRCVRQQLKAIRDKQDAMRLSRETQQRKEERQRDQLQQKALRERNESLLIQKADQMTAAQLEAQQREQLALRQQIDQKLHKLALEGVSRCQRRFNQKYEGIAKILLSLNPETVKVCAAQNTQLKELGQKFEQLVSSVKMGNCEMQSQFLCSIIKAEEFCKSLDALELDIIKQLAEFSEQIQQQLKMEAAKKLEDERQRQQQQEEERQKLEEQQKLEEQEKLRKEKEESAAKEKQQEAETAKADAANVPAPLEPKSQDVPPAATATSTSVHPDRLKFYNDILALYQSKVDAVKPLQTEESLKQYRTGCQRAINLPLNAISAVSPQHLAQNFDKLYSFFAGQPTKVMNGTITINDHPLARDYCMLLMAKKFVSQTETAICSNPQAAFPFASVIITFWKLLPDFGKVFLAYMYKESPFLVPYVIPQQQGQTPEQYLKTIGYRLTDKNELEKPDIYLKRQTGLARLYAAVIISQGRKAAGPDECFELNEGWLWLAHMVHVKPLPDISATLIMEILQTLGFELWRTYGKQFVKLLVYIQNIYMPQLAAYDEGGPKTRLEMLLAKFLRERQIAQAVGVLPPGFW

SEQ ID NO: 36076 - DNA, 2577 bp, DROSOPHILA
tcaaaacaacgatctcttgctgttgaaccgccaccatgacacatacaagaatcttaccgcgaagctcatgcagtccctgtatatcctgagacgccactacgagttctcgtatatgctgaaagtggacgacgatacctatgttaagctggacagtctagttaatacgctggtttcctacgatcgcaagttgctgcgcaagaggtcggagtatagggaccatgtgttgcctcagctttactggggctactttaacggccgatccacaattaaaacgaagggccagtggaaggagtctagttactaccttagcaaaaactacctgccgtatgcactgggcgggggatacgttctgtcccgaagtctgtgtgactacattgtcaataactcccaactgctatcgcactatgggtccgaggatgtctccgttggcacctggctcgccccactgcgccacgtctatcggtggcacgatcccagattcgacacctcctacgcaccgcgcaagtgtcggtcctatcacatggtgctgcacaaacgcaatgggcagatgatgagggacattcatgacggtgaactctgcagtggcattggttcgagtatattgtccgattactattacgattggacgagaacagcggacaaatgttgcgacagcttagtagcgtagtcgtgtggacaggctaaccagcgctcaactggccattctataggattttcctttccttcacgactagctaccacgactcagccggctgtgcagagctcctcgctatgctttgtatttgcagccgagcagcatcctccactgcgatggccaaaaaccaacactcgctttgcggctagtggggcacgtttgcatgcgtagaagtagtttgaaatgtcgagactgcaatggcaggtaataaaaaagtattaaagatgtacattttacaatactttactccattatgacataattcgggatgcgccacaagacaaggtaaacaattagaatggacacttagaagaacttaacgccgtggctgccgtccatctcgatcagctcacacctgcccttttcctccagcaaccggagggcactgagcagcaccgcctcgtccacgccgtaaaagtccaggtgagaggtgttctcgccggaggctatttcgtacagcgtgcagatggtgttcgtctggcccgtttcctgcacccagtcgtacaccatgttgccgtactcctcgagggtgaaccagtacacctgccactcctggcgtcgcttgtccagcggattcgcatgcccgctccgctccagctcgcccagaatggccaggacgagttccggcgagaggcggcgcttcagcgcttcgttgtggaacagcggcgagttctggtccccaatgctgagagtaaacctattcgtgtgcctgaggtatttgagaaagagatctgtccagaccttcagctgctgctgtctggtttcttcgtggggctgtagtctgaaacccgggtgttagtcgagtgatggagcatctcctggtcggaactcacgtaaagaagggtgggaaggtgtactcccagggccactggaactccgccatgctgattaactacgatctaaacatttgtttttccaatgtaagttattactaatggcctagagtgaccatatgcgctaaatagcaaaataccttgctattcaaaaaccattcaaaagtaaaaaaattcgttactttttagttttattattgtatccttatatttaatattcgcattaataaaaaaagttacgagtttccttaactttcttttgcatagcacttagcttacgaggaatttaaagccatttttgaaagcaaactatttaaattaaacacccgttttaaattttgaacccaatatcccaagaaaacacttatttgtcatttacagtaaaatgcaatccatttcttgtattttgtcttaaatagaaaaaattgtgtacattaacattttcatcgggctttttatgaactttgatttgggcgtctggttttcagtttcggtttctgctttattcaaaatctctgatttatcaattcaatgcctaggtctagaatcaatttcgcgagaatgtggcgacaaaagagggggattgcaatggcttgcatcgtcaatatacacgcacatatatactcgtatctgataaatctgctttattatttataagtaaagttctaggaggcgcaacactatacattcaatatctgctattctgtattcctctttcaaacacgcgatttccgaaccaatttagacactttatgtgtggcatgctgcgggtgcttagttactaactttatcgattgtgtgctaatgtttcgttcaagtttaacttgctgatcggatcggatcgaatcggatcagatcaaatgggatcgagctgggcctgctgcccccacggagcttccttggcttggtatgtacgacatatatggtaatcatcttgtttgcactatattttatttggtttttgtacacatgcgtgaaattctagggagaatgccattcggggagtaggaatagagtacagtttagtgttaggattggatttcagctggc

SEQ ID NO: 36077 - DNA, 525 bp, DROSOPHILA
atggcggagttccagtggccctgggagtacaccttcccacccttctttacactacagccccacgaagaaaccagacagcagcagctgaaggtctggacagatctctttctcaaatacctcaggcacacgaataggtttactctcagcattggggaccagaactcgccgctgttccacaacgaagcgctgaagcgccgcctctcgccggaactcgtcctggccattctgggcgagctggagcggagcgggcatgcgaatccgctggacaagcgacgccaggagtggcaggtgtactggttcaccctcgaggagtacggcaacatggtgtacgactgggtgcaggaaacgggccagacgaacaccatctgcacgctgtacgaaatagcctccggcgagaacacctctcacctggacttttacggcgtggacgaggcggtgctgctcagtgccctccggttgctggaggaaaagggcaggtgtgagctgatcgagatggacggcagccacggcgttaagttcttctaa

SEQ ID NO: 36078 - protein, 174 aa, DROSOPHILA
MAEFQWPWEYTFPPFFTLQPHEETRQQQLKVWTDLFLKYLRHTNRFTLSIGDQNSPLFHNEALKRRLSPELVLAILGELERSGHANPLDKRRQEWQVYWFTLEEYGNMVYDWVQETGQTNTICTLYEIASGENTSHLDFYGVDEAVLLSALRLLEEKGRCELIEMDGSHGVKFF

SEQ ID NO: 36079 - DNA, 2806 bp, DROSOPHILA
gacataaatattcgttttaattaccatttaataggcatttatttttaaaaatcggccgcgggtaaaggcctctcaccaaacaaagaaaatgtgacgagctgttttccaaaacacccaatgtttgtgtcccaaatatcgagtgttttcggccccattgctacaatatatgtatgtgttttttttttagcacataaatcgctttgaatgtatgtacaacaaaagatatggttgtttttttttccacgacccagacattttcatgtccacaaaaaatggaacaaaacaaaagtgaaaacctgaagaaaaagctgaaaagttgcgtcgcttcgggaaaaaaaaaacaatgaaaacggcaggaaaactgacggactgacaggcggacggactggcgaattgacaaaccagcccatccaaaataaataagaaatatatatgtacatatgtgtgtacttgtaaaaaagtccacggagggcaaacgggacttaaaaaggggaagaagagaacaaaagagaagcataagcgcgcaaaatgcgcggcacacttttctcaatatttcgcgttgtgtgccattgcgccgttattttgaaggtcaagtgaccaggggaacctttaccggaactagcggcgcccaccaccccctggcaacaacgcccctgcccttctgacagcagcggaaagccgttttgcattacaaaatcgcatgaaaaagggtaaagcaaaagccacgcacagtgaagcaccgctaagggcaactatccctggcgtaacaaaaagcactttgaaatttgaaaattaataaataattataaaaaattatgagaaaaaaattttgaaacaggttacatttaaaaaattgcaatctttacaagcgatcgacatagagaattttacatatattcattacaaacttttatatagataaccacacaatttgagcacgtctgtagttttccgttagcgtgcgttcactgtggcagggaatgtgaatgggcggcggtgattaacttaccacgcgtcgtgtctcgtaccgcggcaatggggccggagtcgcagttggagtcggattgggggtcggcgggcccggtggtggagcaatgggagtgggcggagtcatcgttactacctcgtgcagcacggcaaagggatccaggtcgaaggactgcggactgcttcccggcagctcgtcgaccgaaatgtccgcggagggcggcggcgagggtggtaatggattttcaaccacatagaccaaatctatttctggtgtttcggtcgttttaggtggtggtagaggtgctatgtgcactgcgggaggcgacggaacgaggctcattagctggatgtccatgtcggcctcccagctgcatttcctaggcgcctccggcggataaatctcggggcagtcgagttccatgatgaccagatcggtttgcggacacctctcctcctcagtctcgtagcgccggctcacgtcctgcgtgtgctgcacccggatgtggtccatgaacacggagaactgcaggcagatcgccggacagaaggcgcagttgaagccgaagctctgcacgtccggcgagacggtgatttccccgcacttgcggaagaaagcgtagtcctccagctgccaactgggcgacggcgactcctgcagcggcatcattgctgctgcgctttactggactccacctcttaaggaactttttcaattctcgttatttctcgttattggcgcactcgcgacgcggagactgcacttttccgaaccaacgccgctggctttccgattcaatctgcgatccaaacaaccggcaaatccgaactgcagtgtggccgaggcagtggcagtgtggccatcgctcgatggtggccaaatacaatgcgcttctgttaacgatagtgcaatattttcaaatgaaatgagctgaaatatttgtaggctctttaaagatagttgataacttaacagtaacaacaatttgttaaaaggcgtattgttccacaaaaatagtttttaagtataaaggcatgtgaataatggcgactctaacactcattttcttcaggccccaatgcttcgtaaatttgttttaccttcagtacttaatgttccattatgaatataatcaatcgttcaaattggtttcatataagaatatgaaatatttaaagtttgaaatttgaacagacgcggacatttccaattggacattctctcgtggtttgagtccgcgatagcactgtaggaatttggtatttttggtgggttcccgcggtgtattcgaaaggtacaggcacggtcacgctgagcgcaaataatatctaggcaagcgggcggttaaatagcaaaatagtcaagtaaatgtctaagtttgttcgtttctagttaaattgcggatcatacaccatgggatttgtgttatccaagctgcgggtgcgtataagcagcggcccacggcccgtgggaccccgaacgtagtatacagcgaatatactaagagccccaaaaaatatgtgtcgtgaattcgcgaatctaattatagaaagaaaagtccacggaggcggtgttggaggggctgcagacgcagatccaagcgttggagaagtacatgatcaacaccgaggagcgcaagcgccggttcgtgacgaacttcgtgggcttcaccatcggagcatatatcgtgggcttcgggctctggtggtacttctacttcccgccgaccatgcaggagtgcttcatgtacctggtaccgctgctgctattccccattgtgtgagtgctgccgtctaatccgctctaaatccggttcct

SEQ ID NO: 36080 - DNA, 806 bp, DROSOPHILA
ccggttgtttggatcgcagattgaatcggaaagccagcggcgttggttcggaaaagtgcagtctccgcgtcgcgagtgcgccaataacgagaaataacgagaattgaaaaagttccttaagaggtggagtccagtaaagcgcagcagcaatgatgccgctgcaggagtcgccgtcgcccagttggcagctggaggactacgctttcttccgcaagtgcggggaaatcaccgtctcgccggacgtgcagagcttcggcttcaactgcgccttctgtccggcgatctgcctgcagttctccgtgttcatggaccacatccgggtgcagcacacgcaggacgtgagccggcgctacgagactgaggaggagaggtgtccgcaaaccgatctggtcatcatggaactcgactgccccgagatttatccgccggaggcgcctaggaaatgcagctgggaggccgacatggacatccagctaatgagcctcgttccgtcgcctcccgcagtgcacatagcacctctaccaccacctaaaacgaccgaaacaccagaaatagatttggtctatgtggttgaaaatccattaccaccctcgccgccgccctccgcggacatttcggtcgacgagctgccgggaagcagtccgcagtccttcgacctggatccctttgccgtgctgcacgaggtagtaacgatgactccgcccactcccattgctccaccaccgggcccgccgacccccaatccgactccaactgcgactccggccccattgccgcggtacgagacacgacgcgtggtaagttaa

SEQ ID NO: 36081 - protein, 218 aa, DROSOPHILA
MMPLQESPSPSWQLEDYAFFRKCGEITVSPDVQSFGFNCAFCPAICLQFSVFMDHIRVQHTQDVSRRYETEEERCPQTDLVIMELDCPEIYPPEAPRKCSWEADMDIQLMSLVPSPPAVHIAPLPPPKTTETPEIDLVYVVENPLPPSPPPSADISVDELPGSSPQSFDLDPFAVLHEVVTMTPPTPIAPPPGPPTPNPTPTATPAPLPRYETRRVVS

SEQ ID NO: 36082 - DNA, 3177 bp, DROSOPHILA
gaaaaattaagggattgtgaaatcttagatacacttagctacttacagaacattatagcatacgtgatcattacccagaaacaaacggcgagtatgacgtcggatactatcaatatgagcattgctaccgccatgatcatagtcattattatgtagaagagcatccagctgctccgtaactagatcaaatcataagtattataatttgaaactaatcaattgtactggtatctcacccgtatactgccgatgatcaggaaaacgcagctcaggatgtgcagcataacgaagataatgaatagggtgtgacccaaatcgggaatacctatgggtgttaggatcatatccttgctctcaagtatcctgcttcacttacccgactccccaaataaagcaacaaatgtgcctccaaggatatccgctataatgtgcaaaatccctattgctatggttccgattcgcagatccacgcagcagcagcaactctgtagatatatcatggtgcaaatgtggtagtgtgtctatttgtggctatttgctatcagggtattagtatttgagtatctgagtatatggggtttttattttatgtgtacaagttctgtcactgataacaaaaatcttttgaaaaatattacttaacaagtaggttatattctaccatcttatatagtatataaatatagagataagcaagtttcgagtcttcaaaagtaaccatctatcctaatcgcaacaacttaaaaagcctcaaataacaaaatcgttatttcattcccattaaaagtatttggtttattagattacttgtgagccatcaaacactaaggttccacttcagggaatcctgccataaatacgccaggattgttctgtgtacagtcgaattgtgatttatttacattcattaacttagcattgtacagtatttacaggctgcttcagatgggactggctgagtgggtgggtttgaagacaagcaggccagcgggcagatggcttacagccagccgtgtccgtggtgggagctccagccgtggtggtcgtggtggtcatcgaagacatggtgcaccgggatctcctcgtgatggacgtggtgcaccggcacggggatctcctcgtggtggacgtggtgcacgggcacctccttgtaaatgggcaccggcacgtgcttcaccaccggcacatggaccttctgaacgtgatggtggtgcaccgtgtgcaccttgtagggcacgtggatggtgtggtgctcgctgcggatcgaaagtgaaatcggttagatcgaatgccatgtaccatcgcctgttagctaatcagttgcttgaacccagcgtcttggcagacatggctattgcatattggctattggcaattggcaattgattcgcacaattatgcgcgcattacgctgaattaaatgccaaccgccgcctgcgaaattcctaagccgcgagccaagccaagtcgagatcggctaagttcaatggtagccagtggtgggcaccatatagagactgctggagggggctggggctctaagtgctacaagcgttttgattgctcaattcgatcgcaatcggacacatatttcatagacccacggagcagtcgcagcgtttaaaaagccatgcgaccgctcgttagcttagcataaagcgggaaatgggtatttttatcgattcgctcgggttatttatggatcagttcaggtgcagatcgccgccgatactcactgtttgccaaagaagccgggactgggtgcgcagtaggccacggcgaagagggcgacgaagatctgaaaggggataaggaagttagtaagttaggtccggctagattaacgcaaatagctaactaatcagtgtgattagttttaatttggcacttcaaaatttatgttcaattctggtgaaatctaagtaatctaatgaaatgttagtccgcgattgataaacataaactaatatttttgggtgaatttatatttctgcaaaataaatgctttcgcagtttcttgaaatatctattcgagactttttaagccatcaggcgatcttggtggtatatttccaatacttcggttatcgaagtcagttttcagtgagtttgttatgtttcagttggttagttttattcacgatagtccacatgagtttaatccttttcagctccattccgcggaggtttggcttaacactttttcgaacgttatccttgtcgcacttacgaatactttcaggacggacatggtggctgggctgagctctgctgcactcgaaaggcgatactaaaaccggagcactgtcaggtggtgactgataaccacaggctgcgactcatccgttttataccgggcgccagcagcgctttgtgttgttgctgcaagccgactgcgctgcacgagaaagacgtgacgtcggtgcagcaacaacagcagcagcagcagcagcaacaacagcagcagcaacttcaacggccaagcgaaaataagcataacagtggacgcgcgactgttaacatggccaacatggtgtagtgatatgtgatttgtattaaccgtcgttggcatctgtttacgaggggttaagaccctctggtcggtggtaaagagggactgggagcggtggtccatgcttcagttgtccacaatggcagacgatcgaactttgacttggcggggctttgtgtaatacggggcaaattacgttcatttcataatcataatcgcaagacagagcgcggagtggagctaaaatcattccgaatgcatgaccaagtagcacatataccgccgctgactggatcacttagcggccttctgtagaccgccgcaaaaagtgaacgtgtgcggccggagacaaaacaaagttgtcacgctaatccaaatttcttggcccttccatatcgcttggaagacatctccaccaatcgaccttgaatgtcttctgtggtaatagtggtaactgtcgtcgctggtgtcaattgatgtgggtcagcgttggagctacaggagtccagtcttggatgtatccccagcgaaactcacatcacgacgcatggagcacgaaacacgtacgccgtaaatttgcaataaaacgcatttcgggcaattacttaacagtagcagtagatgtggcgctaatcaagcaatgcatcacacgattttgaagaaat

SEQ ID NO: 36083 - DNA, 354 bp, DROSOPHILA
atggagctgaaaaggattaaactcatgtggactatcatcttcgtcgccctcttcgccgtggcctactgcgcacccagtcccggcttctttggcaaacacgagcaccacaccatccacgtgccctacaaggtgcacacggtgcaccaccatcacgttcagaaggtccatgtgccggtggtgaagcacgtgccggtgcccatttacaaggaggtgcccgtgcaccacgtccaccacgaggagatccccgtgccggtgcaccacgtccatcacgaggagatcccggtgcaccatgtcttcgatgaccaccacgaccaccacggctggagctcccaccacggacacggctggctgtaa

SEQ ID NO: 36084 - protein, 117 aa, DROSOPHILA
MELKRIKLMWTIIFVALFAVAYCAPSPGFFGKHEHHTIHVPYKVHTVHHHHVQKVHVPVVKHVPVPIYKEVPVHHVHHEEIPVPVHHVHHEEIPVHHVFDDHHDHHGWSSHHGHGWL

SEQ ID NO: 36085 - DNA, 2712 bp, DROSOPHILA
gcgactccggatcctggagactattacactcgaggccgaaggcacagctgccgatcacatccgtggtgaacctggcacacagatcctttgcctctatctcgccgacctggaggcgacacgcctgcgttagcttctcgcccacctccaccatgttggggaacatgaatttcatcttgccggaggtgaacacctgcgtcaaattctggcgcaaccagcgccactccggtccgtccaggaagagaaggttcccggtcagtggatcgtcccgcacattatggaagagtcctcgatcggcgaagctggaaaagtccctgatcattatatcgcggatcagttccagatccatgataaacagcgacttggtcataaaagtgaagtagccgcagtagcgctccactccccgaaacttccggtagatccgcaggttgatatccgtccagtgaaggtcccttcccagcccactcatattgccgcggaagtacacgggtctttctccggcgacgccccttctgctccagtagctgtaatgccagcgtagcttgacatatagcagaagtccgacggtgaacacgagtaccaggagcgtcagcatggtacctactgctcgatagaataacaactgagtggaaaagtggggtacatttgatttgccgtctgaaaagctttcgcttcgctctcttttcggggactctctttctctatcggtcttatatgcaaagaactgcagttatctaaacatacataaacatatcttgcgtcattttaaatgagaatcaaatgatttgtaaacaaaatatatagagcgttgctaatgttcagttttcagatcaattattatttgaaaatttaaaaaacttcactggctaagcgttattagattatttacaagttttacaagtacattctaaactttccaaagttagtaaaattccgagtctatatgcgttccactatggcgctgcgagtgtccgaagctaaggggatgtctgttaggtctgaatcaccgaacttgaagcgctgacacaatgccaatcttggcctgcattttgccaaaacgcagacctatgcaactgcggggtccaaatgttccgaagggcagatatgcaaatggatggcgggagttggacttataagccttgaggcggctggaatcgaagagttttggatgtggatataagtgcggatcgtagtgaacactgtgcacaggtatcagtaatgaagttcccttctcaacgatgagctcagtattgcggaccctaaagctttcttgtgtttcgagcaaaaatttaattaattggatgttttcgaagagtttctaaaagttaagttgcgctatcaaattttccatgcttaccagacaagacctgttctggatagttaattttagctaaggcgtcgtaagtaatcgcatttccttccagaaccctttctatttcatcccttatttgattctagatctccggctggagggctagttcgtacttacaagagctcatcgtactggaggaggtctcgaatccagccaagaagaacacgatggcctgggcagccatttgctccagggtccagttgtgggagagatcaaactttgaccctccttgcctgctacttcgtcctccgctcggaggactggtccataaagtcattccgcttaatgccggtttaaccaccgacaagaagaagtcggtcaaatcatcgcgaagaatcttcatttttaactttttagccaacttggagttggtaactgtaaatgcggccctttcttctgaactcggctttgggattcgggatccactatgtgccgattcccttgatgtttgcaatcagcggtagaggacgctcatgggacactccccgttctggcccaatatgtgtaggtgttgtaatagaatctatataagccaacattgggaccaaactgaataatgcgagagtgagccgcatggcgatcaagatacttctttggattaagctatccagcacactggtacgcgaagtattttcttgaaagcttattgttaggttctaacgaattttcttcatagatctcgggagcttaatcggcaatcaagcaaacaatcaaacatatgtacaatatacatataaacatttgctcagcttttgagtcgacaaagctttttcccatggtgaactagacggtactagaagataaggttgtaaacaaatactatatacattgtttagtttaagtgtactattgtacattgtgatgatataacttattctttaagaggtaaagtgaagagcatactagattcgttgaaaagtttaaaagtaaaagtttgaaagtaaaatatagaaggaaaccctttgagactcatatatgttagatcagaatcacaggagtttatatgtacgccggactaaatatgtatgtacatattttatgaaattagggcttgcatatcgcaatctgatagtatctgatagcctcctgtctttttctattattaacctcggaaataacaatagatagaagatagaatagatagaacatttttattattccggtgactcaagttgcccaatcgtattcgttatcaagaaattctgtcaacatgaccaccgtaacagaaatcggtgataaagagtcgacgaaatgtttggtctaatgcctaatgccgcaaaaatttgttggtaatgctgaaaagaggggacaatatcagttggggctctataaatgtacccgtt

SEQ ID NO: 36086 - DNA, 492 bp, DROSOPHILA
atgaagattcttcgcgatgatttgaccgacttcttcttgtcggtggttaaaccggcattaagcggaatgactttatggaccagtcctccgagcggaggacgaagtagcaggcaaggagggtcaaagtttgatctctcccacaactggaccctggagcaaatggctgcccaggccatcgtgttcttcttggctggattcgagacctcctccagtacgatgagctcttgtaactttagggtccgcaatactgagctcatcgttgagaagggaacttcattactgatacctgtgcacagtgttcactacgatccgcacttatatccacatccaaaactcttcgattccagccgcctcaaggcttataagtccaactcccgccatccatttgcatatctgcccttcggaacatttggaccccgcagttgcataggtctgcgttttggcaaaatgcaggccaagattggcattgtgtcagcgcttcaagttcggtga

SEQ ID NO: 36087 - protein, 163 aa, DROSOPHILA
MKILRDDLTDFFLSVVKPALSGMTLWTSPPSGGRSSRQGGSKFDLSHNWTLEQMAAQAIVFFLAGFETSSSTMSSCNFRVRNTELIVEKGTSLLIPVHSVHYDPHLYPHPKLFDSSRLKAYKSNSRHPFAYLPFGTFGPRSCIGLRFGKMQAKIGIVSALQVR

SEQ ID NO: 36088 - DNA, 2345 bp, DROSOPHILA
ttaaaaagttttcgctttaaggcgtttgataatgggaaaagtgcacactcagttatgtgctgctttccccgccttcggcagccggattcgcagaggaaattgaaactctaatttcgccattgctccggaggcagttataattcgctgggcgtgtcgggtccagacccgcacccagaggcatcattagcattattatgagacagcccattaccacgattattgtcatggcagcaggacaaagtttcccacttgccaaaagaaaactttcccgttggtttacgagtgtgagagtgctgtgcggttttccaaaaccatagctattttgtccggagacattcgtagtttgtcgccatttattgcctgcgaggattaggaatagaatttatacggcctatatagccatacatgctaacaattcggcagcagccctataatttaaatactgttaaatttaaaccaagtatcgtaatgttatatatttcctctggtatcaatacaaaatattttcgtttttaaaatttatttattatatccaattcgccggcaacagcaagctgaggcctcagcaattagtttcatctaaccaacaagaaacaaaaataaataataaatttaaacgcaccaccgttttcacactaatgtgtgggcttttcaatttatccaatgccaaaaccgcagacaaatatcacctgctattattaggtgttaagttttgattggagtgtgtttcggtaccaaaccgatttaagtgagtgatgaccaaactttatcaaccacttttaccagcaactcgtgttgcattttaaacttaccttccattgttcttgatgaagtatcagtcggtttgaagttaataatcgtcatagacatcatgtccttctgggaaacaatcaaaacagatctcggagaatgtaaatgctcaacatcatgtagttgggcgaagccagaacacaatggtgtttccaatttggaaggcaaatgcgactgcgttcgccgggctttaaactaatgccgtgcactttatcattcggcacagtggggcgttgaggtcagccggctgcagctcggtgcacagtgggcgaaccgataatctgggcagacctccagagctccttcggtcgggcactttatttatagcacggcattccattgtgcgcagcactccattttggctgaccaccggagccacctgccatttgccattgcccaccagcggccagccacatgccaccttccacctgatccgccgcccatccactggcacatgtgcggaatgtggtatgtccgggtctctggggtcacttaatggcgccacgtccacagccacgaccatgtccatgtccatgtccgctgcagtgtctgtgtttgcttagtgtctaggactcccactgccacgtcgaagggctgtcatcagcgtaattatgctgtcaacaaaaaacgagaaaaagctcaacgtgaaggagaacggaacggatgggcatagtcatggacctaaggggtcagtcccaggaaccgagtgccgagaacggagagccgagaagcaaccaggtcatcgtcatcattatcagctgcttgtcgtcctgccggcgaaaatggcaagcaatggtattaaatgtttagcacgtcttacccggattgtccttgttcttggactcgggctgttttttcaagctctcgtgcaaatatttatttagtgctcattggcacgcactttacacgtcttctggctgactgcctaattgtgcgtaaagcgtttaacaatttttttgcacttcatttgcagctgacgacagactgaatgtgagtaattaatagaaaatataaacttacaaaaaagcagtctttgatttacggaaagaagagcaggtaattactaactaatgtgcacgtgattctgagccaactaaaattggatatcgaatttatcgcgggtagctggaatatactgtttcagtatttagtatttaatggcccattaattgaagttatttgccaattttaagataatttgaaagtattttaatcatgtcattagagaataaactgaaattgaatagtttagcaaaatagtggttatataatttaaaagaaaactgtgatttaattagtgatttttgtgaaaatcgagtgagaaaataatcaaatgaaataaaggtaacgagcaaagtggacttaatgttgaagagaatatttggtcctccgaaagttatataattgttattatatcacaacgacactaacatgtttgagtaagtcaattttgggctaaccgagaaagagagaggacacacgcattttaatcctttatttttaccaactaagttggggccattggttattttgtg

SEQ ID NO: 36089 - DNA, 345 bp, DROSOPHILA
atggacatggacatggtcgtggctgtggacgtggcgccattaagtgaccccagagacccggacataccacattccgcacatgtgccagtggatgggcggcggatcaggtggaaggtggcatgtggctggccgctggtgggcaatggcaaatggcaggtggctccggtggtcagccaaaatggagtgctgcgcacaatggaatgccgtgctataaataaagtgcccgaccgaaggagctctggaggtctgcccagattatcggttcgcccactgtgcaccgagctgcagccggctgacctcaacgccccactgtgccgaatgataaagtgcacggcattagtttaa

SEQ ID NO: 36090 - protein, 114 aa, DROSOPHILA
MDMDMVVAVDVAPLSDPRDPDIPHSAHVPVDGRRIRWKVACGWPLVGNGKWQVAPVVSQNGVLRTMECRAINKVPDRRSSGGLPRLSVRPLCTELQPADLNAPLCRMIKCTALV

SEQ ID NO: 36091 - DNA, 2930 bp, DROSOPHILA
acagcttgtcaagaatcaggcgtcccaagaaccttttaccagctttgagaaaacatctctcacatccgttcgaaggaatgtggacttcatgatgcaagagcttagtcagatttcacttattttgaatactatgggaggaggtgaaaaaacaatggggatggttaactctgaaccggatgtggcttcctttgcactcaaccaacccaaaatcagtgaaagtttgaatcatgaggaggaatcaaatcagtcagtggatagagctagttcccatcaatctgagctaggtgttgcagattctatgcattcggaggtagccagtgcgctctcagaaccatctggattgggtgatgtagagagcctagatcatagcgagatttcgaaccagtcttttgattccgaactaacgagggatatcaccgatcaacttaaattggatcacgagatggaagcaaatcagtctttggattctgagttaaccggtgaaataactaatcaatctagttcggtagtttcagagtcttcgatttccgatgaggacttcggggaggagctaataaaacaatctcacaaaatcgagcaaattgcgtctgctggcgatactcaagagtccagtccttcaaaaaccaatgagaatactcccaagactgatgacacgcaggacactcagcctaaggaaaccatacacacctacaggccctttaggactatcgaagttcctgccaagaagcctactagtagccttagcaccgagtcaattgaagagcagccgttgaaccaggaaccccaattcggcacaggtatccatttagatagagaacggtacaaagtttctgctcagctgaccgagtccgagtcccgcttacttatgcgcatggctctgaagcaggctttaatcgatctggagtctggccaaagcaagtacaaagcaacaattctggaggctgaaaccgagtaatacaagagcaccaatgaccaaagaaataaacataacctttaaaacttattttttatttttatccttgttcttatctttcttcttatccgtgcccttatccttcttatcctttttcatcttcttgagcatgtcttttctcgccttcttggccttttttatggcactgggacagacgtggttctcaccatgaattttgacccactgacgaccccgctccgcttcgcagaggctcagggggaatcggcactcgcactcgcgaggtcgatatggtcgcttggccagcttaggctgcttacaatccgaccagcagggcatcggtgcacacaacctgcggcagcaggagggcgtcttggccgcgtggcatctgggcggacgacgtcctggcacgcatcgtgccaacggagcgaaatggggacatggtcctgtggctgtggcactgagcgttgtccgctcgcgccgctcggccacccgacgggcggggctcagagcctccagcttgtcgtaggcgcagattatcttcttgcggatcatgaacttggggcactccacccagtggcgctggtaaggaccgttcttgcaggagggacggtaatacagctcgtcgaatgagggcagtggtttggtgcagttgggttcgcagcacaagtcatttgatcggctgaccacgaaggggtacggcggaggcaggttcttcggcggatcccacatcgacttgaacttatccccttcggcgcagaaggcggccggaatgcagtgcgtccggatcttgcattctcgtttggcagaaggagactttggtggagatggtgacgatggtggcttcggtggacttggaggttttgggggtttattcgaggagccgctctgacgtgagctgaagccccttagtagggaggaccaaaacattagccgaaacttttaatgaaagtggaattttgaaaatttttgtataccgtaacgccgttacatgaatcgctaaattaaaattttttgcttggtatccgaaatttcgatcgaggcctactggacgaaaaagagctggttgaaaattggagaaaatcggaagagggtcctgtcgcacacattcacttctcctgcaactcaacttcaatgcaacggcgacaggcaacacaaaattgcaaacagcggactgcgcatgtttaaatttaattgaacatttagccaaattaaaatgcattttattacgcagccgctgtttctggcctggaaatgcaaaacaacgcgcgcccaatcagccaggccaagtcaagtaaatccagcggagttggccatacgcgcagatagacggaggaaaaggcaggccacactggaagaaatacaataaacatatccagaattcgcatatctactcagttcagataatcaactcgagataaatccatccacgatgataaacaaacagtaacaagagtattgaatgtatactattcgtccgtattggttgcaattttttccagtgtaaagacacaggcacggccaaatcgaaagacgctgactgggcctaggcacgcaacggttattcagttttgtcggtttttcgatttggccttaagttggctaggcagtgcctatgcgaaatttggcacagattcgcggcagattcgatgctattcggctgggatcggatcggattttggattggaccgaggcggaactgcgagttgcaaactggttggagacaggcctagcaagcatgcgttctgcaattgtttaatagcctaattaagtgtgcgagcgaacaggttggccaggccgggaaagtcggaaaatcagagaatcggaaaagtcgggcatatgcaaagccaaaggagcagagcgactgtcatgcttcaccaagagagatgtgatgtgaagtgatgtgacgggacagtgactgccatgcgggtggtttgtcagctgctaatgccagtctgtctttattttcctctttctattttttactccttgttctggc

SEQ ID NO: 36092 - DNA, 930 bp, DROSOPHILA
cgattcatgtaacggcgttacggtatacaaaaattttcaaaattccactttcattaaaagtttcggctaatgttttggtcctccctactaaggggcttcagctcacgtcagagcggctcctcgaataaacccccaaaacctccaagtccaccgaagccaccatcgtcaccatctccaccaaagtctccttctgccaaacgagaatgcaagatccggacgcactgcattccggccgccttctgcgccgaaggggataagttcaagtcgatgtgggatccgccgaagaacctgcctccgccgtaccccttcgtggtcagccgatcaaatgacttgtgctgcgaacccaactgcaccaaaccactgccctcattcgacgagctgtattaccgtccctcctgcaagaacggtccttaccagcgccactgggtggagtgccccaagttcatgatccgcaagaagataatctgcgcctacgacaagctggaggctctgagccccgcccgtcgggtggccgagcggcgcgagcggacaacgctcagtgccacagccacaggaccatgtccccatttcgctccgttggcacgatgcgtgccaggacgtcgtccgcccagatgccacgcggccaagacgccctcctgctgccgcaggttgtgtgcaccgatgccctgctggtcggattgtaagcagcctaagctggccaagcgaccatatcgacctcgcgagtgcgagtgccgattccccctgagcctctgcgaagcggagcggggtcgtcagtgggtcaaaattcatggtgagaaccacgtctgtcccagtgccataaaaaaggccaagaaggcgagaaaagacatgctcaagaagatgaaaaaggataagaaggataagggcacggataagaagaaagataagaacaaggataaaaataaaaaataa

SEQ ID NO: 36093 - protein, 286 aa, DROSOPHILA
MFWSSLLRGFSSRQSGSSNKPPKPPSPPKPPSSPSPPKSPSAKRECKIRTHCIPAAFCAEGDKFKSMWDPPKNLPPPYPFVVSRSNDLCCEPNCTKPLPSFDELYYRPSCKNGPYQRHWVECPKFMIRKKIICAYDKLEALSPARRVAERRERTTLSATATGPCPHFAPLARCVPGRRPPRCHAAKTPSCCRRLCAPMPCWSDCKQPKLAKRPYRPRECECRFPLSLCEAERGRQWVKIHGENHVCPSAIKKAKKARKDMLKKMKKDKKDKGTDKKKDKNKDKNKK

SEQ ID NO: 36094 - DNA, 2855 bp, DROSOPHILA
tattatagctcagaatctttgcataccagggaaatgtaaattgatagtccaatgttttttcccgccgaaacgttgtttattttcattggggctaacacacttcgtcagcttgaaatgaacactcaagctgatcctccctttagtttccgaactcataattcagtcatttttacgatcagccacaagaatcgcctaaggtccaccagaattatccgaaataaactcgaaaatagaactcgcattgatcagcagatcgcttgttgttcccaatcgggtttcttagctgattcgccaccaaagtatttgtgtgccacaaggcaacaagcaacacagaaacccaagaccgccagcaaaatcgagctgcgaaccaacgaggacatgcgaatattttatttattgctgacaattgcacaaaagttttttcccttctgtgatcggttttttatggtcattaaaattgggacaaaaatattttgaccgcgctcgaagtcaacgatttgtttttttttttttttttgttctgaattttgaagctttgttctggttgctcgttttgttattgggcaattctagagcacgccggcctgcggcaagagtttgagttctgtgccgcggatttgcccttgattggccaggttgcaacattttgcgatcgaactgattagccggttccaaggcggcgactaattaatgacttcgcatgctaattaaaagcgcaccggagaaacccacacgtgagtcccaagggaaacgaaatcgccactcgtacaaatttctagatgaaaccagagacaagagtatgggattcttgatgacaaacgcagcccaatctcaggggtgccttctaactcaacccttaaggaagaaaacatgttcatatctattcttataaatttgaattaagatagatttaatgaatttccttcaaggtgaagctatctagctatgtgagctaatttcatttaatttcaagtctttacttaatttttattttattttcttagccatgagctgattcgcttttattttgaccactatcgctgcagttgctcagcctgaaatgggtaatgcacagattcagcaatgctgttcgactcaccgactcggttttgatgttgagcgccaggacgtgggaggagctgttggaggaggccgacggcggtgaagcgggcgccgctccgctgcatggcgacttggcggcaatggtggaggcgatagcgttcagcggcgagcggctgctgggcagcggactggcctcccggagcggactgctgcccgcccccgccccgatgccgatggccatgcccaggctctgggagtagggcgagaccggcgacttgttggcattcgtggagcagttggagggcaccacggcggcggtggtgcagctggtcaaggtgctggtggcggagctggaggatgacgaggatgaggagcaggacgatgacgaggaggagctgctgctgctgttgttcgtgctgctgctcttgttgcatatcatggcctgcattttggtattgttgttattgttattattgttgctgctgctgctgttgttattgttgttgttggcggcattggcattgttattgttgacacttgccccagcaccgggcatcaggctgccatcgcagaactctcgcttcacaatgttgctgccgttgttgctggagttggtggtgttgccgccaatgttgctgctgctgttgccgctgctgctgccgccgccgggtgtcgccccaatggccgcctcacatggcagcaccgtgcccagcatcttgtctagcgttgtgtactgtgactgtgacgtcgtggattcagcggcaccggcggagtcctcgcagccctcggccatgtcacgtgtcactgacccgcacgcatcctgggccactcctgcaatgggcaacacagaaggggcttaagtacctcggtgtgcattaaatattaagtccataatggtaggggctttggggtgatgtacactaaggatttaagtgcaagaatgcgttgccaaccggctggattgacttacaccttgtgaatgagaagatggccaactaacacataccttaccattcccattcaataatcacaaagttggttatgagaacaaggattaaaaaggaagaaaatgcttttatccattttggcagttagcttcagcactgtaagagtacgagaaaccattcagagatgataccttcgcaattatctgatatcaacataactccgttttacccctaaaatatcaaatgacatctggccgaactccccctaacctgccactcattccattggcattctacgctgccaacccgctggggccatcataatttagaatttacatttatcgaatatatttcgtgcacttaaaacccttgccctggcgcattaatttcattaattatccctgttgcccgtcggttgaccacggcaacaacgcacaaacaacaatgagggccaagatgcaaggggttggcgagggggggtcggaagagagaacccacacacgccgcataattttgcaaatgcaaaacgcagacggcgctccagtctgaggccatgtccttgccgagccacgacgttctgcaccggacaacggacgacttttaccgccggaatcgtgaggagggagttacactcaaagaattaagacgtaaagaagttaagcaaccgaaacaaacacgatttgaacatactgctactaaggagagtcctaggaaggcagacgtctttttacacataaaacctatttattggttagtcagcgtattaactcacaagtaccccgattttcgttcagtgtgagactcggcttgatggacacaaaagccggagcatacgggtggcttctg

SEQ ID NO: 36095 - DNA, 855 bp, DROSOPHILA
atggccgagggctgcgaggactccgccggtgccgctgaatccacgacgtcacagtcacagtacacaacgctagacaagatgctgggcacggtgctgccatgtgaggcggccattggggcgacacccggcggcggcagcagcagcggcaacagcagcagcaacattggcggcaacaccaccaactccagcaacaacggcagcaacattgtgaagcgagagttctgcgatggcagcctgatgcccggtgctggggcaagtgtcaacaataacaatgccaatgccgccaacaacaacaataacaacagcagcagcagcaacaataataacaataacaacaataccaaaatgcaggccatgatatgcaacaagagcagcagcacgaacaacagcagcagcagctcctcctcgtcatcgtcctgctcctcatcctcgtcatcctccagctccgccaccagcaccttgaccagctgcaccaccgccgccgtggtgccctccaactgctccacgaatgccaacaagtcgccggtctcgccctactcccagagcctgggcatggccatcggcatcggggcgggggcgggcagcagtccgctccgggaggccagtccgctgcccagcagccgctcgccgctgaacgctatcgcctccaccattgccgccaagtcgccatgcagcggagcggcgcccgcttcaccgccgtcggcctcctccaacagctcctcccacgtcctggcgctcaacatcaaaaccgagtcggtgagtcgaacagcattgctgaatctgtgcattacccatttcaggctgagcaactgcagcgatagtggtcaaaataaaagcgaatcagctcatggctaa

SEQ ID NO: 36096 - protein, 284 aa, DROSOPHILA
MAEGCEDSAGAAESTTSQSQYTTLDKMLGTVLPCEAAIGATPGGGSSSGNSSSNIGGNTTNSSNNGSNIVKREFCDGSLMPGAGASVNNNNANAANNNNNNSSSSNNNNNNNNTKMQAMICNKSSSTNNSSSSSSSSSSCSSSSSSSSSATSTLTSCTTAAVVPSNCSTNANKSPVSPYSQSLGMAIGIGAGAGSSPLREASPLPSSRSPLNAIASTIAAKSPCSGAAPASPPSASSNSSSHVLALNIKTESVSRTALLNLCITHFRLSNCSDSGQNKSESAHG

SEQ ID NO: 36097 - DNA, 2711 bp, DROSOPHILA
atcgcatcggtatgcagaagccatcgttgcatgtgaagtacgaggctggacaaggacctgcaatgggatagatgacggaataatggtcactcaggatgcaaaggaagaacgaggaagtgcaggcagccagccattcaatcatttgagtctcggccacagtttgcatactaatgagtgcaaggtggtgtgtgcgaacgaaactattatgctaatcacaaatggttccattgttgtcaaagagctattcatcccaacactagggattagctagagtgccagcctgtacctaaacgatatcttaagtgcgataataaatattcagatagctaattatattaaaatatgacatatttacattatttgcaaaacaatttatatccttgattttagcgcattactctaatccaattcagccgccaacgcacgctcacataaattattcccgaacaataatattctccatcacttggtccacagctgcgtccaaaaggttgccaaattatttttccatttaatatgcagagtggcgacgtgttaacgccaccttgccaaacaccatcacccaccacccaccacccaacgaaaaagcccgatgctgttccatactctttcccaaaaatgccagataatttcaatgtttatgcagttgttgtaggccagtacgtgcctacaattaaacattaacaacggacccacattgctggaagccaaatgccgaggtacgtgactcgggaacactgcatcattaggccggtcgaagctgttgctagcattccgtaaacaataaaaaagtaatttaaatttgcttagcgcataagtaagtgggaatcggaaatgtgcccagcttcctggtgacagcattttcggatccagaagacccactttcccaactcaaacaaaaagcattcgactcgtttactcagccgcccaaaagctgaactttggattgccataaaagccatgtccaggacagtgcagcaacataacgcattcaacagccatgtcattgaagtggctcttcttcatagccctagtggcgctgctcagcattggtacaggttccctggcccagcccagctggcccgccacgcgggccagacctgctctggagcagcagatgcgcctccagcgcttgaatgccaaatactatgccattcagcaggacgaagaggatggcgatgacatcctggagcacgaagaggacctggccgacgctagtgaggacgaggagggagatgatatcaaggatggagaggaggaggaagacgaaaaggagaacaaaaaactgcataccaaaaaggtgaccgctaacatcacacccgccaagccgaagactgaagtcaagcacaagctggcgaaggagcaggagtccatcgatgaactgcaggaccttgaggagcccgaggacgaggccgaggaggagctggagcaggaaatcgacctctcacgcgttgagccacgcaatcgccgacgcggtggcaggcggaacggtaagggccgacgcaaggggcgtggaagcagtaaacgcaggaggggaaaccgcaggtgcggcggcaggggaaagcgcggccgtcgtggccaacggaaacggactccttcgaagcgcagcggccacaagcggcgaacgggctcgaaaaccaagcgacagggtcagaaaaacaaaacagccgccaacaaggaagctgtcgcgccatcaaacaaggtggcctaacgcgctggacactcccacctacaaatgcagctttaaaactcattaaaacagcagcgaaaatactaataaataaaccacaacaaaatcttgcttccttccatccgatgtacatatatatatatagaaaaggacactttccagggttccatttacaaagctagcttttcctagaatatctacttccaaaggatattaggccgaaaaagctgttaatcataatatactaaggaaaaaatttctgacagtttcataaatgaacctattacaatggttgtgaacgttgaacagatagaataatcactgaaccttgaagtttgttttctatacagtaaactgaaacaaatttattcaatcaaattcggaaaaaagtacaagtttaagcccagtaaataatagattaatttaaaacaagttttgcacaggatgtgttttgcacctcaacatagtagaagagcttaacagcagcgaattgcaaatattgctggatatatgcatcggaatgaactttattgtagcatacttttcggaccaaacactcacgtatttcgccagagaaagtttttatcgcgaactcatgcacaggtgtgtgtgcgccaggtagcaaccgcaagtcataaatttcgcagctattccgcttttgttatagtgcttttttatgtatttatgctggtatgctctcatgaccccataaattatagagcgctgcaatttcgtttagcggcttttgcactgttcgaaattagttttacgcctctttttgatttagttcgcactgaggtttagtgcttgctccacataaaatcaaaataagggattcgcgctgcagttggtgagccagctccaactccaactcccaaatctgactgggatgcactcaatttcagttggttttcccttcagcttatcttttgcccggctgccttggtcactgggttcgtttacctgacagcgtcgtcatgccaatcgtttgtttaaggatgttccgctgaaagttctttgg

SEQ ID NO: 36098 - DNA, 711 bp, DROSOPHILA
atgtcattgaagtggctcttcttcatagccctagtggcgctgctcagcattggtacaggttccctggcccagcccagctggcccgccacgcgggccagacctgctctggagcagcagatgcgcctccagcgcttgaatgccaaatactatgccattcagcaggacgaagaggatggcgatgacatcctggagcacgaagaggacctggccgacgctagtgaggacgaggagggagatgatatcaaggatggagaggaggaggaagacgaaaaggagaacaaaaaactgcataccaaaaaggtgaccgctaacatcacacccgccaagccgaagactgaagtcaagcacaagctggcgaaggagcaggagtccatcgatgaactgcaggaccttgaggagcccgaggacgaggccgaggaggagctggagcaggaaatcgacctctcacgcgttgagccacgcaatcgccgacgcggtggcaggcggaacggtaagggccgacgcaaggggcgtggaagcagtaaacgcaggaggggaaaccgcaggtgcggcggcaggggaaagcgcggccgtcgtggccaacggaaacggactccttcgaagcgcagcggccacaagcggcgaacgggctcgaaaaccaagcgacagggtcagaaaaacaaaacagccgccaacaaggaagctgtcgcgccatcaaacaaggtggcctaa

SEQ ID NO: 36099 - protein, 236 aa, DROSOPHILA
MSLKWLFFIALVALLSIGTGSLAQPSWPATRARPALEQQMRLQRLNAKYYAIQQDEEDGDDILEHEEDLADASEDEEGDDIKDGEEEEDEKENKKLHTKKVTANITPAKPKTEVKHKLAKEQESIDELQDLEEPEDEAEEELEQEIDLSRVEPRNRRRGGRRNGKGRRKGRGSSKRRRGNRRCGGRGKRGRRGQRKRTPSKRSGHKRRTGSKTKRQGQKNKTAANKEAVAPSNKVA

SEQ ID NO: 36100 - DNA, 2869 bp, DROSOPHILA
acattagtacaccgcactcaatcacttcagcatccctcatgccgcgattttcttatccgccaaacacaacggaaaaaaacaaatattaactcattatattttgccggctgttttcaccgaagcggcgtgatttcccgtaattttttcttcgacttcagcagcacgcacgaccgctcgattctattatatttcgatctctgctctgcgagatttgcgcgaagcgaccgaacaccttcaactgcgtttaccgattgaagcgctccaaccggttaaatactacgcgcagctattgaacagtattttttacagccgcgactccggtcacaccgtcgatgtttgtgtgatgaagaaatttaacagtgctgttaattggccacacagaaattgtaaggcgctaatttcaaattaatttgatttataatcacctcattacttttaatggggatatttgttccaaaaacatgtataatccagttctacgtaatcgacgttgtcgatggtaaaaacaccacacacaaaacaacacacaacattactgtgatgcttactgtaataattattttataactctttttaatactattatcaatgattcccggatctctggatgggcggcgagggcatggccgtctggcgatgccataaatatcaacaagtgctaattaaaaataaaacagaggaaggcccttaataaaaaaagctctgttagacagagaacgcacttttcgttttttagtcacaaatcgaacggccggcagttgtcaaaatattttgatttttcaaattttccgatagctcaatacaaatccaaaaatacccaccgaacagaaaaatttttaagaattccataattgtctgtacccagaatgctgcgccaactacgggtaagccctggaaatgtacccgaaccggttgcataagactgcaattgaatgcaatttatgcagtttttctacatatgtacattttctatttttattttcgtaacgcccagttgacaatggatatttcgggttggatcttcctcccgtggagacgctccatgtccaacatgaaggactctcctccaccgccaccaccactggccagcactttcaacgacgtgattgtggactacgaggacccggattatcttccactgccggagtatccggtgcgtccaaacgagccgttggaaactcgcaagcaacggtgggtaaaattattaactattaattaataactactactataactatactttactttattctatactttactatacttactttacttataaggaaaatcattaattaaaagagctcatatttaatatatatattttccctttgctctcatccaccattgccttaaacacttccatttatgaactctacttttttttaagaaagcatgacaacctctatttagaaaaatttatactattttaattttaaaatgtagaacagaaaaataggatttaaactccaagtttcttttttcttcatcatcgatcgcacttcttaattttgcatcagttgtacaaccaactaagctattctttccataagtattttttaatattaaccagaaaaacacttcacctccaggcttttgtaccaatcgcgcaagcgcggaatgctggagaacgatcttctgctgagcacctttgcggccaagcatctccagaacttcagcgccgagcagacggcgcagtacgaccagttgatcaacggggtcagcaacgactgggatatctattactgggccaccgaggtgaagcccacgcccaaggagtacgacacggagatcatggggctgttgaaggagcacgtcaagaacgccgaacgggtcacgcgactccgccagccggatctgaatatttaggcatgcacctggtgcttatgaatatgattagttagaagtttatatgatccaggagatcatatccttaccacaataaccaaagcgcaaatatgtatgtttagaataccaaatataatcaatatttaaagttctggaagtgaacaacctaaactagcaccgctcgaacaccttgtacagagtgggcaggttagtgagctcgtagatctgatccttgatgcgtggtggtggcagaagatattttttaaaggcaggaaatagaacgtgttccattgtccatctggaaaagcccgcagtcgcaccttcccgccaatccaattgcgcgtaaaatcgagcagtttccctacagaatgtctcgaagcatcgtgtctcctgctcccagtccacttcggtggccaagcggagcaggtaaacaggcaggtgggccacacaaggtcgatgctggtgcagcaaactgggcagagattcgagcattccatcctccgagatgcgcagcccgaaatactctctcatgatgggcgcctttttcagaagaatgtccgcagcaccgtccgccagctcagccttatccccgtcttcgggcgtccagccggcggcttcgctttccagcgacaagattagcagctccttgagaggcaatggcggacttattgtgatttccgagcagttttgaaactcgtaaatcatccgctgatagaacagttcctcactaaacgaccgtgtgttgcacatataaaggcgcgtttcatgctggaacagggctcgcctctcatccacacagcccacatagaccaagtttttgagcgtgctcctcagctgaacgctgcactgccgctccacgcgcttcctcatgtctagcacgctgctcaaacgcacttctcgtgatttttttgccgctgtaacgcgaaaactctcttctggcagacgagacgcttcctgggaggaactggaggatacgcctgagtcacttttgaccagaggcgccaaaaacttatccagcttt

SEQ ID NO: 36101 - DNA, 468 bp, DROSOPHILA
atggatatttcgggttggatcttcctcccgtggagacgctccatgtccaacatgaaggactctcctccaccgccaccaccactggccagcactttcaacgacgtgattgtggactacgaggacccggattatcttccactgccggagtatccggtgcgtccaaacgagccgttggaaactcgcaagcaacggcttttgtaccaatcgcgcaagcgcggaatgctggagaacgatcttctgctgagcacctttgcggccaagcatctccagaacttcagcgccgagcagacggcgcagtacgaccagttgatcaacggggtcagcaacgactgggatatctattactgggccaccgaggtgaagcccacgcccaaggagtacgacacggagatcatggggctgttgaaggagcacgtcaagaacgccgaacgggtcacgcgactccgccagccggatctgaatatttag

SEQ ID NO: 36102 - protein, 155 aa, DROSOPHILA
MDISGWIFLPWRRSMSNMKDSPPPPPPLASTFNDVIVDYEDPDYLPLPEYPVRPNEPLETRKQRLLYQSRKRGMLENDLLLSTFAAKHLQNFSAEQTAQYDQLINGVSNDWDIYYWATEVKPTPKEYDTEIMGLLKEHVKNAERVTRLRQPDLNI

SEQ ID NO: 36103 - DNA, 3811 bp, DROSOPHILA
ggagtggcggtgcgaagtgacgctctgaaaatggcagccattgctgcggttttcggctttgtatatcccccaaagctttgcgagcttttccagggaattcggcgggctttcgcaaggcgtgaggccaagaaactggttcttgggcactgtctacaagggcaaccccaactcacctcgacctctgtggcgatctcagtctcttgctccccgttcgtctcctccaatgactccaggagctgatcctcgttcaatgtgatatcttcatcggccattgctttggatttgggtttgtttacgtctgctacaaaagctcggttttgttggcgcaaaagcttccggcgtggtactcaaaacggcagttgtcgtaactatgtatgtatggtagctgtcaatgagaaaagggcggcgaaagtgagcataaagagcgtaaaacattaagagcgcgaatgaagagttcatcatgcaaatgcagtgaaaatccaagccataagtaaataaattcaggctgcggacaccgaaatgtctaggtttcactgcgttcgcactactacactgatatttaattaaacacactgtacttacgtttaataaatgtacaaattacgagctcgttctgctgacgttgagttcgcccaaaatggctgccctgtgaaaacacacgtacgctgggttgctgggttgctgtttttcgttcaaaagtctacgtttttaaacccttttcgactttgtttcgcgccacaccacgtcagcataaatatttatttataagcttatttatttattatttactaatatttacaactatacgaaaacgtacgtagtttttgacacaaattgaaacagatttgtgttcgcctcgtttttaccgatgacagttttcgcctcgatagtttcgatggtttggtggtgggtttacctatcgataactgccggtatttaagaaagcagttctttggatgataaaaataatagtattttcacaccacaatgccattttaaatttaccataggaaggaaagaagaggaatgtgcacgcacatttctaacaaggttttgtaaatgggaatcagacaaattattgtttaaggaagtcatatattgcgaaataacgccatcattcaaccatcaatcagggcccatgcataacgataaaaggagaacatgaacgattcctccgattcggagtacgaggacacagagtacctggtatttgcggatttcaagaaccacattcatccgcaccagctgaagcacgaggacgcggccattaagatcatcggaatcgagagtgacacgcccatggccgaggtaaatggaagcatttatcggggacgctacgaacattccgtgggaaccaacgtgttctttgagaaggaaaaagacaatctggcaagtgatccgctttttgagtcagtgtgtcgccagcggtaccagtacgtggacaaatccaccaaggtgatatcttttgaaagggtctacgtggacaatttgcaccaggaggtggagaagtcggctgagactgaagaggacgatcagaccgagccaaagccagaatctctgaagctaaatataacttacaaggaggctattaacaagtttggagaagatcattgagtgtggagaactgagtctaatcctgaacaaaaaacactctttcaagacatacctcttagtaccatggataccacctatattacaacgaatccagctttaagcctgcgagactttctagccgactatcaaaagaaaatatccggtactgcagacgaagtgcccttctttctccaaaaaaacccagtacttgtcgacgtgtctgaaagctgttccctggacttgatcgagtccccagacgacagctcgattgcagtcttccagcccgccgcagacaaatgccgcccaaccttttctccgccgcaggagaaccagcatgtgccctccacttttactgctctaagccagcacaaggacaagtcccgtaagtgtccctttggccgcacccagtacagccacaaactgaatccgacgccgacagactcgcctaacctgcacatcgatgcttgcggcgaactggagctaaccgtgcgtctatatcgaccaccgcgggcctaccatcgcgggtttaaggtggagattcccgttttcgccgaggagttcgtatgtctgggcagcaattatctgaccgagctgcgggacaagatcagctgcgtttgcaatggaaaacggtttgtcgacatcagcgacgatccagatgcaccgttgccatccattgacacaaatcccggttacttcttcatcaacgacacattctacaacgaccagcgcaatccggacaatcccgactattccaagaccgtcttgcagtgggctgccagagcgaacggagtgaacggagaaacgcttaaggtggagagtatggagggcaaaagattcatcgatctcactgtcagccccggatcaccgctacactacctgcaccacggcaattgcgaacacctgtttgtgatctcccaggtagaggtgctaacgccacttagtaaacggccagatcgcagcctgtatccctatcctcacgccttcagtacgtttaatcgcaggacttgctatatgtgcggcattcgcagctatagcttcatcgtgaaccagtcccggcgacagctgcacgatccctcctacctgtgccgcagatgttttctcagcttcttttacgtggatggtgtcaagctgggccagttcaaagcctatcgcatgtatgaccatgtagagctggagggcgaagaggaggacattaaacagcaaaatctcccctcctgaatatacatatacatttgtgtgattttttctttatttgcgagctcctttgactgcaagatcgctcaaggagttgattgatattttgttcttgtaaaatattcatagatagatttaaataaaatacatacacgttgcaacaagagtaattggcattgaacgtattcgattgccgtaaagctgcctaaattccatgcaatctagattagcaaaaagttagtgtccaagttaggaatacaaaaatgcaaacaacgtaaatagtacgatacatctggcttagaacttacgttaatacatatatgcagtagttcaatgtttaaaaatttgcttaaggatttgcacactgtggtgcagagtatagacttgaccaggacccatataaaacaaaccaatagactaaatatggcaaataacataatacattatcctagacaagatactagtactaaccgtacttagcagtacaatacagtaaaattctgtgcactgggattccggcgtgcacgtgaagagagactgtgcgcttagttactggggcgtagaaatgcatcaacaacatattgccaatccgaccaacaaatatcattacgaacaactgcaggctgggattccattcgcccggacctctttggtgtacgcgcttgcgtttacttcagtgttaaagctttgaccagcggcttctcgacggcgggcggcggttgcctaactctggaagaccagctcccgctccaccgacaagtactccagcatctgcgccggcactggcaactgggccagctgttcgcgagacatctggcgctgcagaacacggcggcataagtcctgcagcttgggcatgttggagtaccggctcaacgggtacttgaggatcactggaaacggtggctgcatctcgttgggaaccttcacaaagcacacaaagttgtcgttggtgcagcggtgcaagatatcttcgatcatctcgacaatggactcgtacttaagttcctcgaagtgccaaaaa

SEQ ID NO: 36104 - DNA, 1733 bp, DROSOPHILA
tttaccataggaaggaaagaagaggaatgtgcacgcacatttctaacaaggttttgtaaatgggaatcagacaaattattgtttaaggaagtcatatattgcgaaataacgccatcattcaaccatcaatcagggcccatgcataacgataaaaggagaacatgaacgattcctccgattcggagtacgaggacacagagtacctggtatttgcggatttcaagaaccacattcatccgcaccagctgaagcacgaggacgcggccattaagatcatcggaatcgagagtgacacgcccatggccgaggtaaatggaagcatttatcggggacgctacgaacattccgtgggaaccaacgtgttctttgagaaggaaaaagacaatctggcaagtgatccgctttttgagtcagtgtgtcgccagcggtaccagtacgtggacaaatccaccaaggtgatatcttttgaaagggtctacgtggacaatttgcaccaggaggtggagaagtcggctgagactgaagaggacgatcagaccgagccaaagccagaatctctgaagctaaatataacttacaaggaggctattaacaataccatggataccacctatattacaacgaatccagctttaagcctgcgagactttctagccgactatcaaaagaaaatatccggtactgcagacgaagtgcccttctttctccaaaaaaacccagtacttgtcgacgtgtctgaaagctgttccctggacttgatcgagtccccagacgacagctcgattgcagtcttccagcccgccgcagacaaatgccgcccaaccttttctccgccgcaggagaaccagcatgtgccctccacttttactgctctaagccagcacaaggacaagtcccgtaagtgtccctttggccgcacccagtacagccacaaactgaatccgacgccgacagactcgcctaacctgcacatcgatgcttgcggcgaactggagctaaccgtgcgtctatatcgaccaccgcgggcctaccatcgcgggtttaaggtggagattcccgttttcgccgaggagttcgtatgtctgggcagcaattatctgaccgagctgcgggacaagatcagctgcgtttgcaatggaaaacggtttgtcgacatcagcgacgatccagatgcaccgttgccatccattgacacaaatcccggttacttcttcatcaacgacacattctacaacgaccagcgcaatccggacaatcccgactattccaagaccgtcttgcagtgggctgccagagcgaacggagtgaacggagaaacgcttaaggtggagagtatggagggcaaaagattcatcgatctcactgtcagccccggatcaccgctacactacctgcaccacggcaattgcgaacacctgtttgtgatctcccaggtagaggtgctaacgccacttagtaaacggccagatcgcagcctgtatccctatcctcacgccttcagtacgtttaatcgcaggacttgctatatgtgcggcattcgcagctatagcttcatcgtgaaccagtcccggcgacagctgcacgatccctcctacctgtgccgcagatgttttctcagcttcttttacgtggatggtgtcaagctgggccagttcaaagcctatcgcatgtatgaccatgtagagctggagggcgaagaggaggacattaaacagcaaaatctcccctcctga

SEQ ID NO: 36105 - protein, 523 aa, DROSOPHILA
MNDSSDSEYEDTEYLVFADFKNHIHPHQLKHEDAAIKIIGIESDTPMAEVNGSIYRGRYEHSVGTNVFFEKEKDNLASDPLFESVCRQRYQYVDKSTKVISFERVYVDNLHQEVEKSAETEEDDQTEPKPESLKLNITYKEAINNTMDTTYITTNPALSLRDFLADYQKKISGTADEVPFFLQKNPVLVDVSESCSLDLIESPDDSSIAVFQPAADKCRPTFSPPQENQHVPSTFTALSQHKDKSRKCPFGRTQYSHKLNPTPTDSPNLHIDACGELELTVRLYRPPRAYHRGFKVEIPVFAEEFVCLGSNYLTELRDKISCVCNGKRFVDISDDPDAPLPSIDTNPGYFFINDTFYNDQRNPDNPDYSKTVLQWAARANGVNGETLKVESMEGKRFIDLTVSPGSPLHYLHHGNCEHLFVISQVEVLTPLSKRPDRSLYPYPHAFSTFNRRTCYMCGIRSYSFIVNQSRRQLHDPSYLCRRCFLSFFYVDGVKLGQFKAYRMYDHVELEGEEEDIKQQNLPS

SEQ ID NO: 36106 - DNA, 2450 bp, DROSOPHILA
ctgcatggatttgatagcttaccggaaaagccactgaacacacttttgggctctgcagtcttttcttcggcgccatcctcttcagcggcggacgatccaccggcaatcttgcggcgcgccttcttgataacgcgtgtctttagctcctcttcggtggccgtgcggaatgtgccgcgctcctcgggttcctcctccaggtcccagttttcgtggttcaggttcgaagtggcttgtcgcttgccagccatcttgttctactctgtattaaaactcaaagcaaatgccagtgaaaaagaaaaaaaaaaccgaataaaatccacaccgcgttgctggcggtcgataaatgttatcgctacctcagttgggcgacgtaactgtgagtcagcgaaacaggcctgctgctttcgatagcatatcgatagggtaacaacagcgagacgccagcagcacaaaatcgcaataaaacaaaagtattaaatcacgcctaaagttaggacgaccatgtccagtgccgcgagtcccagtcacagtagcagtaccagtccgagtgtgtttctgatcctaccatgattgccgcgattccgggtactgcgcacttccctcgcccagagacaaagttaattgtgcatctcgagtagtacgagcagtaccaaaaacgcagaaaaccgaaaagcgaaaagcaaaaagccaaattgcatgaggatgatgagaacgccagtgtgtggatatatggatatagtgccagggaaagtgcgacgagcaacaacacaaatcgggagtgaacaaagacgcagagacacgtacagtgcttaaaggcgttatcctggtagtttctcagctatttgccgtcccgctcccactcccattttgctcccgttccacggccttgggcgtgagctggtgtgcgtgcgactcgcgtgtgtgtgtgtgtgagtgagtgtgcgtgtgagtaaaagatacgctgtatataccaggacatcgggatatcctgagcagcaaaatgccgccatccctgattgccgtgtccgagtttgtggaggagacgcgctccgattacagctcgcccaccacctccaccttcgcctcgaggatgcccgactgccgccacacgattggcgtcttggaagaggtaagtgtgttgaccaggcaattcctaagccatgttccttatgtagaggcaggtagtccaaaaagccaacaatctgtgtacctacagcccaagcaatccctagtttaaggtgggctatcctggtgggtttacaggtgtgttctgggaatcccagtctatatagttttatatttgagctaaacatataaacagtctaggggtcactgaatttaaaggcatttgaaccgctgaaaaattgggtttactgttcaaaaactaatatcttcgtaggctacggagagtgaggaatgtgttatcgtcattacttgtttatttcaatgattaaaattccgatccatctgcggataatctgtaataataatcggttttgcaaaacaaagttcctaatttaatggaatctgatcgatgtcggtgaaagtgaaaacaggagcacggctatgtgaccacgcgatactgcagctaacatggcaggcgacgccccctgccaaacggtgatgattactattttccggggggctgcagcggacagatttgtaaattggcgcggcgccaaaatgagccaccgcctgttattttagtgcggtctctctctcccggctcgcgctctctctctgtctgcccgcaaggtggtttttcctcgattccacgattccacaaaaatagtacaatggaaatacaaagtgcattccggaacgtgcaagagcagatggagctaggggcgcagggaactgggggctgggcaccgaagtgggagtggctgccacataagcatgctgtaatttctatatttactcaaggcagctgtgatgtcgcctccactttcatatgtatgtaagtgcacggatataaatcgcccgctgataaagctaagcacacaaagagtattttacggccggaaaaaggcgtgtgataagagcagcgaatccgagaaccgcggctattcccgtacgggaacactcagtcagctggggatatcgtccacagaaaacacagaacgcctaagtggaaaagtcatccatgttgtcatccaaaagacccttgagtgggccggttgtgcaatatacacatattgctccaattccccaggctaatgcagcgcccgcccggcgaaacaaaattagacgatttattggtcggtcacgtcatgcccagtttttcccggaactctgggccgccttcttggacgccacgtcaaacatttaatatttaattttgctgatggatttttggtgtagcccaagcagcccagtgacctccattccccgccagttaaatgaattttatttctcttttttttttagccagtctctcccattgcgtg

SEQ ID NO: 36107 - DNA, 180 bp, DROSOPHILA
atgccgccatccctgattgccgtgtccgagtttgtggaggagacgcgctccgattacagctcgcccaccacctccaccttcgcctcgaggatgcccgactgccgccacacgattggcgtcttggaagaggctacggagagtgaggaatgtgttatcgtcattacttgtttatttcaatga

SEQ ID NO: 36108 - protein, 59 aa, DROSOPHILA
MPPSLIAVSEFVEETRSDYSSPTTSTFASRMPDCRHTIGVLEEATESEECVIVITCLFQ

SEQ ID NO: 36109 - DNA, 2381 bp, DROSOPHILA
ccccgttttactttttctacgttcctcccatttaacaggcaaactaatacaatagacaagtcttaaatttacatactccctcctttcggccaatcctttaagccaaataaacgctacaccacagtacaactgcatccagctgaaggctaaccaatacctaaggtatccggaccacgaaattacaggcaaatccgactagtttcatcccctttccaaatgctgccagccaatggaaaccaatcggccctatccgcctatgtccgactggcggtccagcaagccacgtcccggatgactggaagattcgcctactcgacgcgccgaaaccagtgcgttggggatctgaagaagatcgacgaagtcctgtgccaccagcgggatgaacccaatccagagtaccatcatgctccgcgatgctttgttaagaactttcataagtaccaggagcaggcgcaggatcacggagaggtgcagacgacccgcttccgcaatccgcgataccgctgggcagacttccggcgacgaatggtttatggcacctacgatatctagacggtttctcttgaagctctctgcaatcaatttccatccggacatgtcttgtacgagtatagtcccccccccagtctatccataacgaagtatcccaaacccacatgcaaactgtacaatagtaagaattttgaggccagataaacggatccaactcggtcgtccgctcaaattgcaatataattcagcacagaataaatccgttacctcttaagtttattgtgcacttcgtttgaacttagtaggactatgtatgagtattggccagattttagatggtacctttaaattgaaataaggccaaggccaaatgtgtcaccccccccccccccttatttattggagaaccgtatacccctcatatatatcaaagtattatttgataaaattaaaaataaacatttatattaaaatacattatcttccatttaaacgctattacccacactcacggcttcgaatccgagtccaaagctaccggacttttatccatcatgtccgcaattggttccgtgtccgaaaactgacgatgcggccctcgcacggtattgattaagagggtgcggtggggctggaaacttagctcgtccgtaactcgtgtcatgtccttcccgtagtcggcgtccatgtggcgcaagttgaggaagctcttgaccagcaggaagggcggcctttttagatcggtccatgaactcttacggtcctggagctttacgggcgcaggtctgcgatggtacggaagcctgtgctctgacattcgtcgcctctgctgtagccgcatcttagcctcgaatatcggggacccgatgagaagccgaccggtgaacattatgccataggtggatgccgtaccgttggtcaaagaaatactaaaatttaggttaaccaatgtaagtaaaatttaagttatataaaaaaaggtttcatattatatgaatgtatctatcgggcctacttttatgtattggctttgcaattcttgaaatgaattgatatggacgtttttcctcactaaattaaaattccgtatatagttcagcggcaagtcactttcttgctaaaaaatgaatcttccaacaagtcgaataacgtaatatatttttagaacagtattttttccaaaaactttaaatttttaatattgaccgcaagggcgattcccatggttacgaatggtaaagtcaaggggggatatcattttctctcgtttttccagcttgacataaaatagtctctaagatcacgaggagcaccctgcatgtacacagaatccagatgatggagggccaagaagctcttcaccaggatgcggggtggtcgggttgattgcgccggggtcttaatcctcgcgtcgggaactacaggaaatggtcgcctcgtcctcctttgatgcaaacttctgttccgggaaaaatgtaaaacggataggcccccgagaactcgaccaaaggacatcatggctgcaggttcggggcttaaaaatacgttgactgatatttcaaatttaatcgaagccaaaaagataaactagggtttctgatttcattaaaagcgcctacttttcagacaattgaaaactgattcgaatatactttttcaatggcattttagtaaataggcatggattctataaatccaaccctagttggtattgttgaatatgcaatgtgaaaacttggtaaggctaataccttttaatttcgattttgaacctagaaataaaatggtttcacatactcgatttttgtgatgtaaatggatttaattggcccagtcgtgtgtgcaggggctacgtgccgaaaaaaaagtgctgtgtactaatttctgac

SEQ ID NO: 36110 - DNA, 381 bp, DROSOPHILA
atgttcaccggtcggcttctcatcgggtccccgatattcgaggctaagatgcggctacagcagaggcgacgaatgtcagagcacaggcttccgtaccatcgcagacctgcgcccgtaaagctccaggaccgtaagagttcatggaccgatctaaaaaggccgcccttcctgctggtcaagagcttcctcaacttgcgccacatggacgccgactacgggaaggacatgacacgagttacggacgagctaagtttccagccccaccgcaccctcttaatcaataccgtgcgagggccgcatcgtcagttttcggacacggaaccaattgcggacatgatggataaaagtccggtagctttggactcggattcgaagccgtga

SEQ ID NO: 36111 - protein, 126 aa, DROSOPHILA
MFTGRLLIGSPIFEAKMRLQQRRRMSEHRLPYHRRPAPVKLQDRKSSWTDLKRPPFLLVKSFLNLRHMDADYGKDMTRVTDELSFQPHRTLLINTVRGPHRQFSDTEPIADMMDKSPVALDSDSKP

SEQ ID NO: 36112 - DNA, 4481 bp, DROSOPHILA
aggcttgcaaggcagcgggtacccgaaactgcaaaactgcaaaacaaacatggccaatacactgcaacagctcggaactgcaggcgagctaagccagacagacgtacacaaaacgcgccgagggtggagcattgaaaaagtgcaacgccagtgctgggttagacaaaaaacaggtcctccagaaaagcgaataaaaagatgcggccgccagacgactgccgtattgcctttaagcctaaaagcgagctccatctgttatgcgaaacgtttaattatttatctgaaaggaagatcccggctggcagtgaaaataaagcatttgaatggaattttattgacatgcaccccatctgagcgactgatggggttataggttgcaggcaatcgccgcccccgaggttaattagttgacatttgcgcttaattgcaacgcctcgggcggaggacatagagctccagccaggcgttccattcgcatgcatgattgacagccgagtgggcggccacatccatccatacacctggtggagctgatacatgcgtattgatgccaaacgcgttcaggcagagcgacaaacttgacacccacttaaaggtgttaagtgctccagcactctgaagctggggatattccccccatccccatccattcccatccataacagatcagatcttcagtacggcaggaaaaattacagcactgacaacaattactatctactgaaacacatggacaactctcccaaaaccattcgatactaattttaaaggatataagttaggaaaattttagtatatttgtataggtcaattcaaacattaagaaaagtatttcgactttgttacattaatcttttaaaataaatcagcgtagaacgacctcgcagatcatcttgcaagatatttttctttacaacccccattattacccattaatcaacattcttttttcttcttagccttgcatatacacatacataaatcaaagtagttgctggtcctatgttcggccaggacaataggccacctcggggctcttggtgcggatccacttgatgaaggaggcgacgcgagtgttgaccgatggctgctgggcggcgcaggcctggccaaaactgacgatgcccacggccatcaggcgtccgttgatccgctcgtaaagtgctcctcccgagtcatattggcaagtgtcccgaccgggcgtgtacgtgcagaaagtgtggggcggtaatccgccggcggagctcaaagcctgcctgcaccggcggccatcgataacatccagcgtggccttgagcaggcgatgggtctgtggaccgccgtaggaagtggttccccacccggcggccactacctggtgacccgcgagcggcagcttctggccatcctcccccggttgcagtggcagacaggcgggacccacatgctggctccacacgatcgccattcgcgtctttagcatggcgatatcgttcttcggctgtccacttgcttggctaaagtcctcgtgcaggatcagggcgtcaaggtcatagcgctgggtggcgaacgtctcaaaggagctggccaagtcatgctcacccaccaccacccgcaacttggcagcactattcgtctccggacccagaaaacagtgggcagccgacagcaagtaacgatgatgaactgtaacaaataatagcgaatttataatatttaaagttaataaaaatccatttaaacatttaaaatatccaattcttttggttataaattacatgctttagttagttagtttttaattccaataactctccctacaatatttattatctgcataccctcgcaaatacttttatagttttgatcaaaggattgcaacatagtgaatctgcttaaaggatgtatttgcatgttaaggatttcaggatgttataagactatggatcaatggatcttttgaaattagggccaattatatatcccccatttacagctttcatggggacactttgtttcgtatcttatacacacttgtatcgtatagaaatatagaaatatgcttctttgaaggtttcaactgtcaaagaatctctgtgattcttctatgtcaattatcattaaaagccccatatttatacacgtatacttactgatcgcagcgccgcagaagacctttccgtgttttttggttaggacaccggccattggcgggaactcgtgcaggacggcctcctcgttggtgggactggcaatccggggaatgcggctccagccgcagctgcacgtgggctgaaaggcctccacgaggcaggagaagcgtcctcctccgtgaccaggcgatggggcggcagttgggtagctggaaacaattcgggcacgttttgcggaagtctttgaactgctgcgaattggcaacttgtcaaggtaaatagtggtgctggactttctggactcttcgacgtcgtaaagtaaggaggcgacataggccagggcatcgctgacgcccacatcctgcaacacgtgcagcacctcgtcgctgaggtcctcgtcggcttcttctggctcctcttcctcctcctgctcctcctccgcatcctgttcctctatggaaacagcttgtggtgcctcggtagttgtgctcgtagttggcaccgcatggagcttatcctttaacttaacggctgagggcggctccgaatgtccactcgatatataggaaatcaccgcacgattgagaaaacttttgcgctcgaattttccgctgccgcaaaagtattcggaacttgttaacacctcgtcgccctcggaattgaagtgaaacacctccgtgcggcatttcaagtccgtggaaagctgcgaaaatcgagatgaatcatgtcagtgattgaaatggacaatggcgatgccactctatctaggcaagctagaaaatataaatgcttttcttttgatacgtaaatgggaactaattaaaatggtttcatccatggcaatatgatttaataaaatatattgttagtttattattttaaattaatacttcacagttacgacaatcagtatatttttcaataaaataattttttacaacttactctcttaaaaaaagttgtataagttatggattttatggtaataaaacacttacatatgtgaaatgttatagatatataaaagtagcacgaatatagtttcttgcattcagattccatttgaacatttgaacatacaatgggtcttctggcatcactgttataccatcacttcatttcctcaccgttcgcagctggagctcgcatttgaattggagcacgtgatctttgggagcctccacggcgtagcgacaggaagtgcccacaggatacagagccgggtaatagggcgagttgatgagaagtttctggcccgattgcagcttcacctggtggttgcactgctcgaaaatggcattcgttgaggatgctttcaaaagaggcagaaacaacagccaagtccacatgatcccgatcgcgacgaagtctagagcggcactgaggtggctccatagacgacagcctcttaagaatgatggagctaacacccaagtcatcacgcgatctgcctacatctccatgcgggtctccacctctcaacacctcgtgggcacccacgccccgttcctgcctcaaataccagttaattagggtctcgaagaaatcccaaattgttaccgccgaaaagaaaagacagcggccggcacacgagcgtctttagcggctaattgaaagaaagtgcaagtgtgtcaatcaaaaactggttttcggaatttggaacactttggaatcggttggtggaagtgaccataaatagaactacgtgttggccaccagttggggtaggtcacagctgaattggagtcttttgtcattcatgttttgctttcaaattaagttacaaggccactttagttaaaatattctacaaaaatgaatacattattgttcattcattcattcattgattcattatattgtatgtagtgtagtcaatccttaaatattattgtatttgatcttatcatcatatatacttaactcatattcaacaatgaatttcttaactcttatgttaatggcttaattttcaatttcctattttgtcacgtgccatccgctcatatagtcattagttccaattccccgagatccctttaaagtcgacaatttcacacccgtcgttccgcccagcccctgccaccagaactcattttttagaccactttcagagctgcttaattggatgtgctccatatgagcaaaaagaggagagcacacaaactacaagaccaggaggagcgaaaaaatggagcccaaaccggcaagtttgtcgcccattttgcaaaataaatatcagaaaaaaaatgggggaatccttgggagggacgacggatggcgccgtgtctgtcagaggcgcagagacaaacgcttaatgctaatattattttcttgcttaacaagtga

SEQ ID NO: 36113 - DNA, 1590 bp, DROSOPHILA
atgtggacttggctgttgtttctgcctcttttgaaagcatcctcaacgaatgccattttcgagcagtgcaaccaccaggtgaagctgcaatcgggccagaaacttctcatcaactcgccctattacccggctctgtatcctgtgggcacttcctgtcgctacgccgtggaggctcccaaagatcacgtgctccaattcaaatgcgagctccagctgcgaacgctttccacggacttgaaatgccgcacggaggtgtttcacttcaattccgagggcgacgaggtgttaacaagttccgaatacttttgcggcagcggaaaattcgagcgcaaaagttttctcaatcgtgcggtgatttcctatatatcgagtggacattcggagccgccctcagccgttaagttaaaggataagctccatgcggtgccaactacgagcacaactaccgaggcaccacaagctgtttccatagaggaacaggatgcggaggaggagcaggaggaggaagaggagccagaagaagccgacgaggacctcagcgacgaggtgctgcacgtgttgcaggatgtgggcgtcagcgatgccctggcctatgtcgcctccttactttacgacgtcgaagagtccagaaagtccagcaccactatttaccttgacaagttgccaattcgcagcagttcaaagacttccgcaaaacgtgcccgaattgtttccagctacccaactgccgccccatcgcctggtcacggaggaggacgcttctcctgcctcgtggaggcctttcagcccacgtgcagctgcggctggagccgcattccccggattgccagtcccaccaacgaggaggccgtcctgcacgagttcccgccaatggccggtgtcctaaccaaaaaacacggaaaggtcttctgcggcgctgcgatcattcatcatcgttacttgctgtcggctgcccactgttttctgggtccggagacgaatagtgctgccaagttgcgggtggtggtgggtgagcatgacttggccagctcctttgagacgttcgccacccagcgctatgaccttgacgccctgatcctgcacgaggactttagccaagcaagtggacagccgaagaacgatatcgccatgctaaagacgcgaatggcgatcgtgtggagccagcatgtgggtcccgcctgtctgccactgcaaccgggggaggatggccagaagctgccgctcgcgggtcaccaggtagtggccgccgggtggggaaccacttcctacggcggtccacagacccatcgcctgctcaaggccacgctggatgttatcgatggccgccggtgcaggcaggctttgagctccgccggcggattaccgccccacactttctgcacgtacacgcccggtcgggacacttgccaatatgactcgggaggagcactttacgagcggatcaacggacgcctgatggccgtgggcatcgtcagttttggccaggcctgcgccgcccagcagccatcggtcaacactcgcgtcgcctccttcatcaagtggatccgcaccaagagccccgaggtggcctattgtcctggccgaacatag

SEQ ID NO: 36114 - protein, 529 aa, DROSOPHILA
MWTWLLFLPLLKASSTNAIFEQCNHQVKLQSGQKLLINSPYYPALYPVGTSCRYAVEAPKDHVLQFKCELQLRTLSTDLKCRTEVFHFNSEGDEVLTSSEYFCGSGKFERKSFLNRAVISYISSGHSEPPSAVKLKDKLHAVPTTSTTTEAPQAVSIEEQDAEEEQEEEEEPEEADEDLSDEVLHVLQDVGVSDALAYVASLLYDVEESRKSSTTIYLDKLPIRSSSKTSAKRARIVSSYPTAAPSPGHGGGRFSCLVEAFQPTCSCGWSRIPRIASPTNEEAVLHEFPPMAGVLTKKHGKVFCGAAIIHHRYLLSAAHCFLGPETNSAAKLRVVVGEHDLASSFETFATQRYDLDALILHEDFSQASGQPKNDIAMLKTRMAIVWSQHVGPACLPLQPGEDGQKLPLAGHQVVAAGWGTTSYGGPQTHRLLKATLDVIDGRRCRQALSSAGGLPPHTFCTYTPGRDTCQYDSGGALYERINGRLMAVGIVSFGQACAAQQPSVNTRVASFIKWIRTKSPEVAYCPGRT

SEQ ID NO: 36115 - DNA, 4389 bp, DROSOPHILA
caaacgtgcttcattttccatcaattgtcgcttcgaaccgtttcaaatattttccgattctggattcaggattcgggggcttgccagtggaatttcgcagaggatgcaacaggattgatacattgcacggagggctgagagcctcaaagagcgattatagcctgattagacggatcctggcttgccattttcagtggatgtaacggaatccagtggaaaagccctgggaaaagcgccttcgattcgattcgattcaatttgattcgattcgatccgattcgaaactgggctaactggacgataaaggctgaggcgaacaaaggacccttcgaggactgttgaattagttagaggcgaagcaacaaatacaaacaaacggccattcaacaacctcccgacgtcgccatatcgattttccgttacatcgttatacacacacactaacccagttggcacacagccattacgcatacgccccatagccaccccagaaagcgagaagagcgtgcggctccagctgctccactccatcccactctgcgaaaatagagagagggagagcctggcggactggcggacaggctttgttgcatcccgcgaccactggaggcatgtttcatttggcactcgccagcagcggacggacaaaccatttaggtgagagaaccctggggccggagaggagcagcagtggcggcagtagcagcagtagcaacactagccacagtggccggacggacagctcaattgcgggcaatttatatttaatccgcgggcacacaacccaaataaaagcgcgcattgtgcgcccaattgaatcccctaacctcttctcctttcgcacacagggctacggcaatagccattgtagatagcattcaccagcatcggaatccgcgaccagtcacgacagtgacgctttctgccgcggaataagaaatccttcacccaatctcacagtcgccccaacgaaatcgtaagccaccagcaggtgttcagcatggcgggaattcagctgcaatcgggatgcacgatggtcgtgacggtggtgctcctgctgcaggtgcttgtgatggaccaggtgctcggccagggtccaccgcagactcaagtgtgtccggagcagagcgagatcgcgccctgcatctgcacggtgaagaagaacgggctggacatcctgtgcgagaccaccgatctggcgcacatcaccaagtcgatgggcacgctgaagggcaagagtcccatcatcttctacctgaagcttcgccacaacaatctgcccaagctgcagggcttcgtcttcctggcccttgacatccgtcacctgaccatccacaacagcagcctggcggccatcgaggagaacgccctcagctcgctgggtaactagttggacaccagttggaagtggggttacctaatcttttctttttgccgcacacacaggagcgggactgacgcagctggatgtgtccctcaaccaaatgaagacggtgccctcgcaggctctgcaacatctgttccacctgttgatccttaatctgaaccacaataaaatcaccgtgatccacaacaatgccttcgagggactggagaccctggagattctgacgctctacgagaacaagattacacagatcgatcccgaggctttccgaggacttgaggagtaagtttaagtgaatcttttcttttccctttgcgcttatcaaacctcttcttttagccatattaagcgcctgaatttgggtggcaacgatcttaccaatatcccgcagaaagctctttccattttgagcaccttaaagaaactggagattcaggagaacaagatacgaactatcagcgaaggcgatttcgaaggtgcgtattgctaaacttccacagtcttccacgttattgctaaccttttttgtactttgtatttgaacaggcttgcagagcctggactcattgattttggcccacaacatgatcaccaccgtgcctgccaatgtgtttagtcacctcaccctgctaaactccttggagctggagggcaataagatcagtgtgattgacaaggatgccttcaagggcctagagggtgggttgtccttcggtgggactttgccattcactttctaatctattttctgtttccacagagaacctgcaatatctgcgcctgggtgataaccagatccacactattcccagcgaggcactgcgtccgctgcaccgccttcgccacttggacttgcgcaacaacaatatcaatgttttggctgaagatgccttcactggctttggagattccctgactttcctcaacctgcagaagaacgagtaagataatcccctgaaattccccttttgctatttattttcaccagatttaattacaatgataatgaattatattctcctttggttagcatcaaggttctgcccagtcttctgtttgagaacctcaactcgctggaaacgctgaacctgcagaacaacaagttgcagcgcattccgcaggacataatggagcccgtcatcgacacccttcgcatcatcgatatcaccggcaagtcataggcacttcagcccagtcaagcacctaaaagaactaaccgagctaatcgaaatccttattaaccgcgcagataacccgctgaactgctcctgcgagctgacctggttccccaagctgctggaggacctgaagaacaaggacgacgaaatgtcgcagaagaagaagccgctgtgccacatgtcgctggacaaccgcgagtacttcgtgcaggccatgcccaccgagaagatgcactgcgccggcctcaatgtgagtccctcgccgaccagcggcggtctaatgcggatcctgcaagtgaacatcctggcccagattgccgtgtgtagcgtggcctttttaactagcgtctaagcatctagccgctgtccagctagacgcgatgttctatgtgggtcagtttcagcttcagtttcagttgcacacccgtgatcagtgatagaatctaacagagcggtcgcccctccagttccattcggtttgattcggttgccacataacgaaccacccaaagcaaaaaatgcaaaaagctatcccagaccccagatcccagatcacagacctctcgtacgccccccacaaaccaattctgtgttgttgtattgtatgttttcttatagattatagggaatccgtgaattatgcaactctgccagtaattagactcagaaagcacgcttttcgaaccagcagcaggcctccccccagcaaagttgctgagatgacgcccctggagaggcaccaccaccactatccggtccaccccccactgcactccgctccggacgtgcacagtagctcgacgagaaggggaatgctgggatgatatttacttgtccgcggacatagcttagttataaggcttgatttaggcaccagtgcacctgcggaggccaaaaccaaaaccaaaacagaaagctaaacagaaacctaaacccaaaccaaaatcgaaacccaaacatatcagaatattgttacgtttaagcgagagattttgttgttactcgcgttaatctgtacgagtttatctgtgcagcctagggctccgtttgcccatctattatgtgtagtctatcgtcgtcttgtcgtcggtgttgtgagatacaatcattactaacgcgtttcgtagtccctccgcccgtttccagacctaccttcagcacccaaccgatacccagtcgaaattcgcaagctcctcgagtccatgtgtcgtgttaaccaattctcagcaaccatggccaaatgtggctccactttgggtgccagaggcgggcgaaacaaagcgaaggcacaagagaaagtaagaaaatttcatttgcatcaatcaccaagaactgattatggaataagtagtttgtactctttatttgccacaaacacgggcaaactcccaagaaatcccaattccataacccataacccttaatccaaaaaggggcaacccacgaaggtcgagaatgcatatcgttatattgttatattatatcgtgacatatcaagagctcccagtagtaagacactcggatggctcgacacagctaatatagtgacattttatagaatttacttacatttttgaggcatctgacaagtttgatatatttatgcagaagtgaattaagcaaatgcagcgtgtatgcagagtggaatttttgaaattttttatacatatacttttatacacacatacatacgtaccttttcgattatgtctacgcaaactaagttgtaatccgattagctatactgacactgacactccaagtccgcccgatcccctacccgcctccacaccaaccacgcggtggcttaggtcagtagccacc

SEQ ID NO: 36116 - DNA, 1581 bp, DROSOPHILA
atggcgggaattcagctgcaatcgggatgcacgatggtcgtgacggtggtgctcctgctgcaggtgcttgtgatggaccaggtgctcggccagggtccaccgcagactcaagtgtgtccggagcagagcgagatcgcgccctgcatctgcacggtgaagaagaacgggctggacatcctgtgcgagaccaccgatctggcgcacatcaccaagtcgatgggcacgctgaagggcaagagtcccatcatcttctacctgaagcttcgccacaacaatctgcccaagctgcagggcttcgtcttcctggcccttgacatccgtcacctgaccatccacaacagcagcctggcggccatcgaggagaacgccctcagctcgctgggagcgggactgacgcagctggatgtgtccctcaaccaaatgaagacggtgccctcgcaggctctgcaacatctgttccacctgttgatccttaatctgaaccacaataaaatcaccgtgatccacaacaatgccttcgagggactggagaccctggagattctgacgctctacgagaacaagattacacagatcgatcccgaggctttccgaggacttgaggaccatattaagcgcctgaatttgggtggcaacgatcttaccaatatcccgcagaaagctctttccattttgagcaccttaaagaaactggagattcaggagaacaagatacgaactatcagcgaaggcgatttcgaaggcttgcagagcctggactcattgattttggcccacaacatgatcaccaccgtgcctgccaatgtgtttagtcacctcaccctgctaaactccttggagctggagggcaataagatcagtgtgattgacaaggatgccttcaagggcctagaggagaacctgcaatatctgcgcctgggtgataaccagatccacactattcccagcgaggcactgcgtccgctgcaccgccttcgccacttggacttgcgcaacaacaatatcaatgttttggctgaagatgccttcactggctttggagattccctgactttcctcaacctgcagaagaacgacatcaaggttctgcccagtcttctgtttgagaacctcaactcgctggaaacgctgaacctgcagaacaacaagcacttcagcccagtcaagcacctaaaagaactaaccgagctaatcgaaatccttattaaccgcgcagataacccgctgaactgctcctgcgagctgacctggttccccaagctgctggaggacctgaagaacaaggacgacgaaatgtcgcagaagaagaagccgctgtgccacatgtcgctggacaaccgcgagtacttcgtgcaggccatgcccaccgagaagatgcactgcgccggcctcaatgtgagtccctcgccgaccagcggcggtctaatgcggatcctgcaagtgaacatcctggcccagattgccgtgtttgctgagatgacgcccctggagaggcaccaccaccactatccggtccaccccccactgcactccgctccggacgtgcacagtagctcgacgagaaggggaatgctgggatga

SEQ ID NO: 36117 - protein, 526 aa, DROSOPHILA
MAGIQLQSGCTMVVTVVLLLQVLVMDQVLGQGPPQTQVCPEQSEIAPCICTVKKNGLDILCETTDLAHITKSMGTLKGKSPIIFYLKLRHNNLPKLQGFVFLALDIRHLTIHNSSLAAIEENALSSLGAGLTQLDVSLNQMKTVPSQALQHLFHLLILNLNHNKITVIHNNAFEGLETLEILTLYENKITQIDPEAFRGLEDHIKRLNLGGNDLTNIPQKALSILSTLKKLEIQENKIRTISEGDFEGLQSLDSLILAHNMITTVPANVFSHLTLLNSLELEGNKISVIDKDAFKGLEENLQYLRLGDNQIHTIPSEALRPLHRLRHLDLRNNNINVLAEDAFTGFGDSLTFLNLQKNDIKVLPSLLFENLNSLETLNLQNNKHFSPVKHLKELTELIEILINRADNPLNCSCELTWFPKLLEDLKNKDDEMSQKKKPLCHMSLDNREYFVQAMPTEKMHCAGLNVSPSPTSGGLMRILQVNILAQIAVFAEMTPLERHHHHYPVHPPLHSAPDVHSSSTRRGMLG

SEQ ID NO: 36118 - DNA, 3170 bp, DROSOPHILA
ccatacattgcatacgatttatcggctaaaaagcatgtgtctatttatgtaagcaacaagttacatgtcactcacttgcgatcagattcccgatcgcaactaaagctttacctatgtgtccactacacgactgatactaactttggtacgaatatcttaaatgaaaaatggaaacaaagtatctaaatctaaaaacaaaaatctagaacacgaatgaaacgacatacagagaaatttaaactttccaatatttacataagtctgcaccaaaatttgcacgagacgagacgagatgctattcttttatatggcccactggccaacatatagtacatggatgttagatgtattaagaagtcgttcctcggtgttgtgctatctccaccagcgcggttttatcgccaatttttagtagttgtactgcaggttttgtaactgaatttgagtttttatatatttcgaagagccacgaatgtttcaaaaacactcaactgttcgttaacgtctagacatactcggagtcctggactcaaacaagtggaagcaacaggacaaagacaaggaaatgtggccaagaattcgcactgttattgttttactttttatagataatttattaggtgtgtatttaaccgaatccgagcgtatcgagtatatttatatttaaatatgtgtatatagatgtaattgatgttttgtggccacaagagcaccaccacccagtaataacgtaaatatcgtaacatggatgtgtattattgtctactgactgtgtgtatatgtttcatatgtatactttaaacgcaagaccgacccgaaatgtgaagcatattcccacacatatagcaaaccaaataaagtgtaaactaattgttgttgtaagctgatctttcaatttcttaacaatcttagcaggctgtcgttttctttcgtcttcttggctagtatatttctgctccagttcagttctaaaaagcatttcaagttaaacattgtgatcatgggcgactcaccggaagagcggcgcagcaaggatgtcgtgccagagaccgccgccaaggaggcggaaactggcaagggcaaaaaggagaagaaagaaaagtcggccgagggcactaagccggtaagttgggctgacaagtggcgcataatttggctggttttattgattcaacaaagccaaacgccacgaattgccacggcgacaggccgtcaggtaatctggcagggaatgacttaatggcataatcatttgtggttttatggctaacctctacgcactcgagccgactcgattctattaattcgcaaggaatggcagccgctgcagcgaagaactggtcggggctggtgaatctttatctgggccaggagcgtgagaaggtatacgattgattttgccattatggttacaatggggtattgatgtctttttaatgaattgatgcttgtaacgggatgtgaacacgggaaccatacggttcgtctaaaatttgacgaagtcacgccatttcttgtggggattctattgggggtttgggtatctctgtgcttctagctgtggcctaactaacatgcatattcggtttcccatttcatcgacatgcagaggccggcaagcagccagcgcggatcgctgaccaagtcccatatgggcgtttccttgccgatgggtgctccggcagccaaggtaagtccgttaaatgcccagctagctgtgtttataccctgagatctgcttaatgcctagcccaccatgcggttcatgcccacctaccgcctggagtccaagaatccgctcaacaaggaacgcgtggagaacatcataaaggcggtgatgaaccgacactacaacgatgagtacatgttccatcccaagcattccctccacatggccgcgcaagtgagcgaggaaatcaagaaccgcatcaaactcgacaactacgacaggtgactttggttcggcggtcagtttttgtctaactaaccaccgtttcgccccagatatcgctacatagtgctggtcactgtgggcgagttcctgatgcagggcctctactccatggtcaacttcctgtgggatgctgaaaaagacggatttgtgacctacagcgtggagagaccctcgtactttgcagtctgcaccaccttttacctgtactacgattaagaacgcgattccagggccctggcgcgttccacttggtaataaaattgatgttgatgctagcaatggtgcttaatttcgttaccttctttggtcagcagatggttcactttcttaaacacttgcttgcactgtaactcacaactcacatttttaacacgtaggatgcgatagttgtcgtttatttggatatcagtacaatagtttgatataatattttgttgaagcataaattactttcgaacatccgtctaatgatgcaagacaactgcgtttgatcgttattactaccttgagtgtacatattacgattgatatatatatatatatataaataatagatttgcgaacacacggcatacacagcacatgcactgggtgaactgctcggattggattatcattgtgtataaactgatctcggtccgtggaatgacacttgaactcactgaaacaaatgtagcatgaacgcttgcataaattataaacaaaacactattcttattcttattcttctgttgagcgcagccacaagaaaaccaatgtaacaattgccaaaccaaatcaaacagcatagacattttggagcaaatgctacacgacgttctctcttcggatggaagacggatattgatcggggatcggaacacgatatggaatcgccagccactttcacgcacccagcggccagaaacaccaaagaacctcttggagatcgaggggaactgaaactcagctggagttaagcacttcgcactgattgggaaattgcactgcaaacaacttctggagccactttgcaatcttattttggacccaactggacaatcagaccactactgggcgcacttttggtcgcactgccttctcgccatcgaacacaaacgaaagggcaaaggcaaaatcatcagcgtaacacaaatcaaaatggaaaatcaattttaaggaacacaaaaacttttcatcgacattatttcgcactagttgttgatcatatgcggac

SEQ ID NO: 36119 - DNA, 570 bp, DROSOPHILA
atgggcgactcaccggaagagcggcgcagcaaggatgtcgtgccagagaccgccgccaaggaggcggaaactggcaagggcaaaaaggagaagaaagaaaagtcggccgagggcactaagccgaggccggcaagcagccagcgcggatcgctgaccaagtcccatatgggcgtttccttgccgatgggtgctccggcagccaagcccaccatgcggttcatgcccacctaccgcctggagtccaagaatccgctcaacaaggaacgcgtggagaacatcataaaggcggtgatgaaccgacactacaacgatgagtacatgttccatcccaagcattccctccacatggccgcgcaagtgagcgaggaaatcaagaaccgcatcaaactcgacaactacgacagatatcgctacatagtgctggtcactgtgggcgagttcctgatgcagggcctctactccatggtcaacttcctgtgggatgctgaaaaagacggatttgtgacctacagcgtggagagaccctcgtactttgcagtctgcaccaccttttacctgtactacgattaa

SEQ ID NO: 36120 - protein, 189 aa, DROSOPHILA
MGDSPEERRSKDVVPETAAKEAETGKGKKEKKEKSAEGTKPRPASSQRGSLTKSHMGVSLPMGAPAAKPTMRFMPTYRLESKNPLNKERVENIIKAVMNRHYNDEYMFHPKHSLHMAAQVSEEIKNRIKLDNYDRYRYIVLVTVGEFLMQGLYSMVNFLWDAEKDGFVTYSVERPSYFAVCTTFYLYYD

SEQ ID NO: 36121 - DNA, 2216 bp, DROSOPHILA
atccaatcaatgtgctcagcagcagtacaaagtagttgaaaggcccatgtctcctccaatctctccaaacgtagaaacacgtatacagaaaaacagtgaataccattgataatggcataacaaagttgtatggcaaaggatatttgagaaacaactcaatgcagggcaaggtgcaggccatctgtagctgcaatgttgagtttaccacattacttttttaattgaaaatggaagctgtataacctacgattaatatgccgtagaatcggcgcactaggcgccgtcggattccaacatcggctatgtcgaattcataggtcctttgcaaatgaccgttgggcaaaaggaggtcacattgcacagcgatgcccgggacttccgatttttccactaccaataccgcgtccatttcatcatcatactgagctgacactaccgccgcctaatgtccatttatattattctatttgataaggccagttttccagttaatcgtttatctaatttactccattttcatttctgtttccataaacaccccatacaatcacaaagaaaaaatgttaaaataattcgattatatacacatattgattagccattattaacagtaatctttttttatgaattgtgcgctctgtagaaaaagggctcaaataaatgctcatggaaatggttgctttaaattgatatactatataactcatatatttaagaatttcggaagctatgaaggaatttgctactagcttatctccgcctcccttgaattttttcaacagtgttaagggtacccaaaagtcggtgcactcgaccttacatttccctgttgattaaatatagaaaacttgatgtgtagcataggaaaaatcgggggctagattcgcttccaatcttatatattttgtgtatcctagcggagcaaagtaaaacgtataataatattttctttatattactaggtgcccaatcgaatggctgcaagttcaacaagaagccgatgttccgatactctggctgccacggctacgatgcgtccgccttcaacatcgtgctgggcctaactttccaaatggacacctctgaatactcgctgcccggcgacagtccgcgtaacatattctacaaggaaagcctggagcaggcgacccgtatactggagagcaggcggcgcaacagcagcgaaacctccgaccatcctttcacggacgactgagctgggaaacctaaaaatcgaactggacgagagcgtggccaaagcatttgatataactttttctaccgacaaccacacaagcggatacactcaggcggtgacggagccaactgagattactaggaatatcgaaggaaatgagagttattgatgtgaattagataaagggtaaccgattcccacttgaacagatatagacagatgacttggcgtccaagaaaagatcagaaatgaacagacacagcacagtaattaagcgtagcgtaattatgtgcagcttatcaatacttattacaatttagtgcagccctaattacttatttaatgaaatatacatacatgaaaatctgtgttaatgtccccgtgtttttgctgcgagagtcgatatgtgtaaaagcccctgtttagttaactatcccaaatgtaaatacataaaaacatcaaatggcatacattttgtgattgtattttatagttactcacgcgtagacaaacatatacagtatataaatataaatataaatgtaatttaactatcctagaacaagacgagccaaaaagtaagttaataaaattctgaattacgaataccaagtaacattctttttctggcttcgccaattctaaatatcagggaaatctttggtttgttaacggcactttttgacatttttttgtaaagctgattgtggttatatctgcaaaagcttgagaagaagaacagcatacattgttttcaagagctgtgactaggattagctctactaataaaatttttccaaaattcgaaggatgtaaatgaatatgcgaaccacatcgacgtacagagtgagagccgcgaatacatattcctcgggatccaactgttccgaacgattgccgcccactatcgactgcatatcggcgattaaaaaaaaacagccaataaaggtgcataggcaagttattggcaggctgtctacgaaatcgggcatccaaacaccacacactgatagaacta

SEQ ID NO: 36122 - DNA, 216 bp, DROSOPHILA
atgttccgatactctggctgccacggctacgatgcgtccgccttcaacatcgtgctgggcctaactttccaaatggacacctctgaatactcgctgcccggcgacagtccgcgtaacatattctacaaggaaagcctggagcaggcgacccgtatactggagagcaggcggcgcaacagcagcgaaacctccgaccatcctttcacggacgactga

SEQ ID NO: 36123 - protein, 71 aa, DROSOPHILA
MFRYSGCHGYDASAFNIVLGLTFQMDTSEYSLPGDSPRNIFYKESLEQATRILESRRRNSSETSDHPFTDD

SEQ ID NO: 36124 - DNA, 2354 bp, DROSOPHILA
gaaactttgtactttgatagattttcattcttaaattcggtgcttttgattctctttactagtgtcttcaatggttcagtagggtatgttgtatcgcgttgtatttctcttgttgaaactttgtactttgagagattttcatgcgcggctgggaagtgaagggcgcttcgggataagctctttatagttcgatgcattttctccgtcatctttttgggagtctttatacccttaaactcgcccagctcctgcataactgaaacaacttctttcagtttattatctactttattttccctccgtttttgatcttttaagggaaatttgaagagtttagatttgttaacgatgctccttttacacgttttttttggctggagattattaagcagacttcttttcttcagttttttggttcgcttttgggtaaagacaaacctgctaattagtccatgaagaaggcccacgacaggtgctcttgagcttaaatgcgttgctgtaggtacaggacgactcattgggggtttaatcttgtatttttcgattttaattgggtcaattaattgttttccgctcgctctagggacaatttcttttgattttgaatttttcaactcacgctccttaggagtatacatctgtgtcagttggcttatgtgaatcttgaagctcttccacttcggagtattcgaatctcgtaaattcctgccctttttaggagaaaccaaaggtgtggcaagatgtttcaattttgcattcacaagttttgggggtactttatagtattctgacccagcgtttatcctggccctgctaaaatatttgcgagcatgcctcaacaacattttctgcttggctccaagcgttggactaagcgttgattttgataggctttgaaaaagtactggcatgttttgagatagaatggctttattgaagaattttgacagctagtacttaaccgaaaaaataaataattttcaagccaactaagttgccatcagcatacctcggtcctaaagcattcacggaacatgcgaacggcctcgacaattttgctgaagaaaagcatcttcatcagtcgccacattccctttggcagatcgcagtgtatgttgcatgctgcatagacgaactcctctggtccaatgttgtagccatgtcggccgcacagcatgtagtgtgtatcgtagattatgtaccacgcctccacggtgcaggccattgcggagaagacctccatcatccggttcagtcggtaggccaggaggaggaacagcccaaagatgaggctgattatggaaattccgcgaatctgggtaaaccgaaaacgcttctgggaggaatacagcattagacccaagatttcaataatgagaatgactggataaatatatacctgcaatacaaaacataagtaatcaacagtatatatattaacagtagtatatacatgcaatcaagaagtcatatcactttaatacagatagcaaagttattctatctccgtacatgactcaagtttattcacttaaaccaaatgtgttgtgatgtcctaatggagtaactctgacttacccaatgtgtctccaccaaattaagtagatatacgctcctattgaaggatccaatcaatgtgctcagcagcagtacaaagtagttgaaaggcccatgtctcctccaatctctccaaacgtagaaacacgtatacagaaaaacagtgaataccattgataatggcataacaaagttgtatggcaaaggatatttgagaaacaactcaatgcagggcaaggtgcaggccatctgtagctgcaatgttgagtttaccacattacttttttaattgaaaatggaagctgtataacctacgattaatatgccgtagaatcggcgcactaggcgccgtcggattccaacatcggctatgtcgaattcataggtcctttgcaaatgaccgttgggcaaaaggaggtcacattgcacagcgatgcccgggacttccgatttttccactaccaataccgcgtccatttcatcatcatactgagctgacactaccgccgcctaatgtccatttatattattctatttgataaggccagttttccagttaatcgtttatctaatttactccattttcatttctgtttccataaacaccccatacaatcacaaagaaaaaatgttaaaataattcgattatatacacatattgattagccattattaacagtaatctttttttatgaattgtgcgctctgtagaaaaagggctcaaataaatgctcatggaaatggttgctttaaattgatatactatataactcatatatttaagaatttcggaagct

SEQ ID NO: 36125 - DNA, 354 bp, DROSOPHILA
atgctgtattcctcccagaagcgttttcggtttacccagattcgcggaatttccataatcagcctcatctttgggctgttcctcctcctggcctaccgactgaaccggatgatggaggtcttctccgcaatggcctgcaccgtggaggcgtggtacataatctacgatacacactacatgctgtgcggccgacatggctacaacattggaccagaggagttcgtctatgcagcatgcaacatacactgcgatctgccaaagggaatgtggcgactgatgaagatgcttttcttcagcaaaattgtcgaggccgttcgcatgttccgtgaatgctttaggaccgaggtatgctga

SEQ ID NO: 36126 - protein, 117 aa, DROSOPHILA
MLYSSQKRFRFTQIRGISIISLIFGLFLLLAYRLNRMMEVFSAMACTVEAWYIIYDTHYMLCGRHGYNIGPEEFVYAACNIHCDLPKGMWRLMKMLFFSKIVEAVRMFRECFRTEVC

SEQ ID NO: 36127 - DNA, 7131 bp, DROSOPHILA
agcactcttttatttatggatgcaaaatcagctgattgacagcttaaaacgcttatttacgatggcctgttgtttggccctgataacacgcgattagcgatatggaaaacggaccaccagaccatcaactttttctcactttatatccccatgttcctggctgcgaagtgcagttaatccgcagctataaatagcaaacaaaagtgaattcggtgggtgacgtagttgggaataacagagaaggggtgggatggatacgtactaaagagatagagagagagcgacagagagcgcgctaacgaacgacgcaaaactgaaggaaacaaggtacacaaaggggaactgataaacgaaacttactgtaaaactgcagttacagtgccgtacttttatataacagcaattgcaccccacgttcactggcttcgtttcaataaataaaataaacacgggctaaaattctacgcgagtctgattaggcatgcggtttaagccatttcaattccgttcgctgtcaattttatctctgttttgctgcagttggctctccaaatcttttagttatggtcaccctacgatagcaaagcatgtattttgattgcatcgctgctatcgatgtttgcggattggcgctttagcgttcgcaccggtcacacttaccgtactttttaaaattaatatttactttacgatgcggaagcacaaacctatcttgagttgctcctttcgaagtaaattttaaaaataatattaacttcaataatagtaataaaaacatatcaatttacatttggggacacaaaatacataaactatgaatatttagaaataaatgagcttacatctcttcgttttgttgtttatttatatgacatctaattcaaaaattattgtataatatcatgatatttgcgaataatgactcgtataaacgttaccgttctgcaaaacgcataatgtcagtgtgaccgtgttgcgcggcattttaccactttcagagattagtgctcacgggttttcgtgctgcgcagcagttaaataaaattgaatacatcaagagctgcagatataaatcggagttgaaaaccagtgcaagttgcattggcccacaaatcaaaggtacgccttataaaggagagtgaatcaattgccgaattagtagtgcaaaaggtcaaagcatcagtcgtgaaaaagtggcacacataaatacaaatgcatacatacatactcgtagatgcaacacacacctacacctaaacacacatacacacacaaacacacatccgtgggaggaataaaacacccacaattgctgattattttctgcactcgttatcgttatcgctttcgttttcgcattcattttccacagccgcagtttcgtggggcgtgcaatgtttaggatccacctcaagatgggtccccaacgcaaccagctccacagcaacaacaacaatggtgccgccggaagtagcagcagcaccggaaaccgtcacctgaaggagttcacctgctgcttcggcctgcatgtccacacggccactttgatgatcggattgtggcacctggtaagtgcatcaaggggggtatcctttaatccatacatgcgtgtgtgtatatcgagatacacccacgcatgcagtcctgcggcatttgcgaaaaacctttgaccctgctcagtgtcacgcaagggaaaaatcaatcagccaatgactgcaaaactttgcgaagacgaagacgagccaactctgcactttccccgcctgtgacgtcaattggtggctgattggccgctgctgcgtcatctgatcaaatttaactacagtataattcgcttagctgcctcgagtactttgcacaatgcctcgatgcaggtaacttaaaaatgcagctaacttaatttttttttttctattttctattttctattcacacaaaaaaatggaaaaataatgcagatatcttgccgatgcagctaactatcgatgcagctaagcgaattatactgtactatcatcggggctttttggcacaacaacttatttctgccatcggttccactgcggaagtttccacatcccatgtccattgtccgaaactaacctttcacaagatctgacttcgcattagcaatcgctacacttggagaaatgtaaagcattgtcgaattttcaaaagtttcataagaaattagttttattggctaaaaaaagggatataaatgtgcaaagtgcagtattttcagtcttgttatcaatgtttttggaaacccagaaacctttgatgtctcttctgaaaatgaaagagaatgctctgcccttaagagagcgcgaatctgcggccaataaaagatttgagtcgttgagcaaaaacccttgcttaatagtatttgtctcactacgctattcgtgtatattttacactgttccgctactttctttatgctttgatcaggtcacgttttccagtagaaaactccgtcacatgggttgattatggtgtggacagcagtggagttatcttttctaatctgtccaatctcaagggtttctttgtttacattttgtagatatgtatggcgttagaggctttaaaaacaaagcaattccgcaaatcgaaggttgcttgttgtttggttgactcatccccagagtgacaattgttgatatactgcggcgcactgcagattaaatttcatgatgaatttctgatgaataatttaactaaagatggcaagttgccgcatctcgggtcgttgcaaggccttcaacctgagatacttagatactgaatcggatatccaacggcagccatctgagcaaacagcaaccagaaacatgagcgttcaagttatttttaataactacacgtactcgacaagtgatgcgaaaatatttactcttgtggtggcttactcttgcttttcggtaagaaagatatattcttctggaacaacattctgaagcgtgctgtcataaatctgagaattgttaattcagctgtcatctatcagcacacaggctgcaaatcaaatcaggcgaagctttcttatcttcttttttgccagcttatcttcatgagcggacccatgcacctgctaacgcactcgaaatacttttaaatgttgagctatcattaaagtcccccctcgtgatccttgggaatctttgcttagtttgtgacgtttacaacttattcacatttttataaatattgttctgctcacacaaaagtctacattccccactacttccaatgaaattccatccggaggaagctgtccaactggtgaaggcatttgcgagattcgaatgcaatgccccacacagacgacacatttccggaaggcagttcttgttgtcctattgacattgtttcctcaaataaagtcatcctgcgcggctatgcttctaaggcgaataaggatgtcgaagcggtggaggagctagaagagatacaggagatgaatgatgagctaagggatttgttcatcaatacaactgccatcaattgctcgtccctttctgaactaaaaatccagactgacgctttcaacacccttaaagagcgtacactattctcattgggatactcgacagccgggcttttaaagaaatcaaaaatcagtaaggttctaaaagggaaggtcaatttgtaccaacagattgtgagccttgtaaagcaacgtacaaagaccaattcagagatcaccataggaaagacaagtcatcccgtgcacctgatggtcttacagagcttttcgcgaatgtttcgcgatatgggcaatgacctgagcgtggccctgcccgaaaagatgattacgccacgctcctttggcctaatctacgaatggatgatcgaggacacgccagtcttgccgcgactcggtctcctagaggttttccacgctgccaaatttatggagattccacagttggtcaggcagtgcaagtattgcctcgatcatggattcactgaggactccgctgcgatgctgtactttgaggcgaaaatactgaaacttgaggttatccatttgcaatatcttgagcgcgtctcaaagttttttctcacgctggtggcatcgaaagagtttttgagactgccgctgaaatcaatgctattgctcatccaatcggatctgataggcgtgaatacggagctggaggtcttcatggcagccgctcggtggctaagccaccactggcctcaaagagaggaaaacgtaacggatgttgtatccagcatacgttttggactaatcccgccgtggttgctcatccgtttacagaaaccggatgtcacatctgtgggggtggggagaatcgtagcgcagccaattgtgcgccaagccattcatgaaggcatcgcgtacacgaccacgcggatgttttatggaaaagatcgggaggcttttaagcactatttgcataaggcttgcgtaaagccacccgtgcaacgcacttggatatacgaccggaaatgtccgtatcatcatcgaatgcaatgcaggaacacggtggacttaacctacgacgcgttccttgaatatcttaattacacgcaacgccagcaccgggattattggaaatctctggaaccagtagatgctagcaatgtttgcttcagttgccaggcaaagaagtctgatttaactaagcccaacagttgagtctccacgttggttgtagaacttgtaaaatatatatttctacttatatatgtaagcctccatgtgcaattaaacagtttaattattttagtaagtaaaaccgcctacgtttattttcagttcttgaacatattggcgctaagcgttctagcggtcatatggcgcaatccggagatgatggacgaactggaaggtggcacccacgactacaccgtggatctgagtgcaccggccctacccacgccccttagcaaggtcgaaccgccctacgcctaccgtgaccactccctcaactatcgtaagcgttaccgtaagcagtggagagagcaagttccgcaacgcatttaaatatcaattttctgctgcagagaacttcgatatgggcggactggtgtgcacctgcatgatagccattacactgatgatgatctacggaaccatcaagggaaaaccctcccacctgttgccgttcttctgtttgcaattgtttgatttcgctattacaacgtaaggattataatcggtggagttacagagacctcaaaagatttaaatcgccactttactttagtaaagcttaaatagccttcttaaatccttcgaggtttctaggactcttttaatagggagattaatgtacttatgcattgttcgttatcatagtctcaccgccgctggatatctgtgctacctgcaggccattcacagcatcattgccgagtcgcatcgcttgccgtggcgcgagaagctgctagaactaccacctgaggagctagttgttgttgtcctggtcgtattcatctgcattgtgtttctaaaggcctattgcattggtatcgtttggcgctgctacaagtacttgacgctccgtcagcaacacgttcgcaccctgttccccttcctggagccaccgactggagtccacagtgttggcggaacctttggtgccgaagagcggtcttactccactctgttgcccaattacgatgaagcgattgcccagtacttgaagcaggcaccaccgccatcttatcaggtggccatgtcaaactacgaagagggtgaagacgcagctgttggaggtgcggaggttaatccttcggtggcccctctcttcgtggcccttggagcagccactaccgcgaacgtagcctccaacacggatgacaacatggataataacaatgatcagccgaacaataacaacactatgcatgtcaatgccaatacgccaccaatgcgccgcagcgatgcagctgtaaacgctaatgtcgacgaggaagcggacgatttggaggttattgacgctggcgttgatgtaatcggtggcattccgcctcctccgccctacaacgacgttgccgatgcccaggtgcaagtgccatcgcaatcgccgctgcatcgccagccaaacatcccgggacaagtattcggcggacgcgacgaaagccaggcttaaacagtactttcgactggattgcttctcatggcgagtgggttgtgatcagcggtgaccacccctctcccatcctcttcttgcccagatgatctggtttctggtccctcatttcgcagctatcattcccaggcacacatacaccttcttaatggttgcttcaatgtattgaacactgtttttagaaaaacgaaacgcaaacaagttttcgctattagccatcgctcattattgttgtttaacgtacaactaagacgctctagttgctgctaatttagtaaacaaaagcattaaagccaaaaacatattgtgatgctggcgaggaaagcatcaattccttttcggccgcatctgacccgattttagctgcaacaatctgttagaacgtttttcatttggcccgaactagcctgagaagttcggatattgtaggcccaagtagttgttaccagagagtgtcgctggcattgtagacacctttacgatgttctttgttttaagttatctcgtaagactatgcatattgaataccgtgtactgaattcagagcacaggcagtcataatccattaattatgatgatattaccagcaacagtaaagttttatgtgtgtacaatatctaaatgtatactgtgtactaaatatgcaaagatattcgaataaaaattagtttatatttaatttgtgtttgcgacttcattttaatttaaagaacattataatataatttccaatttcagctgataccctaattctatttggaaattggtttcattttcaatagagttggaatgttgactttttagtttatagtgttaatcctttaacagagttgatgatatttattttaattggggaaagaaacaaaataactttgttctctactattaagtttaaaaaagagaatattctttgatcaactgacttccatagagattccatttttacattttctttttattgtttattgaggaaagaagctacataaaaattcccgatcat

SEQ ID NO: 36128 - DNA, 1379 bp, DROSOPHILA
attagtgctcacgggttttcgtgctgcgcagcagttaaataaaattgaatacatcaagagctgcagatataaatcggagttgaaaaccagtgcaagttgcaatgggtccccaacgcaaccagctccacagcaacaacaacaatggtgccgccggaagtagcagcagcaccggaaaccgtcacctgaaggagttcacctgctgcttcggcctgcatgtccacacggccactttgatgatcggattgtggcacctgttcttgaacatattggcgctaagcgttctagcggtcatatggcgcaatccggagatgatggacgaactggaaggtggcacccacgactacaccgtggatctgagtgcaccggccctacccacgccccttagcaaggtcgaaccgccctacgcctaccgtgaccactccctcaactatcgtaagcgttaccagaacttcgatatgggcggactggtgtgcacctgcatgatagccattacactgatgatgatctacggaaccatcaagggaaaaccctcccacctgttgccgttcttctgtttgcaattgtttgatttcgctattacaactctcaccgccgctggatatctgtgctacctgcaggccattcacagcatcattgccgagtcgcatcgcttgccgtggcgcgagaagctgctagaactaccacctgaggagctagttgttgttgtcctggtcgtattcatctgcattgtgtttctaaaggcctattgcattggtatcgtttggcgctgctacaagtacttgacgctccgtcagcaacacgttcgcaccctgttccccttcctggagccaccgactggagtccacagtgttggcggaacctttggtgccgaagagcggtcttactccactctgttgcccaattacgatgaagcgattgcccagtacttgaagcaggcaccaccgccatcttatcaggtggccatgtcaaactacgaagagggtgaagacgcagctgttggaggtgcggaggttaatccttcggtggcccctctcttcgtggcccttggagcagccactaccgcgaacgtagcctccaacacggatgacaacatggataataacaatgatcagccgaacaataacaacactatgcatgtcaatgccaatacgccaccaatgcgccgcagcgatgcagctgtaaacgctaatgtcgacgaggaagcggacgatttggaggttattgacgctggcgttgatgtaatcggtggcattccgcctcctccgccctacaacgacgttgccgatgcccaggtgcaagtgccatcgcaatcgccgctgcatcgccagccaaacatcccgggacaagtattcggcggacgcgacgaaagccaggcttaa

SEQ ID NO: 36129 - protein, 425 aa, DROSOPHILA
MGPQRNQLHSNNNNGAAGSSSSTGNRHLKEFTCCFGLHVHTATLMIGLWHLFLNILALSVLAVIWRNPEMMDELEGGTHDYTVDLSAPALPTPLSKVEPPYAYRDHSLNYRKRYQNFDMGGLVCTCMIAITLMMIYGTIKGKPSHLLPFFCLQLFDFAITTLTAAGYLCYLQAIHSIIAESHRLPWREKLLELPPEELVVVVLVVFICIVFLKAYCIGIVWRCYKYLTLRQQHVRTLFPFLEPPTGVHSVGGTFGAEERSYSTLLPNYDEAIAQYLKQAPPPSYQVAMSNYEEGEDAAVGGAEVNPSVAPLFVALGAATTANVASNTDDNMDNNNDQPNNNNTMHVNANTPPMRRSDAAVNANVDEEADDLEVIDAGVDVIGGIPPPPPYNDVADAQVQVPSQSPLHRQPNIPGQVFGGRDESQA

SEQ ID NO: 36130 - DNA, 2378 bp, DROSOPHILA
ttcggggtaaatttggtggcgtgatctcaagctctctcgctcgctcatcttggcatcaccacttttcgtggtgagttctgccgggtgcgcctgtatgtgtgtccgtgtgttgttagcctttcaggctaacggggcgagctcggtctagtggtgataattcgctaactatcatgtgtggctttcgtagccttaaatataattcttaataatagtgtgtatattctaatagttactacggttagtacgggtagaaaggtgcattattattattttttaattttatttatatttacttttatatttacatttatatttatgctttacttcgacatttcattatacttttcgaatattccagatctggcgaccggaatcgttttaggcgtgtcgtcgcgtctccgacgacgttgccagttttggcagccagggcatcaacccagacccggatatccctcatccgttacccgcggtagtgttgcgtccgcagcgggtaaggcgcttgtggcagttgctgcatccttggctggtacggcagccggctttgccatatctctggtgaaattgagactgactcagtattgtcttctgtggcagtgctccaaatcattaactgctcttgccgtctgtgctttctaagcgtgctcgacattatccagtttcgctggttccagtctttgggattccggatcgttgaccgcttccgattgtacacaggttcacgatcctgagtgaaaagaacttaatgactgtaagtaactgtttttcatatttctgctcgctacaaactgcaacggcaagcccacgctgtacgggaagtacatttttttggttcccccgacattgtgcactttgttttaccattctgcagatcacaaccggatatccttggcgtgatagacttcctgcatgcgtccttgtaagtcctccagcaagtaaacatttttcccgacggccacactcgctttcaggtacttggcgttgaaggctttgctaaaatcactcagcaataagttcctccagaagactttttgtcctggcttggcgtgcagggtgcgggcttgcttgtcatagcgctgccggctcgactcatagccgccctcaaggtgtttcttgactttggcgtggatgacccgggcatatcattcgcctgcattttatggtcgcacagagacctcagctgtgtggctagcttgtaactggctccattcagaaacatgtgttgaccgaatacagtgagggacggtgtttctgctgttgctatgtggacaatattccttatggccacctcggtctccggcagatccgcataccactctctgcgatccttgtccaagatgctccggatttccgccagcacatttcgatttgtcctcttcattgtgttgctttggggtgagtatatcgtgaatatatcgtcgtcttgatgtgttggactccgaccacatcgaccatctcctcaaacgtcatagatgtgaactgtttcccattcctcttgacttcttgcaccaactcctgatagtcttcggcagcaaattcggtcgtttcgagccccaataactttgttggatctgagaagacttcctccacttaccgtgacagggtatcggcgacaaagttctcgcttcccttgcgatgttaaatgtttaagtggtacccttgtagatgaagggaccatctggcgagtcgtcccgacagatctttcatcgtcatcaactacttcacataaggccgaaacttccgaatggttagaatagctggcagacacgccttctccgtgacagtgtagttgacctggtgtttaattattttggccgagaagagcgagttaacataccctcttcctctggccacaggaacacaacgaattcaacgaagatctccaatacgaactcggacgaagacatttgggagaaacatacaacttttgtaattctcatttcataccccaaacttatttcttttttttgaagcttccctccctcggccagaggattgtaataggctgctcctcgaggtcctggtttcgcccaaacgccaacctgagatgcgtcgaactggatgaaaaaatgtttcttaaaataagcatgaaccggaccggtgcgcgtgttaccataacaggtacaaccttgtctttcatcacgaactcatctctactctgtgcacatcaacgaacgcgataaaaaatctaaaaaaaagctttcgtctctactttgtgagcatcgactaatgcgataaaaagccctagggtgtaaccatagaagcatacataattgtttttcaataaagctttatcattgtgagttgtaccatctacttgaacagtagatcgtttaaattatccgcataaataaatcatctatgcaattaaatataagaag

SEQ ID NO: 36131 - DNA, 378 bp, DROSOPHILA
atgaagaggacaaatcgaaatgtgctggcggaaatccggagcatcttggacaaggatcgcagagagtggtatgcggatctgccggagaccgaggtggccataaggaatattgtccacatagcaacagcagaaacaccgtccctcactgtattcggtcaacacatgtttctgaatggagccagttacaagctagccacacagctgaggtctctgtgcgaccataaaatgcaggcgaatgatatgcccgggtcatccacgccaaagtcaagaaacaccttgagggcggctatgagtcgagccggcagcgctatgacaagcaagcccgcaccctgcacgccaagccaggacaaaaagtcttctggaggaacttattgctga

SEQ ID NO: 36132 - protein, 125 aa, DROSOPHILA
MKRTNRNVLAEIRSILDKDRREWYADLPETEVAIRNIVHIATAETPSLTVFGQHMFLNGASYKLATQLRSLCDHKMQANDMPGSSTPKSRNTLRAAMSRAGSAMTSKPAPCTPSQDKKSSGGTYC

SEQ ID NO: 36133 - DNA, 2336 bp, DROSOPHILA
aatgttggtgaattcataacacattttggaataactggacctttatctgcagcaattgtggcaacggctcggtgttttattcaaccaaattacaaattaagctcaatattacaaaccattttaagagatgaaataatagccctgcaaaaaaaaggattcagagaatgtaaactaatcgaaggctctgaagaccgttattccgatggaaattgtatggagcactcagtaaacattgtgaattcagcggtggatatcataatgacgcgttttaataaaatatcttattttgatagcattgaaaataagaagatttccgtgctcgttcaatcggcaactaacattgataatctttgtcgtatggatcctgcttggcatccctggctataatattgcaaatgttactctaaaaaccaaataaaatgatattttgtattgcagccatatgtatttaattcataaggcagattctcaatagtacattttataatactggtcatgtccttgggcatttgggatgggcatttgatgttaagactccactttgacagcataagctcgccgtactaggaacgtttccctgatccttggaggataaatggtatagaagcgcataaaaaataccacaattaaatcatatacccggtactcagctaatggaaatgtgaacgcgtaagttcataattttctgggatattatcgatagatattaaaaaacaaaatgggaaataattttttgaaatcgttcaaaattgtgagcgtgcccggcttgggcgttttgtatgtgtaaggaggggcgtgaccaaagtttatttgatatgccgaatgaaattgggaagacaaacaagaaacggaacgcttcttctgcctgctacatacgaatctattatatccttttacgctactagtaacgagtaaaataaagggtgcggataataagctaacctcgacgtctcccagccgagtggtgggcagacgctgcatgggtcgatcatgcggcggcctagaaggtcctcgagcccgtgtccagcacaacaatggctgtcggcaggatatggacacttttcttctgcggccgagcgatcgttggcgactgtggctcgggacggagaccgggagagggacatcggacgaggtgcagcgtgctgacccgctttgcgtgtcggaggtggcatcgatgccactgtcggatctgaacggagttcctcatgcatgtggagtagggtgtggttattccctccacacttcttgcatccctctttgctgcggaagtctcctcctgagtgccgatgggcgaggcagtttgggcagtacttatggcacgaggacgaggagccatttcagaaaattttgtgttgttttgtacagcgagacgtgcggttctcaacaatttctgtcgagccgccatttgtgcgatgaaagattctcctcattgacgactaccatcgtccccttggacatttgtggtcggaaattgccatttattgcgtttgtggagttccttaagatactgagtgggggctgtaatttaggcaagccccaatctgagcgactagcgtcatcagctccttaaacatgtacatgtgggcggacgtaaatttattaaaaaggggttttgaatcttttcactcctgcttatcacagaccccccatatatggagccccgtttgggataaaccctcacagattttttgatggcttgtagaaagtccctgtaaggtaaagttgctgccccactccttacaaaaggatcgctttcacacaaacaaatccctttgctctccttgtgtaatttttaatttcaaaagggccggcgtagtcaatgcccgtgtaggtgatggcaggctttcgtaaccaggatatctgaactggcggttggcatatgcggaagaattgccattaccatttcggttaacagcacgacaccacagagttctagccgtggaaggatacgggtttcagcggagccactcgtgatttggctgtcagaagaggggtcaagatattttaccccattaagatgtagatacccgctccatatgctttcttaaacgcgtcacagaatttgtgatgttctatggtcacctctcggatcgctgatctggataaggtcggaacactcatctaagaatgattgccacctatgactcatttcggtgggaaccttatagctggtcttataagtcctgcaaccaaatctcctgcatgaacactttggagcggatgatgaacggaatgagccacccggcaggatcgaacaacacagcgattagggacaaaacttcttgctttgtataggagggctccaaagctttacgatgagggacgaaatattactc

SEQ ID NO: 36134 - DNA, 336 bp, DROSOPHILA
atggctcctcgtcctcgtgccataagtactgcccaaactgcctcgcccatcggcactcaggaggagacttccgcagcaaagagggatgcaagaagtgtggagggaataaccacaccctactccacatgcatgaggaactccgttcagatccgacagtggcatcgatgccacctccgacacgcaaagcgggtcagcacgctgcacctcgtccgatgtccctctcccggtctccgtcccgagccacagtcgccaacgatcgctcggccgcagaagaaaagtgtccatatcctgccgacagccattgttgtgctggacacgggctcgaggaccttctag

SEQ ID NO: 36135 - protein, 111 aa, DROSOPHILA
MAPRPRAISTAQTASPIGTQEETSAAKRDARSVEGITTPYSTCMRNSVQIRQWHRCHLRHAKRVSTLHLVRCPSPGLRPEPQSPTIARPQKKSVHILPTAIVVLDTGSRTF

SEQ ID NO: 36136 - DNA, 2694 bp, DROSOPHILA
tattttggcattcggaacgaaatgggtttgggctatgcaattcgcgagcttcccaagtggagtcgttaacccgccgccgaagtcattatctaatggtaatgtgctgcattttaattgctcacttcgttcgtttatcgatcgaagtggacgcacctttcacccgacacttgcagcttgcagtggggattgcgaaaatcccttctcttcatctcaatccatcattaatccattcatcattaatcatcaatcatcagggattggcccatgagtgaactgtcgcgagcaatcgggaagttgtctatcggtggctatcgttgggattgggaaaacgattggcaatggtgataaactaatagaattgcaattagcctatagatggtgtttactgcccgatcattagtgcttgtccttggaattcagaaggatctttcacgtgggcaaaattgattacattgggcctctctttccgttttgtgattttttctatttgcctatctttgaccgtctaattgccttgcacttgcatcgaatttttcaacgtcaactggtttttcaactgggtggttgttaacccgttgattgacaacgggtttcggtttctcctgcgcaggaaactggccgccgccgcagcaaaggccacatgccgtatacgtaatccgctttaattgaaccactatcgcacgcacctattttccaaattttccaaacaattgtggcaggcagcggtcataaattacaacaacagactgaagttcgttgccgtgtgttgccattgttgctggtgttgcacatttcacatttcgcttgccacaactccagctacaggttggccagcgttggtgggattggcccaaaccgggtataaatcgaatctggtcccgaacgcagagccacattcagttcgccactgccaagaggagcacttcgcgtaacggtctacagtttcgaatattttttttgattgtgccccagtgtgtgattcaaaagcaaccagaaaaccatgctcaagttggctgtaagcaccgaaacactttacaaacatagattcgtttaatggaatgaacgttttcaagtcaataagatagtttatgaaaaacaagaaccaaatatttctgaatatttcggaatggaaaatggaatgcatgttctgtttttcaacctcaccacctcattaacaacttggaaatatatttaacattagatttttagtttaaaatggaataccgcattgactatattacccattcctgcagattacctgcctggcccttctggccgttagtggagctctgaagatccacgactaccaccaggggcacgaggagtacgagcaccacgaccatcatgagcaccacgagccggagcaccatgtgaagtacgagccggagcacgaggagacggagctgcaccacgaggtggaccacaagcacgccacctcgcaccagagcgtcaagttccaccactaccatgccgtgcccgtctacatcaagaaggaggaccagcacctggtgaaaaagcctatcgagatcggcggcaccaagcagaagctgaagatcctgcacccgaagagtgagcacaaccacaaccacggactggtgctcgaaaaccacagcgagtcgcaccacgagcacggccactacgaggagccggtgcaccactcggagcactacgagcactactcgcaccacgagtaggacttggactaccagaatcggaaatgccaaatgagctgtggggatttcgttagcgtttaaggatttgctacgttaattttcttgtgttaataaagcgttgacctagagtatagagtaccacccaaatcaagagatcttatattatattgcttaaacttttttgattgctccactctgaatttgccacaacttctttcacagtgtatttaactgctcaggtgaacttcgataacgatctatcaataattgaacgcgcaggcaatttatcgcaccacgaccgcttgtggtatttctgtgttctggtatatttttaggttcaaccctggcgaaaaattgtttttggcataactgctataaagtactgaagaaattcaataataatcttaacaatggcaattagacaaaaaatggtttaaaacacttgatgccttccagaggcggacggcatgagttatcgaactatcaaagaactgctggccccgataggttccgatacaaatcgcaccgctatcgaagaagaattgacttccattgtatatcgtttggaaacgcaagaagtgcacaaaactcgctgctttccggtgcagtttgtgaagaagtttgctaaaaagtgagtattttgcacctgcagagtattccgtggccgccgctggctgcttcccgaggactccgtgctgcctacgctttttcgtgttgcttttttcggctgcacggccccaagccaaaaaacacggacgcatcgcctgccgtgtgtatgtgtgcgtgcgtgtatgggcgagtgcgcgagtgttggtagttacttttccagcagctttttccaagtattgcgggtagcgccggagttgctattgggactccctggtacggacccctaaaaagaccaggggcgggcagtggcaggctaccgagtgcaaccgcattccagcaaagctggcgccctccgtccggctcctcccccttggctcggctgccgagatgtacacacacatattcggattct

SEQ ID NO: 36137 - DNA, 456 bp, DROSOPHILA
atgctcaagttggctattacctgcctggcccttctggccgttagtggagctctgaagatccacgactaccaccaggggcacgaggagtacgagcaccacgaccatcatgagcaccacgagccggagcaccatgtgaagtacgagccggagcacgaggagacggagctgcaccacgaggtggaccacaagcacgccacctcgcaccagagcgtcaagttccaccactaccatgccgtgcccgtctacatcaagaaggaggaccagcacctggtgaaaaagcctatcgagatcggcggcaccaagcagaagctgaagatcctgcacccgaagagtgagcacaaccacaaccacggactggtgctcgaaaaccacagcgagtcgcaccacgagcacggccactacgaggagccggtgcaccactcggagcactacgagcactactcgcaccacgagtag

SEQ ID NO: 36138 - protein, 151 aa, DROSOPHILA
MLKLAITCLALLAVSGALKIHDYHQGHEEYEHHDHHEHHEPEHHVKYEPEHEETELHHEVDHKHATSHQSVKFHHYHAVPVYIKKEDQHLVKKPIEIGGTKQKLKILHPKSEHNHNHGLVLENHSESHHEHGHYEEPVHHSEHYEHYSHHE

SEQ ID NO: 36139 - DNA, 4318 bp, DROSOPHILA
cgtcgtcgccgccgttcgcgaagtttgttgctggatgggctcgttcgctatcccccacccccacttatgtcgtgtcgtgtcgttgtctctctctctctctcgtactcgctcaaagcctgtcacccacttttctgcgcccgctcgccggctttggcgcggccttaaaacgtgagtacccctctctcgctccggcctgctctccgtcctgcgtgtgtgcttctgtgtgtgtgggggagagtttggcgataatctccaatttcccgataagatatcccactgtgtcgtcgcactctgcccgctcccctctcagctcgagcctgtccggccccaaagagccgcttcggctgccgaggagagcgtctagaaggatcgcacctgcagcgcaatcgatgccacgatggccactttctcaaggagttcgtccacgcactacgcgtgcaccgtaagaaaaagtgagaattctagccgcataccttccgaagtttacgagtagcatcaaggctacctcgttcaagggaagccatcaactacgttggagcacatgcacagaagcaatcgatcattgggagcgttgtctataccataagcatgtttcagacctgccgcctttatttcctcagtgcaccgcgctctcttcatctctcttttcggcttatcactcccactgtgtgggtggcgtggagtcgagtcgagtggagtggattggagtggagctgttgcgtttgttgttgctttcattatgttattaattaggcgagtggcggctgtggtggcgtaggtgggatcggatcgattgctaggggtgtgtgttcaatcaggaggtggggcgatggtcgctggtcagtgtgtcgctggtcactgtgtggagcacagatggtggccacttcggccctcttcgctgccgatagaagggatagaaggcccatgcaaagctccagagaataacacagtgtgcattactttctcccccagcttcacgacgtcttgcaaacggttgaaaatggagaagactccccggtacacgcagcgggagcggaacatggtgttgagctacgcggcgcagtacaaggatgtgatcgagaacaagcgcacggacgcggagtccaaccgcaagaaggacgaggtgtggctgcagatcgccaaggagttcaactcgcgggtctaccaccagcgcagcgccaagcagctgcgccagctttacaagaacatgaagctgctgctcaaaaaggacctatgcggcgaggacaagagcaaccattcgttcatggacctgctcaacacgctgtcgcaccaggagtccgtggcccagtacattgccgagcagctgtcgccggagggcgcgggcggtggcggcggcggcggtaagcaaggcggcgcgggcaacggaggcggaaacggacaccaatcggacgactacgacgactccaaggtgggcttaaaattcagatctgtgcataagtgtcccatccggtgcttaagtctcaagactcaagtcacttggtccacttggtgaacgtggtgcacttcatctaacccactaatccagatgaatagctttctactttcttgactctctgaaccctgtgaatcctactaaaacgctgtccatgatggtttcagtatcatttattttcctcacacttgcagatgccccactaccacgagggcatggacacggacgtgatccttatcaagtcggagacaattagcgacaacgagcagacggacaatggcatggactgcctggacgaggacgatgacgacgactgcttgagccacaaggcgccggaggtgtgcctcgaggaggaggacgacgtgctctttccaacggacgtgcgccagctgcagcaggtgggatcgtccggagccgccggcggtggtgtctccggaggctcccttcccggaaacatgtctagcaacgggattaccgaaaccagtcgccgcgccgcaagctcgcccgtgtgctccacgaagacctcgattagttccagcgggagctacgcatcagcgcccaaaccggacatcactatccagaccgtgggccacatacgcgtgggcagctttgccaacatcaacaagacgctgcagaacggcggctccggcacaggagctgtcctatcagcggccagcaatggcggctccagtgccagtggagtgctgccgctcacagcggagcaagtgcagcagcacacgctgctgaacggcctaggattgtccgccgtgaatccggctcagtctctgcaggcggccatcaatgccgcctatgggtccgccgctccatcttcatcggtcgccattagcagccgccgcacccctcccactctgcagttgccacgccttcagcgcggaaacatcaacaatagccaccacactgccggcagcacaagcaattccgcggtggcctccaatggagtgcaactgttgctcaacggcggccaccacgcacagatgacgcacaaccatttggcgcgggacaagacaggaggcgtggccatcggggcggcgggcagtttcaacgggtacaacggactggcagtggcgggcacagtgtgcagcgccttgaacagcagcggatccggagccggaagcggcgggagcagtgccaacaacagcggcgtgggcctggggatcggcggggcacacacgtcgggcagcggaggaagtggcagcggtgggacgaggagccagcaccaggagctgatgaattcgctgaggatcgaggagagcaagcggaaaatcgacctgatcaacgcccaaatcgaatactggcagacgctcacccgcaagctgaacagtcaggcgaatcacatgcccaatcctgcgtgcccgtgccacttccctggagccagtgtgctctcgcccgtcgccgtgaccgccgctagtgcctcatcgtccgcttccgccaatgtgttgcagacgcaggccagcaccagctagtccgcagccaaggggcggttcgaactagtcgggggtcctgcgggcgaaagcgaaagcgacagcgacatcatctcgatagtggacatagatgatgggcggtctagggaggacgagcagtcggaggacgatggcgagaaccgtgaccaggccataacggacctgacgctacccgacgaagacgaggaagacgatgtagacgaagatgactcacaggatgccttggtcagggatgttggcgtggtgggcggcctgtcgtcgccagatacaccgccccactcctctccgccgccagcgaagcgctcgaagcgccaggaagtcacctccgagctcctgaggcagctggccctgcagcagaatcaggatccccaggaggggtgctagtattttgtctagtttgctaattttatacttgctaccatggattgacgcaaccactttgtaacattaattttaccatatatatttatttacgcccagtttgagtgccaaaacagaaaccaagattggggccttgccatcgaaaatgcttgccaaaggacctgctgaaataaccggtcataaccactcgcgacccactatttatttgccagcctaactgaaacatagcgattcatctcattttaaaatgtcttgcgtcgcctatttttttattgcctttttttttctatacatgtaacgtgtttatttttaagttttcctacgagctgctaccaaaaagaataagaagaagaaggtgactatcttgaatgtacatttactttacaaaactagaccttacttacttacttaattagagatcgagcagctaagaacgcatgaaaatgaaatgtacaaatgtggttcctaatctagtccctaaagtcaaaagtgaagaacgaaagagctacagaaaagaaatcgaaattgttacgcctagccgagaacttgtgtattatttttttatatcgcttagattgttcccccgaggaaagcattgaaggaactgtagctaatttatgtacttaatgaaccagtgaaaccaaaccaatgatttgaaatggtgtaaagagaagaaacttgctagtcgccgctgcataactgtgtaaatgtggcacacaaaccatttagttagtgttagtgctactgtacgtgtaaaatacaattaattgcctatccagacccagtaaccacaatttacaaggaagcacacaccaaacgaaactgaaaaccaagaaaacaaaactatttatacaattttgtaaacaagaacttattaataaaacaatgaatttactttgtggcccagcctgttgacttttggatagtaaaatttcgtttaaggcttaacattttggcacttacgctcattttgctcgcttaagctgctcttcatttggcgcca

SEQ ID NO: 36140 - DNA, 2022 bp, DROSOPHILA
atggagaagactccccggtacacgcagcgggagcggaacatggtgttgagctacgcggcgcagtacaaggatgtgatcgagaacaagcgcacggacgcggagtccaaccgcaagaaggacgaggtgtggctgcagatcgccaaggagttcaactcgcgggtctaccaccagcgcagcgccaagcagctgcgccagctttacaagaacatgaagctgctgctcaaaaaggacctatgcggcgaggacaagagcaaccattcgttcatggacctgctcaacacgctgtcgcaccaggagtccgtggcccagtacattgccgagcagctgtcgccggagggcgcgggcggtggcggcggcggcggtaagcaaggcggcgcgggcaacggaggcggaaacggacaccaatcggacgactacgacgactccaagatgccccactaccacgagggcatggacacggacgtgatccttatcaagtcggagacaattagcgacaacgagcagacggacaatggcatggactgcctggacgaggacgatgacgacgactgcttgagccacaaggcgccggaggtgtgcctcgaggaggaggacgacgtgctctttccaacggacgtgcgccagctgcagcaggtgggatcgtccggagccgccggcggtggtgtctccggaggctcccttcccggaaacatgtctagcaacgggattaccgaaaccagtcgccgcgccgcaagctcgcccgtgtgctccacgaagacctcgattagttccagcgggagctacgcatcagcgcccaaaccggacatcactatccagaccgtgggccacatacgcgtgggcagctttgccaacatcaacaagacgctgcagaacggcggctccggcacaggagctgtcctatcagcggccagcaatggcggctccagtgccagtggagtgctgccgctcacagcggagcaagtgcagcagcacacgctgctgaacggcctaggattgtccgccgtgaatccggctcagtctctgcaggcggccatcaatgccgcctatgggtccgccgctccatcttcatcggtcgccattagcagccgccgcacccctcccactctgcagttgccacgccttcagcgcggaaacatcaacaatagccaccacactgccggcagcacaagcaattccgcggtggcctccaatggagtgcaactgttgctcaacggcggccaccacgcacagatgacgcacaaccatttggcgcgggacaagacaggaggcgtggccatcggggcggcgggcagtttcaacgggtacaacggactggcagtggcgggcacagtgtgcagcgccttgaacagcagcggatccggagccggaagcggcgggagcagtgccaacaacagcggcgtgggcctggggatcggcggggcacacacgtcgggcagcggaggaagtggcagcggtgggacgaggagccagcaccaggagctgatgaattcgctgaggatcgaggagagcaagcggaaaatcgacctgatcaacgcccaaatcgaatactggcagacgctcacccgcaagctgaacagtcaggcgaatcacatgcccaatcctgcgtgcccgtgccacttccctggagccagtgtgctctcgcccgtcgccgtgaccgccgctagtgcctcatcgtccgcttccgccaatgtcgaaagcgacagcgacatcatctcgatagtggacatagatgatgggcggtctagggaggacgagcagtcggaggacgatggcgagaaccgtgaccaggccataacggacctgacgctacccgacgaagacgaggaagacgatgtagacgaagatgactcacaggatgccttggtcagggatgttggcgtggtgggcggcctgtcgtcgccagatacaccgccccactcctctccgccgccagcgaagcgctcgaagcgccaggaagtcacctccgagctcctgaggcagctggccctgcagcagaatcaggatccccaggaggggtgctag

SEQ ID NO: 36141 - protein, 673 aa, DROSOPHILA
MEKTPRYTQRERNMVLSYAAQYKDVIENKRTDAESNRKKDEVWLQIAKEFNSRVYHQRSAKQLRQLYKNMKLLLKKDLCGEDKSNHSFMDLLNTLSHQESVAQYIAEQLSPEGAGGGGGGGKQGGAGNGGGNGHQSDDYDDSKMPHYHEGMDTDVILIKSETISDNEQTDNGMDCLDEDDDDDCLSHKAPEVCLEEEDDVLFPTDVRQLQQVGSSGAAGGGVSGGSLPGNMSSNGITETSRRAASSPVCSTKTSISSSGSYASAPKPDITIQTVGHIRVGSFANINKTLQNGGSGTGAVLSAASNGGSSASGVLPLTAEQVQQHTLLNGLGLSAVNPAQSLQAAINAAYGSAAPSSSVAISSRRTPPTLQLPRLQRGNINNSHHTAGSTSNSAVASNGVQLLLNGGHHAQMTHNHLARDKTGGVAIGAAGSFNGYNGLAVAGTVCSALNSSGSGAGSGGSSANNSGVGLGIGGAHTSGSGGSGSGGTRSQHQELMNSLRIEESKRKIDLINAQIEYWQTLTRKLNSQANHMPNPACPCHFPGASVLSPVAVTAASASSSASANVESDSDIISIVDIDDGRSREDEQSEDDGENRDQAITDLTLPDEDEEDDVDEDDSQDALVRDVGVVGGLSSPDTPPHSSPPPAKRSKRQEVTSELLRQLALQQNQDPQEGC

SEQ ID NO: 36142 - DNA, 2673 bp, DROSOPHILA
ctaggaggcaacttggggaaggggagcaaccgggtgctccgagtggggaaagtagtagccctgctcatagaatgaatgaaagggatgaagggtgaaggggttcgcatgtattcccaagctaaccggctaaccagctgactatgctctttttttcagatccgacgattgacgaaaagggtcaaacggcaaacgcgaagagaattaagagataacaaactgaagaatcgggagataaaaccaaagaacatttaagaacaaaacaaaaatcgaattttcatgtttaaatcgcaaaaccaaaattatcgataaagaaattaaaggaaaaccaaagagagaaaaaccaaatataaagtaaattgctaccagtaaacgctagtccaaatcttcactatatgaatatatgtatactatatatatttaactaataatacttcaagagaacacgccaattgccgcaactttactccaacccgtaaaaaagcaaagatttccattaaacaaacgcaaaataccaaatacctaacaacacagcttcgaagtgtgcacaataacaaagtaaaaagttattaaccaaaaccaaagaaagacacccaaaccaaaaccaagacaaattattattaaacaaaaccaaaaaccgaaagacaattaagcaaagtcgaaaaaaaactgcgccaaagtcacggccaacaaacacaaacacaaacacatacacaagcaacaagcagcaaaagcaacagcaattgcgaagtgaagcgtttccactgaccacgcccactccccgcggctgagcaatccgccccttgaagcaattttccgatttggcagcgcatcgtttccgagaaatcttgcgtgcgccgggaaaactgaagcgccagtgtcggttggttaacaagggaacacccagagtataccctcttttttttcgagtgtgcgaaccagttttttttgtgtgtgacccaaaccaaaggcaagaacaacagctacaactgcaccaactgtgatgggagatcagccaaaggcaacgacaaccgcaaccggaggagcagctggcccagttcctgaaggcgacgccgtgatggccaccaccaaccaggacgcgctggccaagggtgcaggagatggtcctgcccaggacgcggcccaggagccaggacaggcggagcacggtgagcccggggatggtggcgatggcggtgacgatggtgccaccgatgccggggccagctcgctgcccccctccgagattggtgggcgggcgcccctggacacggcctgctcggacgccgacggaggagccccctccagcctggccggtggaattgtgggtccgcccagcccgctcaccggctgctacctcctcatcgtcctgggcgagccgcactccgaggagcacaaggacaatatcttgcagcatctgctcaagggtgagtttaagtcttatattccttaccttatgttgtttcacatgccaacgatttccacacctgggactgtggaacataacacgatggttagccttagtaatcttgaaagtggaaggtattcaatgtttctggccgatttgcataggtttgttgatcctcgatattcaagcagaaaattcgtgccgcttgtttgccagtgaaattttcgaattggcaaaaaccgaggccaagaaaatatcattggattaaatgcatatttcgatgcgagagtagaaagtcagggaatgcaaatgaggattgggagtccatgattgaatgcccatggtcgcggtcgcggtcaagcctggccgattcgcgtcgcgtgtcccgtttgggctcacaccacaagccagtcggcctgtttcagactcccgtctccactccattccaattaggagcgatccacccactccgtccagcctctccagcattttcacactttgctggccgccgtcgtctcgtctgctggtgcttctaattagcaggtggagtagctggagctgggcagcggacggtggatgttgggtagtagctaccactagctgttccagcttcatctttcacttttctctgtcatgctccaacgcacagattctgatttgatttttgtgattgcgttgtgatacgatttggtttgtttggttagaagtttctaatacccaatcgctggaagtggatgagaaatgaaaagtgctgactcgtaggtgcgaagcctccttgacaccagccagtagccagtagccactccaattacgcgctgcctgttaattgcgtttcaatttccgtgctctcggacagaccaggtcagtgcgctccacgtccgtgtcctggttgctggttgtcgtgctgggtgcaaagtcccgtccgcaaactcaatcgggaatgtcgcttgtaattcgatttaagcaaattgcgcatgaaagtatgcaggcttctgatgtgaggctgcagtgcacccactttgccggtttaattaaaatcgaaagcatacccgcacccagaaactggcaggcaggacaaacagcggcgaattgtttacttttaattgtattaattattttcatgttgattgcattacaaacagcaacatgcaaacaacaacgccagcttcagtaaaaaatggcaattgtgtcagagttttgagctctgcggcgtacagatacacatacagatccggatacagatacagatacagatacatatacacgtg

SEQ ID NO: 36143 - DNA, 528 bp, DROSOPHILA
atgggagatcagccaaaggcaacgacaaccgcaaccggaggagcagctggcccagttcctgaaggcgacgccgtgatggccaccaccaaccaggacgcgctggccaagggtgcaggagatggtcctgcccaggacgcggcccaggagccaggacaggcggagcacggtgagcccggggatggtggcgatggcggtgacgatggtgccaccgatgccggggccagctcgctgcccccctccgagattggtgggcgggcgcccctggacacggcctgctcggacgccgacggaggagccccctccagcctggccggtggaattgtgggtccgcccagcccgctcaccggctgctacctcctcatcgtcctgggcgagccgcactccgaggagcacaaggacaatatcttgcagcatctgctcaagggtttgttgatcctcgatattcaagcagaaaattcgtgccgcttgtttgccagtgaaattttcgaattggcaaaaaccgaggccaagaaaatatcattggattaa

SEQ ID NO: 36144 - protein, 175 aa, DROSOPHILA
MGDQPKATTTATGGAAGPVPEGDAVMATTNQDALAKGAGDGPAQDAAQEPGQAEHGEPGDGGDGGDDGATDAGASSLPPSEIGGRAPLDTACSDADGGAPSSLAGGIVGPPSPLTGCYLLIVLGEPHSEEHKDNILQHLLKGLLILDIQAENSCRLFASEIFELAKTEAKKISLD

SEQ ID NO: 36145 - DNA, 2201 bp, DROSOPHILA
gggcttcaaggtgccccaaaggtaatttgattcattttgccgcacacacctggtcctgcccctcgagctctttataccacactgcatccgcataaacacaaatttgcccacacatacgaacagctaggggaaaactattgaaaattcggaaaagtggttggagcatgaaaatgatggaagggcaggcccattcgtttgggcttttacttgctcatacctacgttgaaagtcggactgctgacttaatttgttgactaaatgacataatatcaaaagtccagagcagtccagttcaacgtggcgtatgcgtaatggatcccacccgttttcaaaccaacccaccaccggcagctcatttatcaaaacggcgaattgccaaccattcacagacgctgtgcataattacacacaactaatgtgtgagtgattaatggcccctaggcaaacggaccagccactcatcgtttattcacccagcgaatgcactgtcatgtgcgtagtgcaaggctacagtcgaagagctaactatataactagctaactaactaattaactaactaactaactaactaactaacgtgccacatccttactgatcttctttatccctttgtttccttgcaggattcctctcctgggacgtttccgattgtcacgtcgacttggaagaggagctcaatacaattacacagcatgcacctgagggcgaggaggctcgtcacggtaagtccatgttgactaagtcatctgcaaaatagctccaattagcgaatccaatcgtggcacgcggagatcatcggatcgcatcaggcaacaatggcaaatgtggtaaattagaaaacttattccagtgaattattaggacaattgtctccggaaaatagtcaaagggcaacgaggggagtttggtggccagggggcatgggcccggataaacaacaattgaattcacaaagctgaaagctcgacgttttcatgctttgttgttttggcttttgtgatgaagccggcccaaaagcagctgccaaacaagaggctgtattttcatttgtccaagtgcaacagcagcagcttcatcgtcgtcctcaccctcatcctcatcgccatcaccatcaccatcaccatcaccatcatcatcgtcatcatcatcgacaggagcaacaataagctggctgacgggtctgttgtctttgcggattaggctaaaacgatgttgaagctcactcaagtggctgccactgcatcaaccaagtcccgcttccgcgctcttcgcggatctatttgccccctttgttgactcgcactggagatgattgggattttcttccttccaccccctttagttctcaaaagccgtcctatttgatcaaaatcccgcagtatgagaactcacagattgcggcaatgctttcgcccaagcattaaacagtgaccttctctaccttgaagttttttgtgctgtgcagcaacttgaaaacttgttagcgttctaaaactatgaaagtagtataaacgtaatatttccttatctttaggtgtccaatatgttattatagttttcgaaaagcaaatacaaattccttggatttctcgagcccagctttgaatgccagcatgaaagaactcaccttggaggacattattcttcagcgacaatgaaacgaaagtacgtttaaaaggactgggacttggcagtgataaggcgcgttcttcttcttagcatgcctctcgttcgatggctatgctgaggcgttgtccttgaaggacatgctaagtgcaacacctgcgctgaatgccctccatttagccattgtccggatggggaaaagttggcaacgacagcgggccctccattttgcatttgctctcgcaatcgcattttgtttgcgttccctcctcgaaactactcaaacaaaattctgaagtggcgccgccacagagcggtccagagcccaataatgatggtgcaacaacagccataagcataaccagagtgccgccacggcagccggcagagctggagtcgaatggtggccggtgcacttgagtcgcgattgagaatacagaatgcacagaatgctctcgcttcgcttggcgcattgtactcgcacaagatccccattggcgcgctggatgaaaagaaatccaggcaaagggccgatggtgtccaaattgtccaccttcctgcgtggctgccttcg

SEQ ID NO: 36146 - DNA, 201 bp, DROSOPHILA
atgaagccggcccaaaagcagctgccaaacaagaggctgtattttcatttgtccaagtgcaacagcagcagcttcatcgtcgtcctcaccctcatcctcatcgccatcaccatcaccatcaccatcaccatcatcatcgtcatcatcatcgacaggagcaacaataagctggctgacgggtctgttgtctttgcggattag

SEQ ID NO: 36147 - protein, 66 aa, DROSOPHILA
MKPAQKQLPNKRLYFHLSKCNSSSFIVVLTLILIAITITITITIIIVIIIDRSNNKLADGSVVFAD

SEQ ID NO: 36148 - DNA, 2267 bp, DROSOPHILA
aatgaatgtgttactgccattcgaagctttttgtttgaaagtgagtctgcagctcttaactttataccagccccatatgtatattctataacttctatataactctatgcgcctactcgccttgttcgattaattcgaaaacagttcctcgagaaatattggaaaactacaaacgaaaatgggaaaagctggagcacggaaaggggagcggggcaacttttatggtgatgcctttgcctaaaaatagcaatagctcgcccagcaaacgtctcatttttccaagtgtgcttcaaaaatgaaacgtttctcattctccaagttcccactacgatcgccgattttctatgtgctgcgatctgatctgatcgcatccaatccgatccgatcccatccaaatcgatccgatttgatctgatcttcagtgatctatatccgcatccagatcgccgtggcacgacttcgagtagcagcgcagcgccccgtggaatctaattttgggctcgtcttgagcaggttcacttggtgcctggatggcggtgcccactccgctttcccgactgcatttccagccccatgccaggccatgccactgcgccactggctaaatatagagccccgacttcgacttcggcttagtgcgtcgggatgggctgtgtgcctgcagaaggtggggagggaagttcaattacctttaaatggattacacaaacaaccagtagggcaggggaggggcggaagcctatattaaacacaggcacgcactcacaccccagaactagataaagcaacgcaaacagagccaaccaggcagaggtggagccaagcgatcgggcctctgaacccaattcctattcctattccgatcccgatccgacgcctccccctttctcagcctcctgagtcccggaaaaacggaaaaaagcggagcagaggatgagcggcaagggggacgatggtgcggcgatgctgccaaaaataaatttgaactcaaatcgcagcgtcaggcgcgaagggtgaggcgactgggtgccaagaaacgctgccaacgcaacgcatttgcctccaaagaccggcccatggcagtctcctttcgggccggggccattggctcctctggcagcccagccggacccaggcaaacggtcctcggaactccgattggacaactgaagttgaggtcgcaattgatcttgccaggtgtggcagaggccagctcaaggatgccattgggcacttcgtccgcgcagggaagtcgcggagggggcatggggagcagagcaagaaggcgggggaggctacgtggccgacctcattagtctcgagtttccaaaagctcacgcacaccagcgtgtccgtgcccactgggaagacggggaacgggcggaacgccgaaatggaaaatgggaaatcgaaagtggaatatggttttccgtgcgctcgcacccatcaattttcatcagcggcgagagagcttaaacagcggctatttgtaaacgaaggcatctgttaggcagcccgcacaacgcgcccgatccgcccaccgcttctagccaaaagccaaaagccgaaaaccaaaccaaagcgatccaaaccgatccctctctcgcttttcccgctcccccctgcctgcaccgcgcgcggtgggactttggggcagctatttttaaagtcgaaaatacttttcagctgccaagttgtgagatgccaagtacagttgcctactcagatcagatcaggtcgggttggatgagattggttcccatcacggcacagcgcactcggcatgcggattgagctcctcggctggcggtccttcgcaggtgtgttgtcttcaagcgctcaagttagaacgggcaaaaagatctgactctattctactaaccaacttcttctgcactcccttttcattgagacgcagtacaaaagctaactaaatacgatactgaaaagatatcctggtacccaagcccgaaactccagtttagctaacctgtaggtagctaggttggaccaaaaacgggttgtttgaaaaacgtattcggactgcgtattccgtggataccaagatcccaaagatgcgccatccatgccaggcctgcttatccctgcttttcccgttggcccgttgatctgctgccgctgcttttcacttgcctctggctgtggatgtggctgtggctgtgcgcaatgtaaattcgttttcccgaagctccgctctttctctttctcttggacagacgcgcaggcatagctagagatacagatac

SEQ ID NO: 36149 - DNA, 267 bp, DROSOPHILA
atgccccctccgcgacttccctgcgcggacgaagtgcccaatggcatccttgagctggcctctgccacacctggcaagatcaattgcgacctcaacttcagttgtccaatcggagttccgaggaccgtttgcctgggtccggctgggctgccagaggagccaatggccccggcccgaaaggagactgccatgggccggtctttggaggcaaatgcgttgcgttggcagcgtttcttggcacccagtcgcctcacccttcgcgcctga

SEQ ID NO: 36150 - protein, 88 aa, DROSOPHILA
MPPPRLPCADEVPNGILELASATPGKINCDLNFSCPIGVPRTVCLGPAGLPEEPMAPARKETAMGRSLEANALRWQRFLAPSRLTLRA

SEQ ID NO: 36151 - DNA, 2180 bp, DROSOPHILA
caagaaccgggactaggactaggaccagcacaacgacgaccacagcaagaggagaaggattggaatgcagatcacaatgggaatgacaattcagacaattcaattggccaattttcgtgagcaggagccgcaggaaacggaaatgagacgcacgttggctgatatggcggagtttgggtcacgcgaatgactccattttgtttaccaatgccgcctattgagctttcgacgacttgtttcggccgaccaaaagctacgtaattaattaatattaagttttaaaaattaattaccaaaagatgcattgcaaccgatcctcagtggtttagtcgaggagaagctatttatgtcactttcattgcataacgtcaagctaccttgcttagtaatccaaagatcaaaatagttttcaaaaccgcatagctaaaatatacaaaggagaaacgaaaggcgagaaaatactaagaaaagacaaactctatatatagagtacttaatattcatgtttaatatatgtattagtcgaaacttttacgaaccctctcgtatggtctccccataccaaaggtattcgaattttaaagcgagcattagctaattgaacgtgtataacccgtaaagtcagagctctttagccgtaggataataagcgatcataatacagaacgaagatcggagacggattcactacccgcccttcggactaaactgaatcaaacgttagggctaacaattgagtgcaacaaagattttcgatttaccccttaccgaagcaaatctagtatccgagtgtcgggatttaggattcgataccctcaatatttaagtaattccagatctaatagttttcatagtccgttctcaccgtttagtttcgtatgtttttctttgcatttcgtttcgttgtttcagcaggcagccgcagaaagacttagaacccaatttgctatagcgaccgatatacgtatacctccactcccacatatgggactaaaggaagatgagaagcgaactgacactgggaattggggattgggaactggagtggcgagttgatgcagttaggaaacgaagggtcataacgccattgccggaggatcaaggaagcaggaaggtggtcaaagtattggatgaagacgatgacgaggacggtagagtcaatgctgatgttactatgtaaggatctgagtgatctaaatggggttaggaataggactagaactgggcttgtgatggggcgggagtcttgggttgggtgggttgggattggggtcgaatagaatagaatggaatgggatttaatggatggatgaggggacagtgaaacagctattgtgagaataaaacgagaatgagcagagagtcataactaaatactcgtacgatacgataaatatgaagtacacaaagtgaatgaaggttatttttctatattttttttacttttcatagtcatagaataacaaatttgcaacaaacaaacagacaagatatgcagcaaggcgcgaaccaggcacacaggcaattttaatcaatgtaaccagtaaccagttaccaatatcgaagaaacaaacggaacaagcaattcgaggccacagcaaaacagtccaaaagagccagttacaattataaattaaagacagactttttaggctacgcgtatattttttagttgctttttatatacaacagcaacagatctgggaggagttgcggccgatcaactttcagtatgcagtatccagcatgcaacatgcaacatgccccatgcaacaggcaggccgcagcagacaacagtcaactggcaaccgtccagtctacaccgtttgatagcaaccagcgaaatttaagcaaaattatacacacgtagggctaagaggggcggttcaggcatacgactagggcggatcatgatccgcattagcgctcccaaccgaccagcactcgactttcgattattgggtagcattgcagtctccgcttcgaggattttaaatttataaccgagaaaaaccaaacacgaagtttattaaacattaattactttccaaattcgtgcgcttagcgagcaaaaccaaaaccaaaaaaaaacctaaggaggttaagataaagaatactcacacatgaactatatacactatatatgaatatatatatacatgaatatatatatatatata

SEQ ID NO: 36152 - DNA, 180 bp, DROSOPHILA
atgagaagcgaactgacactgggaattggggattgggaactggagtggcgagttgatgcagttaggaaacgaagggtcataacgccattgccggaggatcaaggaagcaggaaggtggtcaaagtattggatgaagacgatgacgaggacggtagagtcaatgctgatgttactatgtaa

SEQ ID NO: 36153 - protein, 59 aa, DROSOPHILA
MRSELTLGIGDWELEWRVDAVRKRRVITPLPEDQGSRKVVKVLDEDDDEDGRVNADVTM

SEQ ID NO: 36154 - DNA, 2851 bp, DROSOPHILA
gcggacgccgtgcgtgaccacagtacaaactagattacattaagttagactagctaatcccaagctgaacccaggcccctttcccgccgtctggacccctctaccccgtccggaacgctctacgaaagcaagtaactaactaacacaccactcaccgggcagcaacaacagaaacgaagatggaggggcgacgggcggcacgatctgctcggtcacgctctcgtttacgagcgacgtaaggtgtttgcgtagtgactggcgcgggagagccaaacgtgccgttattcttcattcatcaatggcgagcctccccctcgtgcacccgaacccacacgcctgtctcgttacgtaaagtccttgcaaaaaaaacttccactctcgttgcgtgagaggaaatccaggagctgattgagggtcactgggatgcttcgtacagagttcactactcgaccaaattcgtagaatgaatttcgtaattcgggaatgtttttccccccgccatatatacataaatactcagtctcgtgcctgtcaagatcccaatgtgcccaatgtgcacccctcccttttgtgagcggcatgcacatggtgttggtgccgctcgctcggctgagggtcaagatcgccgcaaagaaatgctcgcgaagcctaatatttgtgcatcccgcgactgccatgtttgaatttagcattcgcaaactgcactcatcccactcatcgtgcagtttcagtgcggcattcggcgcaggcgaacagcccatagcgatatcgaaaccccatagccacaggccacataccagagagcacagatcacagcaagtaccctccatattaagtaccatggccagctcctgtccccgcggcgcgcattcaatgaccttcgaatattgctaggaaggccgacctccccttcgtcgtcgttgctgtcgttgttttggtttaggttgagcaatagtctaagacccgcccgttacccttctccatgtctccttccgggcagcataagtgatggtgcctgcggccgtcaagctgttgcaggcctcgctgggccagtggcgtcgagggagcaagctgcatcccatggccaagggcgcgctcacgtacgcggtcatgtggccggcgggcagcctgatccagcaggctatggagggacgcaagctgcgtaagtaattaatccgcaccaatcgcatccataaccgtttcctgctcttcatccgcaacctctttcctcgctgacgacgatccgcaggcgagtacgactgggccagggcgttacgtttcagcttgtttggagctctgtacgtggcgcccactctgtacggctgggtgcggctcaccagcgccatgtggccgcagactaatctgcgcacgggcatcgttaaggtaaggactcagactcaatccggctcctcagtcgcagcggaccaagctcaaccgcctctttgcaggccatcacggaacagctttcctacggaccattcgcttgcgtaagctttttcatgggaatgagcttgctggagctgaagacctttagtcaggccgtggaagagacgaaggagaaggcggcgcccacgtacaaggtatggcctatcccgttgcttgctgctcccctcgctaacatccaactcattactaaccctccaggtcggcgtatgcatctggcctatcctgcagaccattaacttctcgctggtgccggaacacaaccgcgtggtgtttgtaagcatttgcagcctgatgtggaccattttcctggcgtacatgaagacgcaccacgaggagcagtcgaactccgcggttctgccttgtacatagttacctgagtcgtatttgttaccttttgtgactcccaattgttaggccaattgttgaattagatagcggtagcgtatgttaatccgtattttaatggggcctgttaaatccattagctgcttaggctaggcggggatcgtcccacaatcagctggcccacccaaagcgacgacgggggcgaatagctatttaccgtctctacaatccagtccacgtaggccgacacctcggtgaagacgcccggaaacggtggccgtgcacagggctttatgctccaagaaacaatgcccacctgggtgtcggagccaataagaagcagcgggcctccggagtcgccgctgcactggccttttccaccttcgggcaatcccgcacagatctggctgtcgtgcagataggtctgatggcgctcgctgcactcggtatcgctgaacacttgcagtttgaccttctgcagatgctgctggaccacgccgcccgtctacaattgaaaggttcagtcgatagtcaaggagtctgaaggaggaatggcttctctcttaccgcatttaatccccagcccgcgaggacagcactggcgtttccgggcgtgacttgtcgaggctccggcagacgcaccggctggacaaacttgctcaaagcgacggactgcgctaactgcaacaatgcgatgtcgttgacgtacttgtcctccggctcgtaccctggatggacgaagatggcggccacgcgggccacctggctggagtttcgcgccagcatctggctgccgtactgcaggtcgagctgctctggcgaggagcctcgcacgcagtgggcggctgtcaggacccagtacgggttgagcagcgtagcgccgcaggagtgacgtccgctcttcgcgcgtcgcagcgagaccacaaagggaaactcccccgggccagctgtagtgccgttgacgatttttccatcctcgccagaggctcctgccagaaggaaggttgccgtgtagaaaagtgcgagccttgctagccaagccatgacggccatctatgtg

SEQ ID NO: 36155 - DNA, 635 bp, DROSOPHILA
cataagtgatggtgcctgcggccgtcaagctgttgcaggcctcgctgggccagtggcgtcgagggagcaagctgcatcccatggccaagggcgcgctcacgtacgcggtcatgtggccggcgggcagcctgatccagcaggctatggagggacgcaagctgcgcgagtacgactgggccagggcgttacgtttcagcttgtttggagctctgtacgtggcgcccactctgtacggctgggtgcggctcaccagcgccatgtggccgcagactaatctgcgcacgggcatcgttaaggccatcacggaacagctttcctacggaccattcgcttgcgtaagctttttcatgggaatgagcttgctggagctgaagacctttagtcaggccgtggaagagacgaaggagaaggcggcgcccacgtacaaggtcggcgtatgcatctggcctatcctgcagaccattaacttctcgctggtgccggaacacaaccgcgtggtgtttgtaagcatttgcagcctgatgtggaccattttcctggcgtacatgaagacgcaccacgaggagcagtcgaactccgcggttctgccttgtacatagttacctgagtcgtatttgttaccttttgtgactccc

SEQ ID NO: 36156 - protein, 196 aa, DROSOPHILA
MVPAAVKLLQASLGQWRRGSKLHPMAKGALTYAVMWPAGSLIQQAMEGRKLREYDWARALRFSLFGALYVAPTLYGWVRLTSAMWPQTNLRTGIVKAITEQLSYGPFACVSFFMGMSLLELKTFSQAVEETKEKAAPTYKVGVCIWPILQTINFSLVPEHNRVVFVSICSLMWTIFLAYMKTHHEEQSNSAVLPCT

SEQ ID NO: 36157 - DNA, 2743 bp, DROSOPHILA
acaatccagtccacgtaggccgacacctcggtgaagacgcccggaaacggtggccgtgcacagggctttatgctccaagaaacaatgcccacctgggtgtcggagccaataagaagcagcgggcctccggagtcgccgctgcactggccttttccaccttcgggcaatcccgcacagatctggctgtcgtgcagataggtctgatggcgctcgctgcactcggtatcgctgaacacttgcagtttgaccttctgcagatgctgctggaccacgccgcccgtctacaattgaaaggttcagtcgatagtcaaggagtctgaaggaggaatggcttctctcttaccgcatttaatccccagcccgcgaggacagcactggcgtttccgggcgtgacttgtcgaggctccggcagacgcaccggctggacaaacttgctcaaagcgacggactgcgctaactgcaacaatgcgatgtcgttgacgtacttgtcctccggctcgtaccctggatggacgaagatggcggccacgcgggccacctggctggagtttcgcgccagcatctggctgccgtactgcaggtcgagctgctctggcgaggagcctcgcacgcagtgggcggctgtcaggacccagtacgggttgagcagcgtagcgccgcaggagtgacgtccgctcttcgcgcgtcgcagcgagaccacaaagggaaactcccccgggccagctgtagtgccgttgacgatttttccatcctcgccagaggctcctgccagaaggaaggttgccgtgtagaaaagtgcgagccttgctagccaagccatgacggccatctatgtgcacggttcacaggtagagcagggcaatttatggaatattggggcccgcattcgcttgtgggttttatgtgggtagagctggccatgcagttgtgggcctgaagtattagccatgctaatgagatgccaaccgcgcgattgtgactccgcagggccgagattgcgatggcgggcccacttttgtggcaaaacttcaaggtgttcgtcacccgctacccgattatgcgcggcatgatatcgtacagcctgatctggcccacgggcagcctcatccagcaaacggttgagggcaggcgctggggtgagtcggcattctttcgagcagctctcagctccttatccttctcgtcttcatcttacaggcacctacgactggtggcgcgtgctccggttcagcatgtacggtggtctgtttgttgctcctaccctctacggatgggtcaaggttagtgaccgtttacatggctgctgtttaggtctactcctattccgattgctcctcagatttccagcgccatgtggccgcagacatcgttgaggacgggcgtcattaaggcggcggtggagacgatctcgtacacccccggcgcgatgacctgcttctactttatcatgagcctcctggagtccaagacggtggagcaggcggtagccgaggtcggcaagaaattcctgcccacgtacaaggtactcttttgggattcgagggagaactgccgcctaacccaccaattccatcgctcttgcaggtggctctgtccgtatggccactggtggccaccatcaacttcaccctgatccccgagcgcaaccgggtgccattcatcagcgcgtgcagcctgtgctggacctgcttcttggcctacatgaagcacctggagcaccacgaggtggacggggccatttgatggacatgatcgtatttctcaaacagcattaaataaaatagtaattattgaacgaaatgaatggaattaaaaaccaagaacggtattctgcactaagtactggtcacactgggctcacctaggggtgaaaaaatatcgattgtgcatgggtttgttttatatttaaacagcattttgcaaaatagcccctctttccgaagatcaacaagcctaaagtaataaatttaataaaaaggtattttgaaataattcgcggtatatcgaccgagccccaccacatttcttatcgacactgtcccatcgctagccccacctagttgttgctgcattttttgggtgtgtgcgttgtatttgtttactgacaatccccagaaaagaaactcctctgctccaactgcgatccctcgagacccaggacagcagcatgcgcgaacttaacaagcagcagtcgcaggacaccacggactcgggcgtcgaaaagggcgactatccgcgggccaccagtaagtgacgcactcaagcatgcgggccgatctgcatttgcatccaaatactttcaatgcccaattccctttccagatggcgtggtcttcggcgccatagttacattcgccagctttttcgtgctgatgatgtccttttgctcgccgtactggatcgagtcctacgaggagacgcgggccagcttcaagaacatgggcctgtggcagtactgctttaaggacttcgtgtaccccaagtacgcgttcttgaagcagttcaccggttgccacaacatcttctcgcacgtgagtacagcaaactggccggttcttatccttgtcctgatcttctcccactcgtacaggagtattacgttatccgtgagtatctgctgcccggctggctcatggcggtgcagggcttcgtgaccatgtccttcatcatcgtgttccttgtgctggccctgctctcgcttaccatcatccgactgcctcttaaggccgttctgcagtacgag

SEQ ID NO: 36158 - DNA, 561 bp, DROSOPHILA
atggcgggcccacttttgtggcaaaacttcaaggtgttcgtcacccgctacccgattatgcgcggcatgatatcgtacagcctgatctggcccacgggcagcctcatccagcaaacggttgagggcaggcgctggggcacctacgactggtggcgcgtgctccggttcagcatgtacggtggtctgtttgttgctcctaccctctacggatgggtcaagatttccagcgccatgtggccgcagacatcgttgaggacgggcgtcattaaggcggcggtggagacgatctcgtacacccccggcgcgatgacctgcttctactttatcatgagcctcctggagtccaagacggtggagcaggcggtagccgaggtcggcaagaaattcctgcccacgtacaaggtggctctgtccgtatggccactggtggccaccatcaacttcaccctgatccccgagcgcaaccgggtgccattcatcagcgcgtgcagcctgtgctggacctgcttcttggcctacatgaagcacctggagcaccacgaggtggacggggccatttga

SEQ ID NO: 36159 - protein, 186 aa, DROSOPHILA
MAGPLLWQNFKVFVTRYPIMRGMISYSLIWPTGSLIQQTVEGRRWGTYDWWRVLRFSMYGGLFVAPTLYGWVKISSAMWPQTSLRTGVIKAAVETISYTPGAMTCFYFIMSLLESKTVEQAVAEVGKKFLPTYKVALSVWPLVATINFTLIPERNRVPFISACSLCWTCFLAYMKHLEHHEVDGAI

SEQ ID NO: 36160 - DNA, 3530 bp, DROSOPHILA
attagccatgctaatgagatgccaaccgcgcgattgtgactccgcagggccgagattgcgatggcgggcccacttttgtggcaaaacttcaaggtgttcgtcacccgctacccgattatgcgcggcatgatatcgtacagcctgatctggcccacgggcagcctcatccagcaaacggttgagggcaggcgctggggtgagtcggcattctttcgagcagctctcagctccttatccttctcgtcttcatcttacaggcacctacgactggtggcgcgtgctccggttcagcatgtacggtggtctgtttgttgctcctaccctctacggatgggtcaaggttagtgaccgtttacatggctgctgtttaggtctactcctattccgattgctcctcagatttccagcgccatgtggccgcagacatcgttgaggacgggcgtcattaaggcggcggtggagacgatctcgtacacccccggcgcgatgacctgcttctactttatcatgagcctcctggagtccaagacggtggagcaggcggtagccgaggtcggcaagaaattcctgcccacgtacaaggtactcttttgggattcgagggagaactgccgcctaacccaccaattccatcgctcttgcaggtggctctgtccgtatggccactggtggccaccatcaacttcaccctgatccccgagcgcaaccgggtgccattcatcagcgcgtgcagcctgtgctggacctgcttcttggcctacatgaagcacctggagcaccacgaggtggacggggccatttgatggacatgatcgtatttctcaaacagcattaaataaaatagtaattattgaacgaaatgaatggaattaaaaaccaagaacggtattctgcactaagtactggtcacactgggctcacctaggggtgaaaaaatatcgattgtgcatgggtttgttttatatttaaacagcattttgcaaaatagcccctctttccgaagatcaacaagcctaaagtaataaatttaataaaaaggtattttgaaataattcgcggtatatcgaccgagccccaccacatttcttatcgacactgtcccatcgctagccccacctagttgttgctgcattttttgggtgtgtgcgttgtatttgtttactgacaatccccagaaaagaaactcctctgctccaactgcgatccctcgagacccaggacagcagcatgcgcgaacttaacaagcagcagtcgcaggacaccacggactcgggcgtcgaaaagggcgactatccgcgggccaccagtaagtgacgcactcaagcatgcgggccgatctgcatttgcatccaaatactttcaatgcccaattccctttccagatggcgtggtcttcggcgccatagttacattcgccagctttttcgtgctgatgatgtccttttgctcgccgtactggatcgagtcctacgaggagacgcgggccagcttcaagaacatgggcctgtggcagtactgctttaaggacttcgtgtaccccaagtacgcgttcttgaagcagttcaccggttgccacaacatcttctcgcacgtgagtacagcaaactggccggttcttatccttgtcctgatcttctcccactcgtacaggagtattacgttatccgtgagtatctgctgcccggctggctcatggcggtgcagggcttcgtgaccatgtccttcatcatcgtgttccttgtgctggccctgctctcgcttaccatcatccgactgcctcttaaggccgttctgcagtacgagtggctgctcgtccgcctctcctacatgggcaccgccatctcgtgtatgtatctgcctcccgcccaataagtactagctaaacagcggtctcccacagctctgttcatgtttttggccgtatgcatcttcgggggctgcgcctaccgccgcgactggatgatgtaccccaagttcaacgtgctgggctggtcctacgccctggccgttgtcaccttcatgctccttggtctagccgctctgatcctgcagcgcgaggcccggcaagcctacgacgcccgcggcgagcagaagaacctggtaatgcaaatggagatgcaggagccgggttaccagccgccgcgccaccaccacagccagtcgcggagcctgcagggctacatataacagctgtccgcccgacttccatacattccgttccgattggatcttagcttaagttttcagacgcaatctcgtgcctcgaatctgcgcaatcgacgccgtccatagtgcctttaacaatcgaccatatgtatctatatacacgccgactcagccgagatcagctcgtatccgtttgtaattgtattaaatagcacgtacagctaaacgtaagatcagtgcgaccaaaaagatccactaactttttacacatctaccattatactttttatataggctcaaaaatgtttacagcttaaatttttagaccatattccaccttttataagcaaactggtgtagagacatatcaacattgaattaaatgtattatttgaacttgcgaagctaaacgtactgatcagattgatcatctccgccctggtttccccatcatgacccccagctacatgttcctggtgatgaggtgcggatgtgatctacacctaatatgtttatgtttgccttatcgaactgatagcgcctccgctgattgccaattgttagtttgggctgctggctcccagactcgacccctcgattcagtgagtttcgtgcgctctgtttcttctcatctgatctgcgatgactcagtttggcctgcacggctgcagctacattctgttctggttccttctcgcctgcgcggcggcggaccttcaggagaatcagcagtcgcgcatcatcaatggaagcgtggccaaggcggacgagacgcgccacctggtctccatccgccttctccgccacgacaacaactttggaagcggccacatctgcggcggggcgctaatcgcgcccagaaaggttctgaccgcagcgcactgcctgtacaagtaagtagtgatcccaccatggggtgcccgctcccttttgatcgaactcatgccagcagcaatcagagaaagcgctttcggcgggccagcgaattcgtagtggttctgggcacgctgaaccgcttcgagcaccgcaatggcaccatcgtgtcccaggtgagttccatggcctacatgcacaccttcagcccggacagcatgcgcgacgacgtgggcatcctttttctgcgcaccgggctgccgatgtctccaggcggtggtgtccatctcacagtggcccccatccagctggcgggccagatcacgccccccggcaagctgtgccaggtggccggctggggtcgaaccgagcaggtgagtcggatttgtagagccgtaggcaagccattgagcccgcagcttatctgactctttcccagagctccctctccaacatcctgctgacggccaacgtgagcaccatccggcacc

SEQ ID NO: 36161 - DNA, 1269 bp, DROSOPHILA
aagatcaacaagcctaaagtaataaatttaataaaaagccccacctagttgttgctgcattttttgggtgtgtgcgttgtatttgtttactgacaatccccagaaaagaaactcctctgctccaactgcgatccctcgagacccaggacagcagcatgcgcgaacttaacaagcagcagtcgcaggacaccacggactcgggcgtcgaaaagggcgactatccgcgggccaccaatggcgtggtcttcggcgccatagttacattcgccagctttttcgtgctgatgatgtccttttgctcgccgtactggatcgagtcctacgaggagacgcgggccagcttcaagaacatgggcctgtggcagtactgctttaaggacttcgtgtaccccaagtacgcgttcttgaagcagttcaccggttgccacaacatcttctcgcacgagtattacgttatccgtgagtatctgctgcccggctggctcatggcggtgcagggcttcgtgaccatgtccttcatcatcgtgttccttgtgctggccctgctctcgcttaccatcatccgactgcctcttaaggccgttctgcagtacgagtggctgctcgtccgcctctcctacatgggcaccgccatctcgtctctgttcatgtttttggccgtatgcatcttcgggggctgcgcctaccgccgcgactggatgatgtaccccaagttcaacgtgctgggctggtcctacgccctggccgttgtcaccttcatgctccttggtctagccgctctgatcctgcagcgcgaggcccggcaagcctacgacgcccgcggcgagcagaagaacctggtaatgcaaatggagatgcaggagccgggttaccagccgccgcgccaccaccacagccagtcgcggagcctgcagggctacatataacagctgtccgcccgacttccatacattccgttccgattggatcttagcttaagttttcagacgcaatctcgtgcctcgaatctgcgcaatcgacgccgtccatagtgcctttaacaatcgaccatatgtatctatatacacgccgactcagccgagatcagctcgtatccgtttgtaattgtattaaatagcacgtacagctaaacgtaagatcagtgcgaccaaaaagatccactaactttttacacatctaccattatactttttatataggctcaaaaatgtttacagcttaaatttttagaccatattccaccttttataagcaaactggtgtagagac

SEQ ID NO: 36162 - protein, 256 aa, DROSOPHILA
MRELNKQQSQDTTDSGVEKGDYPRATNGVVFGAIVTFASFFVLMMSFCSPYWIESYEETRASFKNMGLWQYCFKDFVYPKYAFLKQFTGCHNIFSHEYYVIREYLLPGWLMAVQGFVTMSFIIVFLVLALLSLTIIRLPLKAVLQYEWLLVRLSYMGTAISSLFMFLAVCIFGGCAYRRDWMMYPKFNVLGWSYALAVVTFMLLGLAALILQREARQAYDARGEQKNLVMQMEMQEPGYQPPRHHHSQSRSLQGYI

SEQ ID NO: 36163 - DNA, 3033 bp, DROSOPHILA
gctcgtccgcctctcctacatgggcaccgccatctcgtgtatgtatctgcctcccgcccaataagtactagctaaacagcggtctcccacagctctgttcatgtttttggccgtatgcatcttcgggggctgcgcctaccgccgcgactggatgatgtaccccaagttcaacgtgctgggctggtcctacgccctggccgttgtcaccttcatgctccttggtctagccgctctgatcctgcagcgcgaggcccggcaagcctacgacgcccgcggcgagcagaagaacctggtaatgcaaatggagatgcaggagccgggttaccagccgccgcgccaccaccacagccagtcgcggagcctgcagggctacatataacagctgtccgcccgacttccatacattccgttccgattggatcttagcttaagttttcagacgcaatctcgtgcctcgaatctgcgcaatcgacgccgtccatagtgcctttaacaatcgaccatatgtatctatatacacgccgactcagccgagatcagctcgtatccgtttgtaattgtattaaatagcacgtacagctaaacgtaagatcagtgcgaccaaaaagatccactaactttttacacatctaccattatactttttatataggctcaaaaatgtttacagcttaaatttttagaccatattccaccttttataagcaaactggtgtagagacatatcaacattgaattaaatgtattatttgaacttgcgaagctaaacgtactgatcagattgatcatctccgccctggtttccccatcatgacccccagctacatgttcctggtgatgaggtgcggatgtgatctacacctaatatgtttatgtttgccttatcgaactgatagcgcctccgctgattgccaattgttagtttgggctgctggctcccagactcgacccctcgattcagtgagtttcgtgcgctctgtttcttctcatctgatctgcgatgactcagtttggcctgcacggctgcagctacattctgttctggttccttctcgcctgcgcggcggcggaccttcaggagaatcagcagtcgcgcatcatcaatggaagcgtggccaaggcggacgagacgcgccacctggtctccatccgccttctccgccacgacaacaactttggaagcggccacatctgcggcggggcgctaatcgcgcccagaaaggttctgaccgcagcgcactgcctgtacaagtaagtagtgatcccaccatggggtgcccgctcccttttgatcgaactcatgccagcagcaatcagagaaagcgctttcggcgggccagcgaattcgtagtggttctgggcacgctgaaccgcttcgagcaccgcaatggcaccatcgtgtcccaggtgagttccatggcctacatgcacaccttcagcccggacagcatgcgcgacgacgtgggcatcctttttctgcgcaccgggctgccgatgtctccaggcggtggtgtccatctcacagtggcccccatccagctggcgggccagatcacgccccccggcaagctgtgccaggtggccggctggggtcgaaccgagcaggtgagtcggatttgtagagccgtaggcaagccattgagcccgcagcttatctgactctttcccagagctccctctccaacatcctgctgacggccaacgtgagcaccatccggcaccagacctgccgcatgatctacaggtccggcctgctgcccgggatgatgtgcgcaggacgcctgcagggcggcaccgattcttgtcaaggcgactccggcggaccgttggtgcacgagggccgtctggtgggtgtggtctcctggggctacggatgcgcagagccgggactgccgggagtctacgtggacgtggagtactaccgccagtggatagagggacgcagcggggctccccattccaggctggctaccggactgttcctactcctgctcctgcccctgctgatgcggtgctcggggtcgtggctatagccaccatttcggcatccatgccagtgctttagtctatgtagtaactatgttctaaacaaaatattcataatacacattcacgtacaatgtagcgacagctctgaatctaagagctaccgtatgcaaacctatgtatgtatctatctttcgaatcacttttggtacctcgaatgccattccgcagctatcagttatctacaatctacaaatctggacggtttcgaaagagtcggataattacaacgacctcttcgtatcttgtcgtgcaatgaaacgctttccactcaacaatcaacatttatttacagcgaaacacacttagattcggaaacacgagtcaaggaacaaagcagggtgacttggccacgggcatggcacctaacagttgcggcagttgcgccgcgagcagggctcctctcgccgatcgtggaggcgcaccaggtcctccggctgaccgtaggcgatgttcggcaggcatcgcgactgggtcagtagcagggagaactcgcggttgcaggccgcgttctcgatccgctccatgacccggccaaccagcagctccacggcctccttgacgttggcgccggtgcaggcgctcgtctcgatgtacggcagccggtagcgtcggcagagggccgccacctggtcgcgactcaccacgcgcagctgcagcaggtcgcacttgttgccgcagaggaccacgtcggggtcctcggagtaggcgtgcgtccgcagctgcgacagccagttggccgtctccaggaagctcttctcgctggtcaggtcgaagatgagcaggaaacccatggcgtcgcggtaaaacgccgtggttagtgaacggaagcgctcctgtccggcggtgtcccagatctgcaggtggatgcggtggcggcgtccgcgggagttgtacagctgaaggatgcaaaaaaaagtgatgggtcactagggttcggaaatgatagtgatgtggttgcaaaatcctcgtgactctcaaaccgac

SEQ ID NO: 36164 - DNA, 912 bp, DROSOPHILA
atgactcagtttggcctgcacggctgcagctacattctgttctggttccttctcgcctgcgcggcggcggaccttcaggagaatcagcagtcgcgcatcatcaatggaagcgtggccaaggcggacgagacgcgccacctggtctccatccgccttctccgccacgacaacaactttggaagcggccacatctgcggcggggcgctaatcgcgcccagaaaggttctgaccgcagcgcactgcctgtacaacagcaatcagagaaagcgctttcggcgggccagcgaattcgtagtggttctgggcacgctgaaccgcttcgagcaccgcaatggcaccatcgtgtcccaggtgagttccatggcctacatgcacaccttcagcccggacagcatgcgcgacgacgtgggcatcctttttctgcgcaccgggctgccgatgtctccaggcggtggtgtccatctcacagtggcccccatccagctggcgggccagatcacgccccccggcaagctgtgccaggtggccggctggggtcgaaccgagcagagctccctctccaacatcctgctgacggccaacgtgagcaccatccggcaccagacctgccgcatgatctacaggtccggcctgctgcccgggatgatgtgcgcaggacgcctgcagggcggcaccgattcttgtcaaggcgactccggcggaccgttggtgcacgagggccgtctggtgggtgtggtctcctggggctacggatgcgcagagccgggactgccgggagtctacgtggacgtggagtactaccgccagtggatagagggacgcagcggggctccccattccaggctggctaccggactgttcctactcctgctcctgcccctgctgatgcggtgctcggggtcgtggctatag

SEQ ID NO: 36165 - protein, 303 aa, DROSOPHILA
MTQFGLHGCSYILFWFLLACAAADLQENQQSRIINGSVAKADETRHLVSIRLLRHDNNFGSGHICGGALIAPRKVLTAAHCLYNSNQRKRFRRASEFVVVLGTLNRFEHRNGTIVSQVSSMAYMHTFSPDSMRDDVGILFLRTGLPMSPGGGVHLTVAPIQLAGQITPPGKLCQVAGWGRTEQSSLSNILLTANVSTIRHQTCRMIYRSGLLPGMMCAGRLQGGTDSCQGDSGGPLVHEGRLVGVVSWGYGCAEPGLPGVYVDVEYYRQWIEGRSGAPHSRLATGLFLLLLLPLLMRCSGSWL

SEQ ID NO: 36166 - DNA, 3381 bp, DROSOPHILA
cttccgccctttcagcgcgtccagctgcactaggacaaggacggcttccaattaaagctagaccgcagtgccgtaattagctgcagctgccgcgtttctgccgagcgattaaacatagccaccgccaccttagccccttagttcctcagctcacctgttcaccggatccggctaattgcagaggctcaggctcaggaggcgcggcacgcatttctgctccgacgcccgccgtcgactttggcgcccaaggcggcttctttcggcacgccgcacgccactcgtcactccaaggatctggaaggaatctgcgattcagctgactggaccagactgactgggcgggcaaccgttatttttagcgcgcgcaattcgtccgcgcgggggaagggaccttcaaccaccttgcagaggtttgctaaacgaaaacaagcgacccacgaggacttcgaaaactccgaggctgtgcggatgctgcggatgcaacgcagtggatcctctgggcggtgcgctgcccgacctgttgccatgcgctgcccagcacagactacagggctcgttggccgccaacaggcagtcccttttccgaggctcagctttcagccaaagcttgcgccagctttcaagcgcttccgcgcgcgacaggtgcgccgcacaggtgtcctttcccacgggaacgtggttatttcgtgagtacttcgaagcactctcgagacataatccctcgggcaactttaagaatggaacggctttggacggagcttccgcgggacggcgcctaagctttgctctccgacgaaggcttcaaagtcaggagtgtatcccgtgctcgaatagtccactgtttctataatcctagtgttcagcaatcaaatttcgtgttactaaataacactgagccacatttttcagtaaattgaagtttgcgcgcgcagagctatcgataagtatcgcgagataaaccagtgctgtaaagcgccgccatttaattgcacttatcgagtttcttgcgggctcgggatttgctttgttttttttttttgaatcggtgcggaaacttctcggttgaggttttattctctatttactggccatggacaacgcaagctcaacttttggccagtcggacttcgactgggacgccatcaacgtgggtgactaccagttggatcactcccagaactttttcggtgcgtatccaggccaccgcgtccaagctgagaaaacgcgccatttttggccgaccattgctgaccatttcccgcatttcccagcagcacgggccaacaaggagaacaacaggagcctcagcaatgttaaccccctcctgctgtgcaccactccgcagaagatcggccgggaacagcgcgatggtgacttcgatggcaagctgattagtgctggggatctcaagaaggagtcccccaaagacacgacagaggcgtccaaggatgcactcactatcaagcccaaagttgagccccacgatgtgccagaactcaagttgaaaacagagctccaggagctggctcaagtgtccccacttgacaacggcccagagccgcaggacgacatcaaacaaattgttccgctcaactggggcaaggatggggacgatgatgagaagcacatgacggaggccgatcagcacttggtccaccaggaacgtcctcccggcgtcggggccaagctccgcctggagtggtcacccccacgccaccgcgagcacgagggagccggcgcctctgccacatccgccgcccccaaggcataccagttcaaggacgtgtacgagagcaagcggcagcaggcgatgcgcaagcgctccgaggaggaaagcaaggcgcgccagttccacagccgacccatgcccaactttaaggccatgcacaagcgcatgaacgagctggcagtcatccacaaaatcaccgtcccgcgcacgcccgagacgctcaagcacagccagtcgaacgtggagcggcgtcgcgacgacgatccggccgaccaggcgcgactgcatccggctggtacccgctccagacccttccacctgcgcagcgagcagcgcgtgcgcgaccgacgcgagttcgacgccgccgtgcaggtcagcctggagcagaagaagaaggaggtaaagactaaatctagtagcccttaagcattggttccgaacacaagcagataattttcgagctcagggccggaatttcatttatgtgatttatgtgatgtgtgctgctggtttaggtggtttcttagcaactgaccgtgtgtttagtcattaacttgaagaggcttagttgttcctacattttttcagaatatattgtttaatccaatgtaataaaccatttgcaaatgaccccccttcgagggctcagtgtaagcaccgttcgttaagttcaaaaagtgcgttcccaccgccacggggagttttccaacaccagcgcgccggcatttagctgcgatccgcgagcggccacactgcgctcgaaaaataacgtatttctccaagtattgctgccagccccaaaacctctcctgtgcccaaacacgagacccaaattcaagggccgtacggcaactatccaagaacgccccagttctccagtgcagcagccccaggtcgggaatccgacgctcgacaaacaataacacgggcggtgggcagagcgagacggagcgagctcagtttgtttttgttgctgtggtgtgagtgagtcatgacgtttcggacggcgtagaaaagccagttacagtcaaccgtcgaacattgcataaagcgggagctgttgccctgcattccggaaccaggatccgccagtcgccccacttcctcaccgtttgccaggacctgcaacagctgcgcccagtccgcacacaccgaagcacgcacgtacacacacacacacatttctggaggagctgtggcaccgagtgtcacaccatacacacacggcgcgagcgcacgcacaccactgcagcaggcagtctgtcgtcacagttggctacatttcgactcggattcggactcggatcgagctagctgagcagcaactttcgccgcactcgaatcgaagttaagcccaaaccaaaagcaaaagccaaacccaagccgagcccaagcgcctattatcgtcatggtggaccgtctggtcaactcggaggccaacacgcgccgcatcgcctccgtggagaactgcttcgggagctcgggcgtgccgctggcgatgcaaggtcgcgttctggtgggcgagggcgtgctgaccaagatgtgtcgcaagcggcccaagtcgcgccagttcttcctgttcaacgacatcctggtgtacggaaacatagtgattggcaagaagaagtacaacaagcagcatatcatgccgc

SEQ ID NO: 36167 - DNA, 1294 bp, DROSOPHILA
tttcttgcgggctcgggatttgctttgttttttttttttgaatcggtgcggaaacttctcggttgaggttttattctctatttactggccatggacaacgcaagctcaacttttggccagtcggacttcgactgggacgccatcaacgtgggtgactaccagttggatcactcccagaactttttcgcacgggccaacaaggagaacaacaggagcctcagcaatgttaaccccctcctgctgtgcaccactccgcagaagatcggccgggaacagcgcgatggtgacttcgatggcaagctgattagtgctggggatctcaagaaggagtcccccaaagacacgacagaggcgtccaaggatgcactcactatcaagcccaaagttgagccccacgatgtgccagaactcaagttgaaaacagagctccaggagctggctcaagtgtccccacttgacaacggcccagagccgcaggacgacatcaaacaaattgttccgctcaactggggcaaggatggggacgatgatgagaagcacatgacggaggccgatcagcacttggtccaccaggaacgtcctcccggcgtcggggccaagctccgcctggagtggtcacccccacgccaccgcgagcacgagggagccggcgcctctgccacatccgccgcccccaaggcataccagttcaaggacgtgtacgagagcaagcggcagcaggcgatgcgcaagcgctccgaggaggaaagcaaggcgcgccagttccacagccgacccatgcccaactttaaggccatgcacaagcgcatgaacgagctggcagtcatccacaaaatcaccgtcccgcgcacgcccgagacgctcaagcacagccagtcgaacgtggagcggcgtcgcgacgacgatccggccgaccaggcgcgactgcatccggctggtacccgctccagacccttccacctgcgcagcgagcagcgcgtgcgcgaccgacgcgagttcgacgccgccgtgcaggtcagcctggagcagaagaagaaggaggtaaagactaaatctagtagcccttaagcattggttccgaacacaagcagataattttcgagctcagggccggaatttcatttatgtgatttatgtgatgtgtgctgctggtttaggtggtttcttagcaactgaccgtgtgtttagtcattaacttgaagaggcttagttgttcctacattttttcagaatatattgtttaatccaatgtaataaaccatttgcaaatgaccccccttcgagggctcagtgt

SEQ ID NO: 36168 - protein, 325 aa, DROSOPHILA
MDNASSTFGQSDFDWDAINVGDYQLDHSQNFFARANKENNRSLSNVNPLLLCTTPQKIGREQRDGDFDGKLISAGDLKKESPKDTTEASKDALTIKPKVEPHDVPELKLKTELQELAQVSPLDNGPEPQDDIKQIVPLNWGKDGDDDEKHMTEADQHLVHQERPPGVGAKLRLEWSPPRHREHEGAGASATSAAPKAYQFKDVYESKRQQAMRKRSEEESKARQFHSRPMPNFKAMHKRMNELAVIHKITVPRTPETLKHSQSNVERRRDDDPADQARLHPAGTRSRPFHLRSEQRVRDRREFDAAVQVSLEQKKKEVKTKSSSP

SEQ ID NO: 36169 - DNA, 3609 bp, DROSOPHILA
gagctccaggagctggctcaagtgtccccacttgacaacggcccagagccgcaggacgacatcaaacaaattgttccgctcaactggggcaaggatggggacgatgatgagaagcacatgacggaggccgatcagcacttggtccaccaggaacgtcctcccggcgtcggggccaagctccgcctggagtggtcacccccacgccaccgcgagcacgagggagccggcgcctctgccacatccgccgcccccaaggcataccagttcaaggacgtgtacgagagcaagcggcagcaggcgatgcgcaagcgctccgaggaggaaagcaaggcgcgccagttccacagccgacccatgcccaactttaaggccatgcacaagcgcatgaacgagctggcagtcatccacaaaatcaccgtcccgcgcacgcccgagacgctcaagcacagccagtcgaacgtggagcggcgtcgcgacgacgatccggccgaccaggcgcgactgcatccggctggtacccgctccagacccttccacctgcgcagcgagcagcgcgtgcgcgaccgacgcgagttcgacgccgccgtgcaggtcagcctggagcagaagaagaaggaggtaaagactaaatctagtagcccttaagcattggttccgaacacaagcagataattttcgagctcagggccggaatttcatttatgtgatttatgtgatgtgtgctgctggtttaggtggtttcttagcaactgaccgtgtgtttagtcattaacttgaagaggcttagttgttcctacattttttcagaatatattgtttaatccaatgtaataaaccatttgcaaatgaccccccttcgagggctcagtgtaagcaccgttcgttaagttcaaaaagtgcgttcccaccgccacggggagttttccaacaccagcgcgccggcatttagctgcgatccgcgagcggccacactgcgctcgaaaaataacgtatttctccaagtattgctgccagccccaaaacctctcctgtgcccaaacacgagacccaaattcaagggccgtacggcaactatccaagaacgccccagttctccagtgcagcagccccaggtcgggaatccgacgctcgacaaacaataacacgggcggtgggcagagcgagacggagcgagctcagtttgtttttgttgctgtggtgtgagtgagtcatgacgtttcggacggcgtagaaaagccagttacagtcaaccgtcgaacattgcataaagcgggagctgttgccctgcattccggaaccaggatccgccagtcgccccacttcctcaccgtttgccaggacctgcaacagctgcgcccagtccgcacacaccgaagcacgcacgtacacacacacacacatttctggaggagctgtggcaccgagtgtcacaccatacacacacggcgcgagcgcacgcacaccactgcagcaggcagtctgtcgtcacagttggctacatttcgactcggattcggactcggatcgagctagctgagcagcaactttcgccgcactcgaatcgaagttaagcccaaaccaaaagcaaaagccaaacccaagccgagcccaagcgcctattatcgtcatggtggaccgtctggtcaactcggaggccaacacgcgccgcatcgcctccgtggagaactgcttcgggagctcgggcgtgccgctggcgatgcaaggtcgcgttctggtgggcgagggcgtgctgaccaagatgtgtcgcaagcggcccaagtcgcgccagttcttcctgttcaacgacatcctggtgtacggaaacatagtgattggcaagaagaagtacaacaagcagcatatcatgccgctggaggaggtctcgctggaatcgattgccgacaaccagacgtacagaaacggctggtacatccgcaccaccaccaagtcgtttgtggtgtttgcggccaccagcaccgagaagcaggagtggatggctcacatcaacaagtgcgtggaggacctgctgcgcaagagcggcaagaagccggtggagaaccacgccgccgtttgggtgcccgacaccgacgccagcgtctgcatgcactgcaagaagacgcagtttactttcatccagcgccggcatcactgccgcaactgcggcgctgttgtctgcgccggctgctcggccaagaagttcctgcttccgcagcagagcaccaaggcgttgcgcgtctgtgacgcctgctacgagcgcttgaagcacgtgccaagttcccttggctctggcgaggactcggcagcggctaccggcgctgcctccggcaacaagctcaacacaacagccggcgacagctccaacgatgaggactccgacgaggagactgcctcccctggtggcgagtcgcacgatgagccgcgcttctacggggacaacagcgtgctatccgccgtcgaagactcctcgacgataacctcgccctcctccgccaccactggcagcttggaggctccccaggtgacaccgagcgtccaaagctccccggctgccgttgcgacgacgggcagccactgttgaacggaccacatagcgaatgattatgattatggtagatatcgcagaaaagctctcacccacccacaacgcatatcccgataccttgtagacacgaatcgcggtgtgacgaagtctccttgaacatgcccaacatagccactgtacatttgaacaaccgacgattcccgtcatcttcattgcaagaccttcggacccaatttcggatctttcattatacctatgcgttagataaaggacgtgcaaaatttgaggcttatcgagttctaagttgggagagtctagaatagaacgttgctcgtgactgcgaccttgcagtggctccgttttggttttttattcttctcgttttacattttccgcgaattccgctgagcgcgatagccttatcagccaagtggctgcgacggttgctgctgctctattattcgttggcaaacaaacggtctgatgatgtgagatgtttcccatatctgctcacaagcagcccagccctgccctacccagcccagtccaaatgccggcttatcgttctgaaactcccgtcgtgactcagcggtacagagcagccgatagggttagatggccattgagagcccatttttgcctccgggcgttgaatgagtcaggcggacagtcatccatgcatctctccgagtggccagagacaaaggttgcgtacgccaggttcagtcgcaattagaatgcactacagcagcaatcaacacatactcatcacctttccactgcaccagaccgccgacgaccaatgtgtacatttcaatgctaatccgtgttcctttccgcctttgccattgcagcaagacgaacaacggaagcgatgcgagcaggaggagattaaggagctgcgcaagatgacggcattcaaggctcgtccgaatccatttaaatagtgctcgacggaaccaatcgactaccaaacgtttgatagccctgtccaaatttaaatgaagtgaagtcgatgctacacataatcgtgtttaccgatgcatagttttaccagattaacacaa

SEQ ID NO: 36170 - DNA, 1609 bp, DROSOPHILA
agtattgctgccagccccaaaacctctcctgtgcccaaacacgagacccaaattcaagggccgtacggcaactatccaagaacgccccagttctccagtgcagcagccccaggtcgggaatccgacgctcgacaaacaataacacgggcggtgggcagagcgagacggagcgagctcagtttgtttttgttgctgtggtgtgagtgagtcatgacgtttcggacggcgtagaaaagccagttacagtcaaccgtcgaacattgcataaagcgggagctgttgccctgcattccggaaccaggatccgccagtcgccccacttcctcaccgtttgccaggacctgcaacagctgcgcccagtccgcacacaccgaagcacgcacgtacacacacacacacatttctggaggagctgtggcaccgagtgtcacaccatacacacacggcgcgagcgcacgcacaccactgcagcaggcagtctgtcgtcacagttggctacatttcgactcggattcggactcggatcgagctagctgagcagcaactttcgccgcactcgaatcgaagttaagcccaaaccaaaagcaaaagccaaacccaagccgagcccaagcgcctattatcgtcatggtggaccgtctggtcaactcggaggccaacacgcgccgcatcgcctccgtggagaactgcttcgggagctcgggcgtgccgctggcgatgcaaggtcgcgttctggtgggcgagggcgtgctgaccaagatgtgtcgcaagcggcccaagtcgcgccagttcttcctgttcaacgacatcctggtgtacggaaacatagtgattggcaagaagaagtacaacaagcagcatatcatgccgctggaggaggtctcgctggaatcgattgccgacaaccagacgtacagaaacggctggtacatccgcaccaccaccaagtcgtttgtggtgtttgcggccaccagcaccgagaagcaggagtggatggctcacatcaacaagtgcgtggaggacctgctgcgcaagagcggcaagaagccggtggagaaccacgccgccgtttgggtgcccgacaccgacgccagcgtctgcatgcactgcaagaagacgcagtttactttcatccagcgccggcatcactgccgcaactgcggcgctgttgtctgcgccggctgctcggccaagaagttcctgcttccgcagcagagcaccaaggcgttgcgcgtctgtgacgcctgctacgagcgcttgaagcacgtgccaagttcccttggctctggcgaggactcggcagcggctaccggcgctgcctccggcaacaagctcaacacaacagccggcgacagctccaacgatgaggactccgacgaggagactgcctcccctggtggcgagtcgcacgatgagccgcgcttctacggggacaacagcgtgctatccgccgtcgaagactcctcgacgataacctcgccctcctccgccaccactggcagcttggaggctccccaggtgacaccgagcgtccaaagctccccggctgccgttgcgacgacgggcagccactgttgaacggaccacatagcgaatgattatgattatg

SEQ ID NO: 36171 - protein, 316 aa, DROSOPHILA
MVDRLVNSEANTRRIASVENCFGSSGVPLAMQGRVLVGEGVLTKMCRKRPKSRQFFLFNDILVYGNIVIGKKKYNKQHIMPLEEVSLESIADNQTYRNGWYIRTTTKSFVVFAATSTEKQEWMAHINKCVEDLLRKSGKKPVENHAAVWVPDTDASVCMHCKKTQFTFIQRRHHCRNCGAVVCAGCSAKKFLLPQQSTKALRVCDACYERLKHVPSSLGSGEDSAAATGAASGNKLNTTAGDSSNDEDSDEETASPGGESHDEPRFYGDNSVLSAVEDSSTITSPSSATTGSLEAPQVTPSVQSSPAAVATTGSHC

SEQ ID NO: 36172 - DNA, 5048 bp, DROSOPHILA
cttcctgtcaactctgcaactccgtattaggtttcgcctctttgcgcctatgtacatacgtgtgccgcaacggagatgcgtcatccaacacgcccacacgcgcccaattaggcccaagtcaaaacaagatttgcggcgattcggttagttgttttttatgccaagttcgccatgacatcagcacgaaaaccagcgccaagttgctacacttcaatccgcctgtgtggctgggacggccttgactttggccttctccagtttctgcgtcttcactgcgattggatataaatcagtggaggatcgagtgcataactggagggaacccacctgtgatcaggacatcctcgctgtcctcgcccacgccctcgcccttctctgttcgctggagcacctgtttacgcagcttgcggaggtaggccgctttgtactcctcgctgggcttcccgcctgccccatagctcacctccagcactgtcagcggaatcacggtggaggagacgggcaccaggtctgccgaaaaagggtgaaataatagttggtggcaagataaccaactcatctcatcgagcacccacctgcctcgtacttctcttcaggattcagcttgtacagcatcggagaggcggagacgctggcgcagaccagcaccagaaccagcaatcgcggcagaagatcggtcatagtgatgatgatggtccaaaagccacacacaaactggtctcttggccaagcaaaagtttaaatttaaatttgagaaactcaccatgggcggcaactgaaagtatcgcacatttccagcgattcatcgatagtccatgcacaaattatttttagcaagcatagaaaccgacctagcggtggtatccaccgatctagctaggacacacaccgcggtttaatatttcgacagcaaacgtcagaaagagcccgatagacacgtgaaataaggagttcgttatcgaagtaccgcacgcccgatgagatcagacatcggcagacgcatgctatcgataacggtcttgtttattaatgaattaattaattagtccaagttaactaaaaaaagtcgaaaaacagcgaaatcggcgtagtcagcgtgcccaagtggagtacccccagcgaacagaggcagcgacagagtgcaagagtgcaagagcaagacgcagtcgaaggccaggccacaaggcgcagcaacgcaacaaagacgcaagcgaagaagaaaagcatgagctgaggctgtcgtcgccagcaagcaagggaatcgcgcggacaataagagtaggagcaggagcaggagtaggacaggagtgggagcacgagcagcaaaggagcaccaacccagcggagcacccgaaccgcagcagcggcaacaccatcatgagcacggtgttcataaactcgcgcaagagccccaacgtgctgaaaaaacagggcaccgaccagtgggtcaagctgaacgtaggcggtacctacttcctcaccacaaagacgacgctctcccgtgacccaaattcgttcctctcccgtctgattcaggaggactgcgacttgatatcagatcgggtgagtgttccgtaccctatatacgctaattgcagctccccagtaaattcagtgacaagtcagtccataagtaacatcacaggtatccgaaaagtgtgcacaatgcaggtcatgcggcgggggtccgccgatttggccaaagggacgggggctaggggccatgggccatgggccagaaactaaaaggaacaaacaagcagccaagcacagagagcgcgagagagcgtcctacattaactgcagctgcagccgagtgtgctagtttgcaatgttgcgcccagaaggtcagccaaccccctcgaaactgggcagaccaaataatcatcatgacaatacttacttataacatgaacacggtcaatcgacaaacaaatatttcggtggccccccaagcagcacgaaattccagtgccaggggcacacaggcacattcgctctgaccattcggtttttgtataaataaacagtcccctgacccctctcatcaccgttgaagcttaaatagctttgcaacccgcgtacccatcccggaaagttcgatcaaagacacttgaataacaagatgcgtaacgccatacgattttttggcacacgattttttcgccgtggctctagaggtggctccaggctctctcgaatttttgttagagtgtgagagagctgagagcgctacagcgaacagctcttttctacacataaagtgatagcagacaactgtatgtgtgcattatgtgtgtgttattctagtgtctttggccaaaccaatgtatggccgttacgcatcttgttattctagtgtctttggttcgatactaatcagtaattcggttgcaggacgagacaggagcctacctgatcgacagagaccccaaatactttgcacccgtgctcaattacctgcgccacggcaagcttgtgctcgatggcgtctcagaggaaggcgtcctggaggaggctgagttctacaacgtgacgcagctgatagcgctgctgaaggagtgcatcctgcacagggatcaggtgagccacaccatccctccgcagtgattaccctgctaatctctgtcattttttccagcgaccccaaacggacaagaagcgcgtttatcgtgtgctgcagtgccgcgagcaggaactaacccaggtgagtagttgatcgaacggagcgcactacaaatcttacccgatcattacttcatattttgcagatgatctcaacgctgtcggatggctggaggttcgagcagctgatcagcatgcagtacacgaactacgggcccttcgaaaacaatgagttcctgtgcgtggtatccaaagagtgtggcacaacggccggccgggagctggagctcaacgaccgggccaaggtcctgcagcagaagggatcgcgaatgtaagccaattgcagagcagcgacaacacgccctctcgctctttttcggtgtttctctgctggcgcccgtgctgtcttagtgctgtcttaggtgaccaatagcagctattggagccgagaatttgacagcattttgaaggccgacaagcatatgctcatgtacttaatgtcaaagcggaattaacagtggaactgatccgctgcgctacgttagcaacgcacaatatattaaatgtataccgtatatgtacatagaagtttcgtatgctcaatgactgtagtacattgccttccctgcctgtgacttacgctctttttatctctgtttaattacagtcttggaatttaatcgcgctatatattcacacacaacccttgaaaatttaaataccgaacttcatcaacatacaactcattcccaatcagtaacacaatcagccactcagccacaccgacccaacaccaattggatgcagccaaggaagcccgagccacagccacagccacatcaaacaccacaaaccacacgcgatcagatcagactcagccacaggcacagatcacccaccaagatcagccggaatcaccaaagcagagcccgcagggagactacgcttcatttgcattcgagacaaagttaacaggtaccactgcgattcgattctcgcccttgtggccgttttgcgcactgtacgaagtgtgtgcgggcgtgcatgtgttcaacttgtagtaaaccagatagacccgactgtacgagcaacaagaaaccagccctgcttcgttgcgcccaatagccaggcggctgaattagactcagtttcgagcttaagctttgcttcaagtggcacgcgcgaaccagccagccagccagccagtcagtcagtcagttagccagacatttagcagaggatccttccgagccgctgggctactgggacactcaataagctaggtatatacacatttagcgggagtttgtagggttagtcttagtagtttttatcgtgcttacaataacgaccctgacgacgcagcggacacttcgctggagcagtcgcgattcccttggttaagcacccaactaacttacagtaccgcactaggttcgagctgcatttacgtgtccgataccgataccgataccaataccaataccaggccctctgcacccgaaatccgagtcccccggaatttgtagagtcgcagagttctgctccgtagttctgctgcttgctgtactcttgaactggtgagcggtaggagcgtacgtgtggtccgttttgtgtaggcccggttttactaccttgagctttattttagaaaacgagcaaggcgaagatcaactttaggaaatcaattgaatcacgactgaatttatgtgaacttgcactcaaagaaaatacatacatgcgaatacattatagtgaggatatacatgtgtgaaaaagaaaatgattaacgaaaatgaaaacctatccggcgacgttttgtacagacaggcatgatatctataatatgataagtactacatgaatgtatataattttaaatagttactaatttatacacgaaaaagaaaacaagcgaaaattgaagatgatccagaacgtcgccacctactcgtacccattttgtatccattttgacttattttacgagcacagctggtgcagattatatagagtataacttatgcttacgaggattatttcgacgaagaacctttacactagcaagtagtagaaccgcagcgcccgattacgccggacgcagtgtctggcacttagcaatacagagaaaggccactgcaagttagtacagacacggcaacaagtacagataactcttaactctaacaataatacgatagcatagcctaacccctactgtaactccataaggatgtactcatacccactttaaacagcctgtgccccgtaccttgtaccctgtatcctgtatcctgtattctgcagccgcggatgctcagtcccgcccagaacccggctgtcgctggagctggagctggatcggatcctggatgctgctccctcaaataatatgaatatatatgaataaacttggaaccctt

SEQ ID NO: 36173 - DNA, 1756 bp, DROSOPHILA
catgctatcgataacggtcttgtttattaatgaattaattaattagtccaagttaactaaaaaaagtcgaaaaacagcgaaatcggcgtagtcagcgtgcccaagtggagtacccccagcgaacagaggcagcgacagagtgcaagagtgcaagagcaagacgcagtcgaaggccaggccacaaggcgcagcaacgcaacaaagacgcaagcgaagaagaaaagcatgagctgaggctgtcgtcgccagcaagcaagggaatcgcgcggacaataagagtaggagcaggagcaggagtaggacaggagtgggagcacgagcagcaaaggagcaccaacccagcggagcacccgaaccgcagcagcggcaacaccatcatgagcacggtgttcataaactcgcgcaagagccccaacgtgctgaaaaaacagggcaccgaccagtgggtcaagctgaacgtaggcggtacctacttcctcaccacaaagacgacgctctcccgtgacccaaattcgttcctctcccgtctgattcaggaggactgcgacttgatatcagatcgggacgagacaggagcctacctgatcgacagagaccccaaatactttgcacccgtgctcaattacctgcgccacggcaagcttgtgctcgatggcgtctcagaggaaggcgtcctggaggaggctgagttctacaacgtgacgcagctgatagcgctgctgaaggagtgcatcctgcacagggatcagcgaccccaaacggacaagaagcgcgtttatcgtgtgctgcagtgccgcgagcaggaactaacccagatgatctcaacgctgtcggatggctggaggttcgagcagctgatcagcatgcagtacacgaactacgggcccttcgaaaacaatgagttcctgtgcgtggtatccaaagagtgtggcacaacggccggccgggagctggagctcaacgaccgggccaaggtcctgcagcagaagggatcgcgaattcttggaatttaatcgcgctatatattcacacacaacccttgaaaatttaaataccgaacttcatcaacatacaactcattcccaatcagtaacacaatcagccactcagccacaccgacccaacaccaattggatgcagccaaggaagcccgagccacagccacagccacatcaaacaccacaaaccacacgcgatcagatcagactcagccacaggcacagatcacccaccaagatcagccggaatcaccaaagcagagcccgcagggagactacgcttcatttgcattcgagacaaagttaacaggtaccactgcgattcgattctcgcccttgtggccgttttgcgcactgtacgaagtgtgtgcgggcgtgcatgtgttcaacttgtagtaaaccagatagacccgactgtacgagcaacaagaaaccagccctgcttcgttgcgcccaatagccaggcggctgaattagactcagtttcgagcttaagctttgcttcaagtggcacgcgcgaaccagccagccagccagccagtcagtcagtcagttagccagacatttagcagaggatccttccgagccgctgggctactgggacactcaataagctaggtatatacacatttagcgggagtttgtagggttagtcttagtagtttttatcgtgcttacaataacgaccctgacgacgcagcggacacttcgctggagcagtcgcgattcccttggttaagcacccaactaacttacag

SEQ ID NO: 36174 - protein, 211 aa, DROSOPHILA
MSTVFINSRKSPNVLKKQGTDQWVKLNVGGTYFLTTKTTLSRDPNSFLSRLIQEDCDLISDRDETGAYLIDRDPKYFAPVLNYLRHGKLVLDGVSEEGVLEEAEFYNVTQLIALLKECILHRDQRPQTDKKRVYRVLQCREQELTQMISTLSDGWRFEQLISMQYTNYGPFENNEFLCVVSKECGTTAGRELELNDRAKVLQQKGSRILGI

SEQ ID NO: 36175 - DNA, 2464 bp, DROSOPHILA
gcccgcagggagactacgcttcatttgcattcgagacaaagttaacaggtaccactgcgattcgattctcgcccttgtggccgttttgcgcactgtacgaagtgtgtgcgggcgtgcatgtgttcaacttgtagtaaaccagatagacccgactgtacgagcaacaagaaaccagccctgcttcgttgcgcccaatagccaggcggctgaattagactcagtttcgagcttaagctttgcttcaagtggcacgcgcgaaccagccagccagccagccagtcagtcagtcagttagccagacatttagcagaggatccttccgagccgctgggctactgggacactcaataagctaggtatatacacatttagcgggagtttgtagggttagtcttagtagtttttatcgtgcttacaataacgaccctgacgacgcagcggacacttcgctggagcagtcgcgattcccttggttaagcacccaactaacttacagtaccgcactaggttcgagctgcatttacgtgtccgataccgataccgataccaataccaataccaggccctctgcacccgaaatccgagtcccccggaatttgtagagtcgcagagttctgctccgtagttctgctgcttgctgtactcttgaactggtgagcggtaggagcgtacgtgtggtccgttttgtgtaggcccggttttactaccttgagctttattttagaaaacgagcaaggcgaagatcaactttaggaaatcaattgaatcacgactgaatttatgtgaacttgcactcaaagaaaatacatacatgcgaatacattatagtgaggatatacatgtgtgaaaaagaaaatgattaacgaaaatgaaaacctatccggcgacgttttgtacagacaggcatgatatctataatatgataagtactacatgaatgtatataattttaaatagttactaatttatacacgaaaaagaaaacaagcgaaaattgaagatgatccagaacgtcgccacctactcgtacccattttgtatccattttgacttattttacgagcacagctggtgcagattatatagagtataacttatgcttacgaggattatttcgacgaagaacctttacactagcaagtagtagaaccgcagcgcccgattacgccggacgcagtgtctggcacttagcaatacagagaaaggccactgcaagttagtacagacacggcaacaagtacagataactcttaactctaacaataatacgatagcatagcctaacccctactgtaactccataaggatgtactcatacccactttaaacagcctgtgccccgtaccttgtaccctgtatcctgtatcctgtattctgcagccgcggatgctcagtcccgcccagaacccggctgtcgctggagctggagctggatcggatcctggatgctgctccctcaaataatatgaatatatatgaataaacttggaacccttttctaaaaaacatccccaagcagcttcgtcctgtgaatgcgctttgtgctttaaagccttccgaaaaagctcaagtgcgggaactggttaaggattttacagaagcagtatgacaatcagcagttcagtggtctccggattcgtgttggtggtgagccatactcccgggattatcaaggacgcacaacccgaagcccgataatataagctttaaaggaacaaagcttcggaagtgcgaagcaatgtaccaaacttcagcaaggacacttcaaaagcgttctttacttctaatatcttaaattttcttgtttaagtttttatatatgataattgtatatttatgttattaatgtgcatgtcccccgggcaaatttagatctttcctgctggtatcctgctggccgccacgagaaaactggtggctcagaatcctaagtcttggacaaattcgaagctaataaaagtgctttaaggaaccagctaattagtctgttctgctgctgcttagagatgggggcgtgcacatttgttttcagcacggtcaaataaatacatccgaactagctgaaacctcgtgcctaattcgtgacacgtacaaaaaatcaacgcgtttgctcatctctagcttccagttatcccaaaactaacggttttgttgaattgatctagtttcctattggtggatagacgtattggaaggtgcaaatggagggggcaacatggaagtgatcagctgtttttgcctccttcgatcagtcagctggcagttgctacggtttctgttggcctggtgtctagaatagagaaacatgcaattttgaagacggccgtggccagttttctcggccaaattgagtaaaatttcgagtcgtggtaccaggcgaacagaaatgccagcaggtgtctgggaggttcagcagcccccaaaagtatgctacacaaaattttgcatgtgataaagtgttttt

SEQ ID NO: 36176 - DNA, 204 bp, DROSOPHILA
atgatccagaacgtcgccacctactcgtacccattttgtatccattttgacttattttacgagcacagctgcctgtgccccgtaccttgtaccctgtatcctgtatcctgtattctgcagccgcggatgctcagtcccgcccagaacccggctgtcgctggagctggagctggatcggatcctggatgctgctccctcaaataa

SEQ ID NO: 36177 - protein, 67 aa, DROSOPHILA
MIQNVATYSYPFCIHFDLFYEHSCLCPVPCTLYPVSCILQPRMLSPAQNPAVAGAGAGSDPGCCSLK

SEQ ID NO: 36178 - DNA, 3648 bp, DROSOPHILA
tgccagttgatggagtgaaaccgttagttgagcttagaagtaaacaaaaacatctgttgtctttcattatggtcttctccctactgaaatttccgttcgcctggtgcccagctttgttaaaacatcattcggcggctcaaatattccgcaatgcaccctaaaattttcttgattaggcaccaggcaagcagaaaccgtagccagtcccagctggctgatcgaaataagctgaagcagctaaagctttttcatgatggctacgttttaccgttatccttttgaccaataggatgccagttgatggagtgaaaccgttaattgagcttagaagtaaacaaaaacatctgttgtctttcattatggtcttctccctactgaaatttccgttcgcctggtgcccaactttgttaaaacatcattcggcggctcaaatattccgcaatgcaccctaaaattttcttgattaggcaccaggcaagcagaaaccgtagccagtgctagctggcagatcgaaataggctgaaacagctgttgttttttcatgatggctgccccgtacgttttccagtgtcctctcgaccaacaggaagccagatcgatcaaggtaaaccgttagtttggaataagctagagatgagaaaacacgttgattgtcacgaattaagcacgaaaagcacgacgataaggccaattcccatgcagtctattcgaccgtgctaaaaagaattgatcacgctcccatctcgcaccaatccaagatcaaaccaatcaggtgatccttttacacctattgaacttgaaattgaatggatggccaacaatgcttttattttctaaatcaggtcggtgaattggtcagggtgttgtaaaggattatggatgtggtgtggatggcattaaaaaaaacatggacacggcaaaggacaatggacggaactgacagaatcacgactgcccagaagtagcaggaaggtacagaatactgggacgcgggctgagtctagttgaagtgtggcagcgagcagcagcggaagtccctgcggtacacctcttgggcaggacggaacgtgcgccagcagttgggcgcgcagcagataatcctggccaggtattctttgaacgcgtcgtaggtggggtaaacgaactgctcgcagtggctcttatggtggtggctgcactcagtatccactatccagtcgcggaccaagagcctctcctcctgatgctttcgttgtcggtgtaaagcggcgccactgaagcggggcttagacttgagggtgatggcgtctctgggggaaacagttcacgtaagcgatgtacaaacccccaagaatggaacctactctaggcctgcggcaatcaagcgttgcacgccgggactgtggattactcgggcaaagtggttgcaccggttggacctgtccagggtgcacaagtaccaagtcggcatcaaggcgaaatgcacctcggctaagatgcgctcggcgcagtcgccgcgctcaagccagttgtgctccagccagagcaccacggaaaggaatatctgccgatggttatcgtttgaattagaaggagaatgacccagtgaccacacggaaatgatttgacgatctcacctcgatctccgagttgacgctgaggtaacagtttcgcaagatgtgcgtgagctcgtgctcggtgaagtacaggaagaatggtgagccgacaatgcagaggaagacgcgagagatgcgggtgagcattagttcgcacaggatacgggcctgcgggtgataacggacttccaggtaggccttgaaggcggtgtcctcgttgaagaactccatcttcgacagggacgacctcagctggcgcagcagctgcgggatctgcagcacctcctccgcaacgacgcgggcgaacagctcgcgctccgcacccgcatccgggccaagctgatctagcttcggcagcttatctataaatttgcgcgccgcgtatatcttggcgtagttctgcagcacgcccttaaagaagcgataccgctcattgccgacgaatatgccggcctccatcagagtctgctcccgcagcacgtgcaacagctgttcggaaacgcgctcgatggccgagtgcggctgcaccccgctgccgagcagctccatcacgatctgcttggcctcgccatcgccctctgcgccgtcgccgaggtgattgagcaggctggcaatttgctggcggctggtcagcgccttcagcttggctggatctccctcgattggcaagagctttacagcgtgggccgacgtcgaggaagcggaaccggcgtcgccctgagcgccgctctcgagtttctctggctccggtttcggcctgcggtcctgctttttgtccttcagctgatcctgttgatcctttagctgcggaaggacccgcgttcggagtagcggcgagacggtggccaccgacatgaatacctctattgcgccctgctcatgaatctggttgcccatctgggccttctgctcatcggagaccggacgtcgggacagccgcttcatggttggatagggaggggttgcaacttgcacagattgaacgcgaataaaaactaaaatttagattgggagtgggtttcggagaagctgttaggagactgttgtatgctacgagtgaaaactttgtgaccgtttcggagcacagattccagatgacaataggtttcaaaagccaggcctactagacgtggcaccaggacacccagaagctataaaagatctttcagacttgcaggtataccgtctcgtatttactgcactaatttatgtgtgtacatacataccaagtgtataactaaggataagagcgacgatctatctatctcgtcgcccggctatctaacgtgggcgcgcagggcgattgtactgggaatttcaacctggttcacctgcagcagctgcacaaggttgcgaaggaactcatgcgacaccttcagctcgtcgtcggcctccaagcgctcaaagagatccaacgccgcctcgtagtcgttgctacggcagaactgggccaacaggaggtcgtagatcttctgctcgtctatggtccgctggacacccctcactccgcgcgccagccgcaggagcgtccgcacagcgccctcctgtcccaagtgctcgcaattcttcacgaggagctcgtggttgatgcggaactctgggttgatgatcagccggcgcagctgtgtctcctttccggattcggccagggcgagcagcagagcgctgttcatattggccgctccgtggatgcgactcacagtcgcagtaaccaccgctaggtgctgctgcgcggactcggccgtgacgccgggaaaacgggtcagctcctgctcgtccccgttgcccagtcgcaccagcagggacaagagctcgaactgcagaggcgtgtgcttgtgagtgttagccagtcgctgaaactcggccaccgcagcgtccaagttgcccttcaacagccactcgcggaccactggtcccagtagggcattttgcgattgacagtagcccagacccctgaggaagtccaaccactcgcgagtctggttaagttgtttggagctctcgccacctgcatgtgaagaggcggccagctggcccacgttggtcagcaatt

SEQ ID NO: 36179 - DNA, 1521 bp, DROSOPHILA
tagcatacaacagtctcctaacagcttctccgaaacccactcccaatctaaattttagtttttattcgcgttcaatctgtgcaagttgcaacccctccctatccaaccatgaagcggctgtcccgacgtccggtctccgatgagcagaaggcccagatgggcaaccagattcatgagcagggcgcaatagaggtattcatgtcggtggccaccgtctcgccgctactccgaacgcgggtccttccgcagctaaaggatcaacaggatcagctgaaggacaaaaagcaggaccgcaggccgaaaccggagccagagaaactcgagagcggcgctcagggcgacgccggttccgcttcctcgacgtcggcccacgctgtaaagctcttgccaatcgagggagatccagccaagctgaaggcgctgaccagccgccagcaaattgccagcctgctcaatcacctcggcgacggcgcagagggcgatggcgaggccaagcagatcgtgatggagctgctcggcagcggggtgcagccgcactcggccatcgagcgcgtttccgaacagctgttgcacgtgctgcgggagcagactctgatggaggccggcatattcgtcggcaatgagcggtatcgcttctttaagggcgtgctgcagaactacgccaagatatacgcggcgcgcaaatttatagataagctgccgaagctagatcagcttggcccggatgcgggtgcggagcgcgagctgttcgcccgcgtcgttgcggaggaggtgctgcagatcccgcagctgctgcgccagctgaggtcgtccctgtcgaagatggagttcttcaacgaggacaccgccttcaaggcctacctggaagtccgttatcacccgcaggcccgtatcctgtgcgaactaatgctcacccgcatctctcgcgtcttcctctgcattgtcggctcaccattcttcctgtacttcaccgagcacgagctcacgcacatcttgcgaaactgttacctcagcgtcaactcggagatcgagatattcctttccgtggtgctctggctggagcacaactggcttgagcgcggcgactgcgccgagcgcatcttagccgaggtgcatttcgccttgatgccgacttggtacttgtgcaccctggacaggtccaaccggtgcaaccactttgcccgagtaatccacagtcccggcgtgcaacgcttgattgccgcaggcctagaagacgccatcaccctcaagtctaagccccgcttcagtggcgccgctttacaccgacaacgaaagcatcaggaggagaggctcttggtccgcgactggatagtggatactgagtgcagccaccaccataagagccactgcgagcagttcgtttaccccacctacgacgcgttcaaagaatacctggccaggattatctgctgcgcgcccaactgctggcgcacgttccgtcctgcccaagaggtgtaccgcagggacttccgctgctgctcgctgccacacttcaactag

SEQ ID NO: 36180 - protein, 470 aa, DROSOPHILA
MKRLSRRPVSDEQKAQMGNQIHEQGAIEVFMSVATVSPLLRTRVLPQLKDQQDQLKDKKQDRRPKPEPEKLESGAQGDAGSASSTSAHAVKLLPIEGDPAKLKALTSRQQIASLLNHLGDGAEGDGEAKQIVMELLGSGVQPHSAIERVSEQLLHVLREQTLMEAGIFVGNERYRFFKGVLQNYAKIYAARKFIDKLPKLDQLGPDAGAERELFARVVAEEVLQIPQLLRQLRSSLSKMEFFNEDTAFKAYLEVRYHPQARILCELMLTRISRVFLCIVGSPFFLYFTEHELTHILRNCYLSVNSEIEIFLSVVLWLEHNWLERGDCAERILAEVHFALMPTWYLCTLDRSNRCNHFARVIHSPGVQRLIAAGLEDAITLKSKPRFSGAALHRQRKHQEERLLVRDWIVDTECSHHHKSHCEQFVYPTYDAFKEYLARIICCAPNCWRTFRPAQEVYRRDFRCCSLPHFN

SEQ ID NO: 36181 - DNA, 5280 bp, DROSOPHILA
agcacctcctccgcaacgacgcgggcgaacagctcgcgctccgcacccgcatccgggccaagctgatctagcttcggcagcttatctataaatttgcgcgccgcgtatatcttggcgtagttctgcagcacgcccttaaagaagcgataccgctcattgccgacgaatatgccggcctccatcagagtctgctcccgcagcacgtgcaacagctgttcggaaacgcgctcgatggccgagtgcggctgcaccccgctgccgagcagctccatcacgatctgcttggcctcgccatcgccctctgcgccgtcgccgaggtgattgagcaggctggcaatttgctggcggctggtcagcgccttcagcttggctggatctccctcgattggcaagagctttacagcgtgggccgacgtcgaggaagcggaaccggcgtcgccctgagcgccgctctcgagtttctctggctccggtttcggcctgcggtcctgctttttgtccttcagctgatcctgttgatcctttagctgcggaaggacccgcgttcggagtagcggcgagacggtggccaccgacatgaatacctctattgcgccctgctcatgaatctggttgcccatctgggccttctgctcatcggagaccggacgtcgggacagccgcttcatggttggatagggaggggttgcaacttgcacagattgaacgcgaataaaaactaaaatttagattgggagtgggtttcggagaagctgttaggagactgttgtatgctacgagtgaaaactttgtgaccgtttcggagcacagattccagatgacaataggtttcaaaagccaggcctactagacgtggcaccaggacacccagaagctataaaagatctttcagacttgcaggtataccgtctcgtatttactgcactaatttatgtgtgtacatacataccaagtgtataactaaggataagagcgacgatctatctatctcgtcgcccggctatctaacgtgggcgcgcagggcgattgtactgggaatttcaacctggttcacctgcagcagctgcacaaggttgcgaaggaactcatgcgacaccttcagctcgtcgtcggcctccaagcgctcaaagagatccaacgccgcctcgtagtcgttgctacggcagaactgggccaacaggaggtcgtagatcttctgctcgtctatggtccgctggacacccctcactccgcgcgccagccgcaggagcgtccgcacagcgccctcctgtcccaagtgctcgcaattcttcacgaggagctcgtggttgatgcggaactctgggttgatgatcagccggcgcagctgtgtctcctttccggattcggccagggcgagcagcagagcgctgttcatattggccgctccgtggatgcgactcacagtcgcagtaaccaccgctaggtgctgctgcgcggactcggccgtgacgccgggaaaacgggtcagctcctgctcgtccccgttgcccagtcgcaccagcagggacaagagctcgaactgcagaggcgtgtgcttgtgagtgttagccagtcgctgaaactcggccaccgcagcgtccaagttgcccttcaacagccactcgcggaccactggtcccagtagggcattttgcgattgacagtagcccagacccctgaggaagtccaaccactcgcgagtctggttaagttgtttggagctctcgccacctgcatgtgaagaggcggccagctggcccacgttggtcagcaattgccatacgttcttcatcacatagtcgccaccgacaaccttatgctgctccgcgcgtcgctggagcagctgctttgcggcctccagctgctggccttggaccaggagggcggcatagtcgatcactttgtgctcgtcaatctgaaaggcttaagagagaacggtatgcggattaatgcagttcacatctagtagtaagttgttaggtacctggatacatgctgctcagtcgctccaagctctcctgggcgcgcggcaagtcgcgcagcttgatgtgtaggtcgaatatggaggccatcatgcctgcgctttcctgaaccttcagaacttggcacttggccaacagctgctgtgcgcgctccaagcgcccactgcgcaccgagagctgcagcaagcgacgcaacacgcctcgcgggttcagctgcttggactccagctcgactaggtggcactcgagctcgtctatgctcatgtcgcgcgggtgcttgatgaagcctccgtggagcgagaccgtgtcagctggcagggcgagctgtgggtttttcatcttctgcagcgttttggccagatcctggatgaggtcaacgtcatcagtggcgtgccggaccacggagagtagagcttcggaggcagcgggtgagatttgtagctctaggcgtctcagttcgtgcagaaaacgtcgcaacgaggtggcatcctggcgcagacgcgtctgaggtccagtcatttgcagcagcaaggagcccacaaaatcttctccccgtttgagtgccttctgctgcagggcttggatcactttggcaaatacctcgaaacgcttcgtggcacgggcattgaccgccagcgaagaaagtggttggagcagcgtggccaggtccaagcgtgtcggataccgatcaagcaagtccagcacctcggacatctgatgctgctgcagcaagtggctcacaaccgggcacagggtctgggaaggcttgacccccgccgattcaagtgccttcacggcctccaagggctgcaccagggtttggcgcaggtggggaaacaggtagtgccgcaacgtttcctcgtcgcactcaacgcgcaggcgccgcatttcagaaaccaggcgtagcatgccgctttcgccctcccgccggtaatggtgcaagatcaggggccagaagtaatgcggacgaagttcctcgccggctgcagatagatcctccaggcagcgtagcgcggatgatggctgacggcgaagggccaactccgccaccaaatgcagggcgcggacgttctggttccgctgcactagttgaccggcgaactggattgtttggtccaacggaacttgggcgcggaagaactcctgcagcagaagtgcaccgtactcatccacgttctgattctgcaactcgaacttcggagcgggcaacgcacctacgagctgtatgacgacttcggtgcgtccttggtgcaccagctgaatgcacaggcttctgatggcgggcggcaggtcgatacctgttagaaactcgcggggcagttccttgacaagcagttggattagatccgtgtcgacatccttgctggcgagcagaccccgcagcatctggagcagctgaggggcggtgaatccgtgctccacctgcagcagctccttggcctgtgccaactgaccgttttccagcagagcctcgaaccaaatggcctgagtgctgctgccttgctgtattcctgcggcccgcatgctggctaggacggactccgccccgggcagatcaccgctgcgggcgtggcccaaaagcagggcgtgaaagttgtgctccgtgagggcgaggctgcgctcgcgcatctccgacaaaatctcggtggccatgcgcatgtttccggcggcgccggccacgtccaaaagagcgccgtacaaggtggaatcggctgctccatggtagacggcaatctccgccagcaacgagcgatagtcagtcagaggcaaacggttctggcgcagcacctggagcttcgtgtggtaatgtgccagcgtgggctggcccaacttgatcagttgagcccagagtcccttgaagagctgaagacgctcctggctgctctgagcaggaagcagttcgggcacacaggaccctagaaggaagtgcacctcttcgatgccgactcctagcggcgacgcagactcctgcaggagctccagcaggcgctggcagtgctcaaagttgatcagatcgtgctgccggtagtacgcctccagctgtgtccacgcatccgccacgctggctttcggtttttcagaggaggaggcggggcgccggcttcttcgctccaccgcactgaggacgccacccgttcccagggatcgcatctggagcagcgagaacggcaccgctggcgccgcaggcttcgttgcataacggaatgccaggctggcggaggaagcgctgcgtcctggcagatggcccaagcgctgcctgcagagccacacgttccgcaacagtcgtgctcgctgcattttgcccaagttaattaatcttccccaaaattacgagattttactttcgcagttttgcggcgagcaacaaaaaaaaaacaacacgcgccggcaatcagctgtgccttccagtcgaaagatatcgaaaacagtgctgcccatctgtatatgcatacccgtttccgttgcagattttgatttaaagtttaagttaagtcatggagctccaatgaaaggaatgaaaagaaataccatggggacatgtcattattttataatcgctatttatttacttaatcgattcaacggatctggaagcgcaaccctacagcgaggatctggccaagcggcgtcgctgcgcagccagcggagtgccctcctcgcgcaattcggccaagagggagtcctgccagggacgaaacaggaggcgctttgtcgccaacagggaggcggaaggcaagcgcaagtattggtcgacgcggtgccaaaactcctgcggctctcgcaccacactggccacaaggccacactggagggcaatgctggagctcgcttgatcgcccagacgaagcagccagtggacgtgtggcacagtccagccgggacccaccttggtgcagggatccaggtgcgagaaagcgggcacaaaggcagataactccgttgcgaagaccagatcgcacaggctgcacacgctcaggcccagaccgacgcactgcctctccacaaaagccactaggagtttgcggtgcacaagcagcttcttggccagcgagcgcatcacaaaattggccgccttctcatggatgtactgctcctcggcatcaccactgcccacagcttcttcgtgggaagcggtacgcctactcctattctccagaccctgtttgagagccaacggttccatctcaccgccacatgctgcagaaaactcgcccgagagcacgaccaccttaacggcggcgtctgcactcgccaggtccagggcgcgcatcagctcgtagagggttcggcgttgcca

SEQ ID NO: 36182 - DNA, 3219 bp, DROSOPHILA
atgcagcgagcacgactgttgcggaacgtgtggctctgcaggcagcgcttgggccatctgccaggacgcagcgcttcctccgccagcctggcattccgttatgcaacgaagcctgcggcgccagcggtgccgttctcgctgctccagatgcgatccctgggaacgggtggcgtcctcagtgcggtggagcgaagaagccggcgccccgcctcctcctctgaaaaaccgaaagccagcgtggcggatgcgtggacacagctggaggcgtactaccggcagcacgatctgatcaactttgagcactgccagcgcctgctggagctcctgcaggagtctgcgtcgccgctaggagtcggcatcgaagaggtgcacttccttctagggtcctgtgtgcccgaactgcttcctgctcagagcagccaggagcgtcttcagctcttcaagggactctgggctcaactgatcaagttgggccagcccacgctggcacattaccacacgaagctccaggtgctgcgccagaaccgtttgcctctgactgactatcgctcgttgctggcggagattgccgtctaccatggagcagccgattccaccttgtacggcgctcttttggacgtggccggcgccgccggaaacatgcgcatggccaccgagattttgtcggagatgcgcgagcgcagcctcgccctcacggagcacaactttcacgccctgcttttgggccacgcccgcagcggtgatctgcccggggcggagtccgtcctagccagcatgcgggccgcaggaatacagcaaggcagcagcactcaggccatttggttcgaggctctgctggaaaacggtcagttggcacaggccaaggagctgctgcaggtggagcacggattcaccgcccctcagctgctccagatgctgcggggtctgctcgccagcaaggatgtcgacacggatctaatccaactgcttgtcaaggaactgccccgcgagtttctaacaggtatcgacctgccgcccgccatcagaagcctgtgcattcagctggtgcaccaaggacgcaccgaagtcgtcatacagctcgtaggtgcgttgcccgctccgaagttcgagttgcagaatcagaacgtggatgagtacggtgcacttctgctgcaggagttcttccgcgcccaagttccgttggaccaaacaatccagttcgccggtcaactagtgcagcggaaccagaacgtccgcgccctgcatttggtggcggagttggcccttcgccgtcagccatcatccgcgctacgctgcctggaggatctatctgcagccggcgaggaacttcgtccgcattacttctggcccctgatcttgcaccattaccggcgggagggcgaaagcggcatgctacgcctggtttctgaaatgcggcgcctgcgcgttgagtgcgacgaggaaacgttgcggcactacctgtttccccacctgcgccaaaccctggtgcagcccttggaggccgtgaaggcacttgaatcggcgggggtcaagccttcccagaccctgtgcccggttgtgagccacttgctgcagcagcatcagatgtccgaggtgctggacttgcttgatcggtatccgacacgcttggacctggccacgctgctccaaccactttcttcgctggcggtcaatgcccgtgccacgaagcgtttcgaggtatttgccaaagtgatccaagccctgcagcagaaggcactcaaacggggagaagattttgtgggctccttgctgctgcaaatgactggacctcagacgcgtctgcgccaggatgccacctcgttgcgacgttttctgcacgaactgagacgcctagagctacaaatctcacccgctgcctccgaagctctactctccgtggtccggcacgccactgatgacgttgacctcatccaggatctggccaaaacgctgcagaagatgaaaaacccacagctcgccctgccagctgacacggtctcgctccacggaggcttcatcaagcacccgcgcgacatgagcatagacgagctcgagtgccacctagtcgagctggagtccaagcagctgaacccgcgaggcgtgttgcgtcgcttgctgcagctctcggtgcgcagtgggcgcttggagcgcgcacagcagctgttggccaagtgccaagttctgaaggttcaggaaagcgcaggcatgatggcctccatattcgacctacacatcaagctgcgcgacttgccgcgcgcccaggagagcttggagcgactgagcagcatgtatccagcctttcagattgacgagcacaaagtgatcgactatgccgccctcctggtccaaggccagcagctggaggccgcaaagcagctgctccagcgacgcgcggagcagcataaggttgtcggtggcgactatgtgatgaagaacgtatggcaattgctgaccaacgtgggccagctggccgcctcttcacatgcaggtggcgagagctccaaacaacttaaccagactcgcgagtggttggacttcctcaggggtctgggctactgtcaatcgcaaaatgccctactgggaccagtggtccgcgagtggctgttgaagggcaacttggacgctgcggtggccgagtttcagcgactggctaacactcacaagcacacgcctctgcagttcgagctcttgtccctgctggtgcgactgggcaacggggacgagcaggagctgacccgttttcccggcgtcacggccgagtccgcgcagcagcacctagcggtggttactgcgactgtgagtcgcatccacggagcggccaatatgaacagcgctctgctgctcgccctggccgaatccggaaaggagacacagctgcgccggctgatcatcaacccagagttccgcatcaaccacgagctcctcgtgaagaattgcgagcacttgggacaggagggcgctgtgcggacgctcctgcggctggcgcgcggagtgaggggtgtccagcggaccatagacgagcagaagatctacgacctcctgttggcccagttctgccgtagcaacgactacgaggcggcgttggatctctttgagcgcttggaggccgacgacgagctgaaggtgtcgcatgagttccttcgcaaccttgtgcagctgctgcaggtgaaccaggttgaaattcccagtacaatcgccctgcgcgcccacgttagatag

SEQ ID NO: 36183 - protein, 1072 aa, DROSOPHILA
MQRARLLRNVWLCRQRLGHLPGRSASSASLAFRYATKPAAPAVPFSLLQMRSLGTGGVLSAVERRSRRPASSSEKPKASVADAWTQLEAYYRQHDLINFEHCQRLLELLQESASPLGVGIEEVHFLLGSCVPELLPAQSSQERLQLFKGLWAQLIKLGQPTLAHYHTKLQVLRQNRLPLTDYRSLLAEIAVYHGAADSTLYGALLDVAGAAGNMRMATEILSEMRERSLALTEHNFHALLLGHARSGDLPGAESVLASMRAAGIQQGSSTQAIWFEALLENGQLAQAKELLQVEHGFTAPQLLQMLRGLLASKDVDTDLIQLLVKELPREFLTGIDLPPAIRSLCIQLVHQGRTEVVIQLVGALPAPKFELQNQNVDEYGALLLQEFFRAQVPLDQTIQFAGQLVQRNQNVRALHLVAELALRRQPSSALRCLEDLSAAGEELRPHYFWPLILHHYRREGESGMLRLVSEMRRLRVECDEETLRHYLFPHLRQTLVQPLEAVKALESAGVKPSQTLCPVVSHLLQQHQMSEVLDLLDRYPTRLDLATLLQPLSSLAVNARATKRFEVFAKVIQALQQKALKRGEDFVGSLLLQMTGPQTRLRQDATSLRRFLHELRRLELQISPAASEALLSVVRHATDDVDLIQDLAKTLQKMKNPQLALPADTVSLHGGFIKHPRDMSIDELECHLVELESKQLNPRGVLRRLLQLSVRSGRLERAQQLLAKCQVLKVQESAGMMASIFDLHIKLRDLPRAQESLERLSSMYPAFQIDEHKVIDYAALLVQGQQLEAAKQLLQRRAEQHKVVGGDYVMKNVWQLLTNVGQLAASSHAGGESSKQLNQTREWLDFLRGLGYCQSQNALLGPVVREWLLKGNLDAAVAEFQRLANTHKHTPLQFELLSLLVRLGNGDEQELTRFPGVTAESAQQHLAVVTATVSRIHGAANMNSALLLALAESGKETQLRRLIINPEFRINHELLVKNCEHLGQEGAVRTLLRLARGVRGVQRTIDEQKIYDLLLAQFCRSNDYEAALDLFERLEADDELKVSHEFLRNLVQLLQVNQVEIPSTIALRAHVR

SEQ ID NO: 36184 - DNA, 2843 bp, DROSOPHILA
cgtgagggcgaggctgcgctcgcgcatctccgacaaaatctcggtggccatgcgcatgtttccggcggcgccggccacgtccaaaagagcgccgtacaaggtggaatcggctgctccatggtagacggcaatctccgccagcaacgagcgatagtcagtcagaggcaaacggttctggcgcagcacctggagcttcgtgtggtaatgtgccagcgtgggctggcccaacttgatcagttgagcccagagtcccttgaagagctgaagacgctcctggctgctctgagcaggaagcagttcgggcacacaggaccctagaaggaagtgcacctcttcgatgccgactcctagcggcgacgcagactcctgcaggagctccagcaggcgctggcagtgctcaaagttgatcagatcgtgctgccggtagtacgcctccagctgtgtccacgcatccgccacgctggctttcggtttttcagaggaggaggcggggcgccggcttcttcgctccaccgcactgaggacgccacccgttcccagggatcgcatctggagcagcgagaacggcaccgctggcgccgcaggcttcgttgcataacggaatgccaggctggcggaggaagcgctgcgtcctggcagatggcccaagcgctgcctgcagagccacacgttccgcaacagtcgtgctcgctgcattttgcccaagttaattaatcttccccaaaattacgagattttactttcgcagttttgcggcgagcaacaaaaaaaaaacaacacgcgccggcaatcagctgtgccttccagtcgaaagatatcgaaaacagtgctgcccatctgtatatgcatacccgtttccgttgcagattttgatttaaagtttaagttaagtcatggagctccaatgaaaggaatgaaaagaaataccatggggacatgtcattattttataatcgctatttatttacttaatcgattcaacggatctggaagcgcaaccctacagcgaggatctggccaagcggcgtcgctgcgcagccagcggagtgccctcctcgcgcaattcggccaagagggagtcctgccagggacgaaacaggaggcgctttgtcgccaacagggaggcggaaggcaagcgcaagtattggtcgacgcggtgccaaaactcctgcggctctcgcaccacactggccacaaggccacactggagggcaatgctggagctcgcttgatcgcccagacgaagcagccagtggacgtgtggcacagtccagccgggacccaccttggtgcagggatccaggtgcgagaaagcgggcacaaaggcagataactccgttgcgaagaccagatcgcacaggctgcacacgctcaggcccagaccgacgcactgcctctccacaaaagccactaggagtttgcggtgcacaagcagcttcttggccagcgagcgcatcacaaaattggccgccttctcatggatgtactgctcctcggcatcaccactgcccacagcttcttcgtgggaagcggtacgcctactcctattctccagaccctgtttgagagccaacggttccatctcaccgccacatgctgcagaaaactcgcccgagagcacgaccaccttaacggcggcgtctgcactcgccaggtccagggcgcgcatcagctcgtagagggttcggcgttgccagcgccgctggaagcgtatgtggagcagcccagaacgctgttcgacgaccagctccctgaagtgcttgcagctctcgtttgtggccatcgctgaagactgcgtgatagagactgtggccaagtgatagaagacaagagccgtaagcatctgcgcttatcacgcggtcaaagtgcaggcttcttttctccgcgcaactgcgctcctccgcatctcgaaattaccttccattcacgcatctcttaaactcaattgggggcgccattccaacaacagtttgctttcattggtgtgtatgctaaatatatgctatctttgtgttaatcgttgtgtccaggctgggccatcagatggcttatctatgtttctctcaatctgctagttgcgcaatataactctttcagtctgagattgtgggccttcaaactctcgaagtcggggggactttaatatatatgtatatacgtaggtttaatgcttaaaatgtacaagtgcctcttagacacacccttcggaataaataactaatgggctacaatcagtgctcgtccaggtgcgagaactttttgcgcagcttctcgcgcctctccttcttcacatgacgccagggcttggccgccggatcattgccggctactagggacccgtcgttggccaggcgcacgttagggaagttagtgcgtcctttgacgtgggcgtgcgtaggcttgtcggagaagaattggttgtctagctccttggacgtgcttttgttgatctgcggaaaacgcgatcagttagcaaaggaatcacgtctagtgcaaagggcaaatctcacccgcatggctcgctgctgttggccgggcagctgtgattcctcgatgaccctgcgctggcgttcgggaaaggtgtgatactcggtctgcggtacagagggcgggctcatggcgtagagcagtctgccattgacgtagtctttaagcacatacctggcggaacgcgcctgatccggctgcccgttggaggtcataaaaccgcgattgtctggaaaagagcgagaaagagtgcgttgtgaaatactgaaatgcgtgcgcaaagcattggcacttacatccataagccagcagcagctcctccgaatgcggtggcctttccatgtcctcgccttcca

SEQ ID NO: 36185 - DNA, 843 bp, DROSOPHILA
atgcttacggctcttgtcttctatcacttggccacagtctctatcacgcagtcttcagcgatggccacaaacgagagctgcaagcacttcagggagctggtcgtcgaacagcgttctgggctgctccacatacgcttccagcggcgctggcaacgccgaaccctctacgagctgatgcgcgccctggacctggcgagtgcagacgccgccgttaaggtggtcgtgctctcgggcgagttttctgcagcatgtggcggtgagatggaaccgttggctctcaaacagggtctggagaataggagtaggcgtaccgcttcccacgaagaagctgtgggcagtggtgatgccgaggagcagtacatccatgagaaggcggccaattttgtgatgcgctcgctggccaagaagctgcttgtgcaccgcaaactcctagtggcttttgtggagaggcagtgcgtcggtctgggcctgagcgtgtgcagcctgtgcgatctggtcttcgcaacggagttatctgcctttgtgcccgctttctcgcacctggatccctgcaccaaggtgggtcccggctggactgtgccacacgtccactggctgcttcgtctgggcgatcaagcgagctccagcattgccctccagtgtggccttgtggccagtgtggtgcgagagccgcaggagttttggcaccgcgtcgaccaatacttgcgcttgccttccgcctccctgttggcgacaaagcgcctcctgtttcgtccctggcaggactccctcttggccgaattgcgcgaggagggcactccgctggctgcgcagcgacgccgcttggccagatcctcgctgtag

SEQ ID NO: 36186 - protein, 280 aa, DROSOPHILA
MLTALVFYHLATVSITQSSAMATNESCKHFRELVVEQRSGLLHIRFQRRWQRRTLYELMRALDLASADAAVKVVVLSGEFSAACGGEMEPLALKQGLENRSRRTASHEEAVGSGDAEEQYIHEKAANFVMRSLAKKLLVHRKLLVAFVERQCVGLGLSVCSLCDLVFATELSAFVPAFSHLDPCTKVGPGWTVPHVHWLLRLGDQASSSIALQCGLVASVVREPQEFWHRVDQYLRLPSASLLATKRLLFRPWQDSLLAELREEGTPLAAQRRRLARSSL

SEQ ID NO: 36187 - DNA, 4104 bp, DROSOPHILA
atcgcccagacgaagcagccagtggacgtgtggcacagtccagccgggacccaccttggtgcagggatccaggtgcgagaaagcgggcacaaaggcagataactccgttgcgaagaccagatcgcacaggctgcacacgctcaggcccagaccgacgcactgcctctccacaaaagccactaggagtttgcggtgcacaagcagcttcttggccagcgagcgcatcacaaaattggccgccttctcatggatgtactgctcctcggcatcaccactgcccacagcttcttcgtgggaagcggtacgcctactcctattctccagaccctgtttgagagccaacggttccatctcaccgccacatgctgcagaaaactcgcccgagagcacgaccaccttaacggcggcgtctgcactcgccaggtccagggcgcgcatcagctcgtagagggttcggcgttgccagcgccgctggaagcgtatgtggagcagcccagaacgctgttcgacgaccagctccctgaagtgcttgcagctctcgtttgtggccatcgctgaagactgcgtgatagagactgtggccaagtgatagaagacaagagccgtaagcatctgcgcttatcacgcggtcaaagtgcaggcttcttttctccgcgcaactgcgctcctccgcatctcgaaattaccttccattcacgcatctcttaaactcaattgggggcgccattccaacaacagtttgctttcattggtgtgtatgctaaatatatgctatctttgtgttaatcgttgtgtccaggctgggccatcagatggcttatctatgtttctctcaatctgctagttgcgcaatataactctttcagtctgagattgtgggccttcaaactctcgaagtcggggggactttaatatatatgtatatacgtaggtttaatgcttaaaatgtacaagtgcctcttagacacacccttcggaataaataactaatgggctacaatcagtgctcgtccaggtgcgagaactttttgcgcagcttctcgcgcctctccttcttcacatgacgccagggcttggccgccggatcattgccggctactagggacccgtcgttggccaggcgcacgttagggaagttagtgcgtcctttgacgtgggcgtgcgtaggcttgtcggagaagaattggttgtctagctccttggacgtgcttttgttgatctgcggaaaacgcgatcagttagcaaaggaatcacgtctagtgcaaagggcaaatctcacccgcatggctcgctgctgttggccgggcagctgtgattcctcgatgaccctgcgctggcgttcgggaaaggtgtgatactcggtctgcggtacagagggcgggctcatggcgtagagcagtctgccattgacgtagtctttaagcacatacctggcggaacgcgcctgatccggctgcccgttggaggtcataaaaccgcgattgtctggaaaagagcgagaaagagtgcgttgtgaaatactgaaatgcgtgcgcaaagcattggcacttacatccataagccagcagcagctcctccgaatgcggtggcctttccatgtcctcgccttccagcggcttggctatcacaataccgtatttgtcttcaaggacgtggcgcggaatgcgctcgcacagcaagttgacggcgggaacgtgatcgcgcatttggtcaatgggcaggatgccgttgagcaacatgtccgccttggttaacacaaaactcggcatcaccagaccgggacagtcgcagagcagtatgtccttgtccaggaaaagcgtctggaagcgtttagttttgcccggcgtggccgaaacggacaccttcttcactgtcatcagcgagttgatggtgctacttttgccaacgtttgggtagccgaccattccgacggtcacgtgctgctctgtgtgccggggaccggtgtagatgtttcgcaggaactcaatgagctccaggcgggacagcagtcggggactgttcttgtccccgggcaatcgtggcagctcatcgttttgagtctcgggaatcgtcttatatttctgctcgataacgttcaaagcgtcctccacgctatccaacgactgttttatctcctcaactgctctgcgcagctgttgcacctcgggaaaggaatccaggcactcctccgcctcccgcttcaactcctcctctaccagcgtggccgagtagaaggccgtgcgaataccctcgctgtcaaagtactccgcccagtggcgacgctgttcctcagtgagcaggtccgacttgtttaccaggatcatgttcatcttgctaggttccacctcctttacgtagcgctcaaggtcggcgctgcggaacagcagcggattacgggcgtctacgatctgcacaacgacgtcagatcgctccactacgcgccacagctgccgccagaactccaggttcttctcatacggagtcatcaagatctcctcgtcctcctgcagcagcgccaggtcgcggcgccagtcgagaaatgcctcgttctcggctcgcactagctcctcggcgctcgtctccttggtccacttgggccgccgcgggatcttgagctggtcacggtgctcgtcgtgcttctggtgcatgcgctgctcctgcgtcttgctcagcagtccaacgcgctgcttggggttcacgaacgtgatgttcagcttctcggcctggaactcagtgccggccagctcagccgtgcgcaggaaggcctggaacgacgactcctcagtgacagaggacaggttgaggcggccccagtcgtagccatcctgcagctcggtggtgtgcagctggtaaggatcgaaaccgtgttcacagtgtaagatcgaatgcatatgtatgtattttctacgagtgctcttaccatcgtgtcgttgtccaccttgcggcgctgagtgtgtccgaaacgatccttgatcaactggcggcccaggttgggggcgccgcccttgttctttttgcccatggcgcagtcactatattcgcaaatccacagaagaaataattattttgattgtcaaaaacacgtgcaatgtttgcccgaaatgctatcgaggtctatcgtgaaatcgatatggcgagattcgattcctgtcgtcaatcgatatttacaggtcgagtttaaatttcaatttgcattttttggaatgtggcaacgctaaaggagcgggtaaatttaaacatttaccctctgaacattacacattataattgacttttctgctagcacttttctgttggctttagatttatttttggtacacaatcgcaggtggttcggaatcccgtttgctctcttacgttggctttggacttaaaactaggtcttgagatgtcaggtgggagctacagatggatcagtacgggtcggaatcttcctcgctgtcgctatcgccatccgcccacacaatgggccacacggcgttgcgcgagcagctgccgcctaaggccttgcagaacgtgttaaaggtgctggcctgggtaaagccgaggatctcgcgctcctcgtagatgcggtacgtgaaggtgctctcgtaggtgcccacaaagtagcgggcgtaggcgcagaccagctggtccaccaccgccacgcccccatccttcagctcccttcgttggacattcgactccggcgcgaagtgcacgaggcggaagcggtagaagagctcctttagttccatcagctcgtatggcgtggcgtcagtggccaggaacactgtggtcatgttaaacccgcgcagcagctgcttgacctgctgggcagccgccttcagggtgggagtggtcgcatcccgcgagcgaacaaagtcgccccgccttaggtgggcgcagaggtaatcgccgcccttggcgttgcgcttcggccgctccagctcccacatggcgggccgttggacaccggccgaagcatctgtggtgtccagggcctgccgtcggaagtcggcggccacctgttcgagccgacgggcgaaacgcatggaacgccgggcctgccaaaagtgctcgtcgccccagtggtcgtgaagcaccgtttcggcgctgagcaaa

SEQ ID NO: 36188 - DNA, 1903 bp, DROSOPHILA
catttcgggcaaacattgcacgtgtttttgacaatcaaaataattatttcttctgtggatttgcgaatatagtgactgcgccatgggcaaaaagaacaagggcggcgcccccaacctgggccgccagttgatcaaggatcgtttcggacacactcagcgccgcaaggtggacaacgacacgatgctgcacaccaccgagctgcaggatggctacgactggggccgcctcaacctgtcctctgtcactgaggagtcgtcgttccaggccttcctgcgcacggctgagctggccggcactgagttccaggccgagaagctgaacatcacgttcgtgaaccccaagcagcgcgttggactgctgagcaagacgcaggagcagcgcatgcaccagaagcacgacgagcaccgtgaccagctcaagatcccgcggcggcccaagtggaccaaggagacgagcgccgaggagctagtgcgagccgagaacgaggcatttctcgactggcgccgcgacctggcgctgctgcaggaggacgaggagatcttgatgactccgtatgagaagaacctggagttctggcggcagctgtggcgcgtagtggagcgatctgacgtcgttgtgcagatcgtagacgcccgtaatccgctgctgttccgcagcgccgaccttgagcgctacgtaaaggaggtggaacctagcaagatgaacatgatcctggtaaacaagtcggacctgctcactgaggaacagcgtcgccactgggcggagtactttgacagcgagggtattcgcacggccttctactcggccacgctggtagaggaggagttgaagcgggaggcggaggagtgcctggattcctttcccgaggtgcaacagctgcgcagagcagttgaggagataaaacagtcgttggatagcgtggaggacgctttgaacgttatcgagcagaaatataagacgattcccgagactcaaaacgatgagctgccacgattgcccggggacaagaacagtccccgactgctgtcccgcctggagctcattgagttcctgcgaaacatctacaccggtccccggcacacagagcagcacgtgaccgtcggaatggtcggctacccaaacgttggcaaaagtagcaccatcaactcgctgatgacagtgaagaaggtgtccgtttcggccacgccgggcaaaactaaacgcttccagacgcttttcctggacaaggacatactgctctgcgactgtcccggtctggtgatgccgagttttgtgttaaccaaggcggacatgttgctcaacggcatcctgcccattgaccaaatgcgcgatcacgttcccgccgtcaacttgctgtgcgagcgcattccgcgccacgtccttgaagacaaatacggtattgtgatagccaagccgctggaaggcgaggacatggaaaggccaccgcattcggaggagctgctgctggcttatggatacaatcgcggttttatgacctccaacgggcagccggatcaggcgcgttccgccaggtatgtgcttaaagactacgtcaatggcagactgctctacgccatgagcccgccctctgtaccgcagaccgagtatcacacctttcccgaacgccagcgcagggtcatcgaggaatcacagctgcccggccaacagcagcgagccatgcggatcaacaaaagcacgtccaaggagctagacaaccaattcttctccgacaagcctacgcacgcccacgtcaaaggacgcactaacttccctaacgtgcgcctggccaacgacgggtccctagtagccggcaatgatccggcggccaagccctggcgtcatgtgaagaaggagaggcgcgagaagctgcgcaaaaagttctcgcacctggacgagcactga

SEQ ID NO: 36189 - protein, 606 aa, DROSOPHILA
MGKKNKGGAPNLGRQLIKDRFGHTQRRKVDNDTMLHTTELQDGYDWGRLNLSSVTEESSFQAFLRTAELAGTEFQAEKLNITFVNPKQRVGLLSKTQEQRMHQKHDEHRDQLKIPRRPKWTKETSAEELVRAENEAFLDWRRDLALLQEDEEILMTPYEKNLEFWRQLWRVVERSDVVVQIVDARNPLLFRSADLERYVKEVEPSKMNMILVNKSDLLTEEQRRHWAEYFDSEGIRTAFYSATLVEEELKREAEECLDSFPEVQQLRRAVEEIKQSLDSVEDALNVIEQKYKTIPETQNDELPRLPGDKNSPRLLSRLELIEFLRNIYTGPRHTEQHVTVGMVGYPNVGKSSTINSLMTVKKVSVSATPGKTKRFQTLFLDKDILLCDCPGLVMPSFVLTKADMLLNGILPIDQMRDHVPAVNLLCERIPRHVLEDKYGIVIAKPLEGEDMERPPHSEELLLAYGYNRGFMTSNGQPDQARSARYVLKDYVNGRLLYAMSPPSVPQTEYHTFPERQRRVIEESQLPGQQQRAMRINKSTSKELDNQFFSDKPTHAHVKGRTNFPNVRLANDGSLVAGNDPAAKPWRHVKKERREKLRKKFSHLDEH

SEQ ID NO: 36190 - DNA, 3926 bp, DROSOPHILA
caacgacgtcagatcgctccactacgcgccacagctgccgccagaactccaggttcttctcatacggagtcatcaagatctcctcgtcctcctgcagcagcgccaggtcgcggcgccagtcgagaaatgcctcgttctcggctcgcactagctcctcggcgctcgtctccttggtccacttgggccgccgcgggatcttgagctggtcacggtgctcgtcgtgcttctggtgcatgcgctgctcctgcgtcttgctcagcagtccaacgcgctgcttggggttcacgaacgtgatgttcagcttctcggcctggaactcagtgccggccagctcagccgtgcgcaggaaggcctggaacgacgactcctcagtgacagaggacaggttgaggcggccccagtcgtagccatcctgcagctcggtggtgtgcagctggtaaggatcgaaaccgtgttcacagtgtaagatcgaatgcatatgtatgtattttctacgagtgctcttaccatcgtgtcgttgtccaccttgcggcgctgagtgtgtccgaaacgatccttgatcaactggcggcccaggttgggggcgccgcccttgttctttttgcccatggcgcagtcactatattcgcaaatccacagaagaaataattattttgattgtcaaaaacacgtgcaatgtttgcccgaaatgctatcgaggtctatcgtgaaatcgatatggcgagattcgattcctgtcgtcaatcgatatttacaggtcgagtttaaatttcaatttgcattttttggaatgtggcaacgctaaaggagcgggtaaatttaaacatttaccctctgaacattacacattataattgacttttctgctagcacttttctgttggctttagatttatttttggtacacaatcgcaggtggttcggaatcccgtttgctctcttacgttggctttggacttaaaactaggtcttgagatgtcaggtgggagctacagatggatcagtacgggtcggaatcttcctcgctgtcgctatcgccatccgcccacacaatgggccacacggcgttgcgcgagcagctgccgcctaaggccttgcagaacgtgttaaaggtgctggcctgggtaaagccgaggatctcgcgctcctcgtagatgcggtacgtgaaggtgctctcgtaggtgcccacaaagtagcgggcgtaggcgcagaccagctggtccaccaccgccacgcccccatccttcagctcccttcgttggacattcgactccggcgcgaagtgcacgaggcggaagcggtagaagagctcctttagttccatcagctcgtatggcgtggcgtcagtggccaggaacactgtggtcatgttaaacccgcgcagcagctgcttgacctgctgggcagccgccttcagggtgggagtggtcgcatcccgcgagcgaacaaagtcgccccgccttaggtgggcgcagaggtaatcgccgcccttggcgttgcgcttcggccgctccagctcccacatggcgggccgttggacaccggccgaagcatctgtggtgtccagggcctgccgtcggaagtcggcggccacctgttcgagccgacgggcgaaacgcatggaacgccgggcctgccaaaagtgctcgtcgccccagtggtcgtgaagcaccgtttcggcgctgagcaaagcgtacgtgcgcatgtcgtcgacgtcctccggtcccgccgtgtcctcgtcgatcgcctcgcgaagcaacttctccagcagtccggcgctgccctggaaccgaacgcagtggaaacgccccacgcgcagctccgcctgctgcagcaatggtcctcccgacagggatccctcgctgcacggcttgtccgtgacgcgctcgaacttgtcccgaaatatgccctgttctagcatgacctcgtagtgctgcaaccggaaagcgtgccctacatggaccagcggtgcgccaggattgccgaataagcgctgttcggccaggaattcctcgtagtccagaacgggcgcgtagcgacgcagactggccaagtcgaagaagtggctccagggcagtccagattgctgcaggccctgcgagtgccagtggtagaggcggggccacggcggcagcacaaggcgcacatggcgaaagcgccttctcctctgcagccggcgcacgaacaccgccatgcgaatatagacgtctcggcgcaggttgaagccctcggagatgtttacgtcgtaaaggatatacacggcgcccctcatcccgagcacctcaggcggacaagtcgctggcagtggcaggatctcctgcaggaaccctttgacgcaggtgccgctgcttccccgggaatcgccaatttcccgctttgcagtcccattccggacggcggcatccgagccggtcagcagatggaggagcaggagcagcgccgggaacccaagcctgggccagctccctcgcatttttggtttggaatggagtggctgtggcggcggtcagtaaaaaaccctaacgcatttggtattttacacgggaataaaacaaagaaaaacatatgactttgatttctaacaacggacaatccactctttccaatattttagcagctgtacagataaaacctataattttttttataaaaaaaggcctatagaaaacccatgtacattacgggagtgatacaccataactttgcaaaaaaaaaccacacagccaaaaaacttacagttttgtgcagcttacgatcccaactaacgacccatatcactttcctgctgattttgaaaaatttatttttttccaaaattttgcaatttcgataagggataacatcaagaaattttgcgaaaaatgtaaaaaaattttcatttccagcctggaacgccattcgattgcaatttttattgcgagtgcaacgaggtatggcacttaatgatggggctgttatttacgttgtggtgaacaaaaaactggcagaaaaccaggatatcagtaatagtgttcttatcaaaaaatccgcattctcataaggttgttgccgagctcgaatgcaaatcgatgtctatttgcactattattcccaacgatttccatatagcacctgcttgaatgggtctttaaaaaagcgtatgtaaaaagctgcgcgaaagcttcgctcgctaatctcgaacagctgagtgtgcaaaacatttcgtattggcgttctggcgttttggggccgtctggatgcctcactcagtcagatacgagatacggaagcccagcgaacggaggagggcgtgagatgcggacgccgtgcgtgaccacagtacaaactagattacattaagttagactagctaatcccaagctgaacccaggcccctttcccgccgtctggacccctctaccccgtccggaacgctctacgaaagcaagtaactaactaacacaccactcaccgggcagcaacaacagaaacgaagatggaggggcgacgggcggcacgatctgctcggtcacgctctcgtttacgagcgacgtaaggtgtttgcgtagtgactggcgcgggagagccaaacgtgccgttattcttcattcatcaatggcgagcctccccctcgtgcacccgaacccacacgcctgtctcgttacgtaaagtccttgcaaaaaaaacttccactctcgttgcgtgagaggaaatccaggagctgattgagggtcactgggatgcttcgtacagagttcactactcgaccaaattcgtagaatgaatttcgtaattcgggaatgtttttccccccgccatatatacataaatactcagtctcgtgcctgtcaagatcccaatgtgcccaatgtgcacccctcccttttgtgagcggcatgcacatggtgttggtgccgctcgctcggctgagggtcaagatcgccgca

SEQ ID NO: 36191 - DNA, 1926 bp, DROSOPHILA
ttgcactcgcaataaaaattgcaatcgaatggcgttccaggctggaaatgaaaatttttttacatttttcgcaaaatttcttgatgttatcccttatcgaaattgcaaaattttggaaaaaaataaatttttcaaaatcagcaggaaagtgatatgggtcgttagttgggatcgtaagctgcacaaaactgtaagttttttggctgtgtggtttttttttgcaaagttatggtgtatcactcccgtaatgtacatgggttttctataggcctttttttataaaaaaaattataggttttatctgtacagctgctaaaatattggaaagagtggattgtccgttgttagaaatcaaagtcatatgtttttctttgttttattcccgtgtaaaataccaaatgcgttagggttttttactgaccgccgccacagccactccattccaaaccaaaaatgcgagggagctggcccaggcttgggttcccggcgctgctcctgctcctccatctgctgaccggctcggatgccgccgtccggaatgggactgcaaagcgggaaattggcgattcccggggaagcagcggcacctgcgtcaaagggttcctgcaggagatcctgccactgccagcgacttgtccgcctgaggtgctcgggatgaggggcgccgtgtatatcctttacgacgtaaacatctccgagggcttcaacctgcgccgagacgtctatattcgcatggcggtgttcgtgcgccggctgcagaggagaaggcgctttcgccatgtgcgccttgtgctgccgccgtggccccgcctctaccactggcactcgcagggcctgcagcaatctggactgccctggagccacttcttcgacttggccagtctgcgtcgctacgcgcccgttctggactacgaggaattcctggccgaacagcgcttattcggcaatcctggcgcaccgctggtccatgtagggcacgctttccggttgcagcactacgaggtcatgctagaacagggcatatttcgggacaagttcgagcgcgtcacggacaagccgtgcagcgagggatccctgtcgggaggaccattgctgcagcaggcggagctgcgcgtggggcgtttccactgcgttcggttccagggcagcgccggactgctggagaagttgcttcgcgaggcgatcgacgaggacacggcgggaccggaggacgtcgacgacatgcgcacgtacgctttgctcagcgccgaaacggtgcttcacgaccactggggcgacgagcacttttggcaggcccggcgttccatgcgtttcgcccgtcggctcgaacaggtggccgccgacttccgacggcaggccctggacaccacagatgcttcggccggtgtccaacggcccgccatgtgggagctggagcggccgaagcgcaacgccaagggcggcgattacctctgcgcccacctaaggcggggcgactttgttcgctcgcgggatgcgaccactcccaccctgaaggcggctgcccagcaggtcaagcagctgctgcgcgggtttaacatgaccacagtgttcctggccactgacgccacgccatacgagctgatggaactaaaggagctcttctaccgcttccgcctcgtgcacttcgcgccggagtcgaatgtccaacgaagggagctgaaggatgggggcgtggcggtggtggaccagctggtctgcgcctacgcccgctactttgtgggcacctacgagagcaccttcacgtaccgcatctacgaggagcgcgagatcctcggctttacccaggccagcacctttaacacgttctgcaaggccttaggcggcagctgctcgcgcaacgccgtgtggcccattgtgtgggcggatggcgatagcgacagcgaggaagattccgacccgtactga

SEQ ID NO: 36192 - protein, 490 aa, DROSOPHILA
MRGSWPRLGFPALLLLLHLLTGSDAAVRNGTAKREIGDSRGSSGTCVKGFLQEILPLPATCPPEVLGMRGAVYILYDVNISEGFNLRRDVYIRMAVFVRRLQRRRRFRHVRLVLPPWPRLYHWHSQGLQQSGLPWSHFFDLASLRRYAPVLDYEEFLAEQRLFGNPGAPLVHVGHAFRLQHYEVMLEQGIFRDKFERVTDKPCSEGSLSGGPLLQQAELRVGRFHCVRFQGSAGLLEKLLREAIDEDTAGPEDVDDMRTYALLSAETVLHDHWGDEHFWQARRSMRFARRLEQVAADFRRQALDTTDASAGVQRPAMWELERPKRNAKGGDYLCAHLRRGDFVRSRDATTPTLKAAAQQVKQLLRGFNMTTVFLATDATPYELMELKELFYRFRLVHFAPESNVQRRELKDGGVAVVDQLVCAYARYFVGTYESTFTYRIYEEREILGFTQASTFNTFCKALGGSCSRNAVWPIVWADGDSDSEEDSDPY

SEQ ID NO: 36193 - DNA, 4951 bp, DROSOPHILA
gttccatggcctacatgcacaccttcagcccggacagcatgcgcgacgacgtgggcatcctttttctgcgcaccgggctgccgatgtctccaggcggtggtgtccatctcacagtggcccccatccagctggcgggccagatcacgccccccggcaagctgtgccaggtggccggctggggtcgaaccgagcaggtgagtcggatttgtagagccgtaggcaagccattgagcccgcagcttatctgactctttcccagagctccctctccaacatcctgctgacggccaacgtgagcaccatccggcaccagacctgccgcatgatctacaggtccggcctgctgcccgggatgatgtgcgcaggacgcctgcagggcggcaccgattcttgtcaaggcgactccggcggaccgttggtgcacgagggccgtctggtgggtgtggtctcctggggctacggatgcgcagagccgggactgccgggagtctacgtggacgtggagtactaccgccagtggatagagggacgcagcggggctccccattccaggctggctaccggactgttcctactcctgctcctgcccctgctgatgcggtgctcggggtcgtggctatagccaccatttcggcatccatgccagtgctttagtctatgtagtaactatgttctaaacaaaatattcataatacacattcacgtacaatgtagcgacagctctgaatctaagagctaccgtatgcaaacctatgtatgtatctatctttcgaatcacttttggtacctcgaatgccattccgcagctatcagttatctacaatctacaaatctggacggtttcgaaagagtcggataattacaacgacctcttcgtatcttgtcgtgcaatgaaacgctttccactcaacaatcaacatttatttacagcgaaacacacttagattcggaaacacgagtcaaggaacaaagcagggtgacttggccacgggcatggcacctaacagttgcggcagttgcgccgcgagcagggctcctctcgccgatcgtggaggcgcaccaggtcctccggctgaccgtaggcgatgttcggcaggcatcgcgactgggtcagtagcagggagaactcgcggttgcaggccgcgttctcgatccgctccatgacccggccaaccagcagctccacggcctccttgacgttggcgccggtgcaggcgctcgtctcgatgtacggcagccggtagcgtcggcagagggccgccacctggtcgcgactcaccacgcgcagctgcagcaggtcgcacttgttgccgcagaggaccacgtcggggtcctcggagtaggcgtgcgtccgcagctgcgacagccagttggccgtctccaggaagctcttctcgctggtcaggtcgaagatgagcaggaaacccatggcgtcgcggtaaaacgccgtggttagtgaacggaagcgctcctgtccggcggtgtcccagatctgcaggtggatgcggtggcggcgtccgcgggagttgtacagctgaaggatgcaaaaaaaagtgatgggtcactagggttcggaaatgatagtgatgtggttgcaaaatcctcgtgactctcaaaccgacttcactaggattgtgttggctatgttaggtgagtcccatgaaaaggatcacaggatgattagccgcttgaacttaccagccgcttttcgcggaagtcgatgcccacagtggagatgaactgggtgtggaaccggccatccgtgtactggtagaggagacaggtctttcccacgccggagtcgcccaggacgaggaacttgagcaggtaatcgtagtcgatgttggcgcccgtcataatggccgttcgtagcagcgcgtttggaacgttcaggaccgcagacgcatcccgtccgcctggaagcagggaaacgaatgagctgcccgttcctgtacagctctcccaagcaatggttgtcccccagctaccagcttcctgcctcctgcccctgctgtctatccactcgccactcttcctcctcttttgtgtaagaccgggcttaggctgacaggagcggaggcggggcactctaatcgggaggcatcttcgtgagcgtggctcccacccactgccagctgccacccccataatgcgacccacttacccacaccacaccatctcgctgcaccgtggcaaatatttgaaactcattaaatcccgatttattgattttctgtcccgttccgggcgaaattcgggcgtgtggagtgggttcgatgggtcgcgatggcggggaatccctttcgcccgcttccgcatcaatggacaagccgatcgagatttcgagcattcccgctggaagcggcgcccaacggtatgtcgctcggcagaacagagagagatgacaaggggcagtagaaaagtggaaagtggctggagcataggaaggctaaccccgcccctgccccgctaattagaccaacggccaacgctcaaaatgacgcgatgcggtgggcaggaggagagaacgtgcagcatctctgcaccctggcttccttcccgcgctaagcggattacggtcgctgcctgcggttgaagtggttgctagacaacggggcctccgtcactggaaagtaacaacagagatcgaagtaataactgggaccgcgctcccagtgcgccttctgcgcatcccgaatccggcagcactcaatggaatcctgcctgctgatgtcttgtaatctaatttcctcccgtttccggcagctgtctcacgtctccggcccctatttccgaatccgctgcctcgcagagggagcacgcataggttacagtcgtctgctgctcgccaagtctcccagggggagatggtaggcgggtggacagtggttggtgggcaaatcgaattagcatgcacgcacagccatagccatcccactcggctgacggttaattttaaacctttattgattcgcaagatcttgcggggctcaggtgggcctagcgacggaaatagcctcccgtttccgggggtggtgttcaacatgaggggggtgggctaaggcgagtgatggcaattaggagcaaaccacaaggcctccactcaaggacgtcctcccagcttccttccgccctttcagcgcgtccagctgcactaggacaaggacggcttccaattaaagctagaccgcagtgccgtaattagctgcagctgccgcgtttctgccgagcgattaaacatagccaccgccaccttagccccttagttcctcagctcacctgttcaccggatccggctaattgcagaggctcaggctcaggaggcgcggcacgcatttctgctccgacgcccgccgtcgactttggcgcccaaggcggcttctttcggcacgccgcacgccactcgtcactccaaggatctggaaggaatctgcgattcagctgactggaccagactgactgggcgggcaaccgttatttttagcgcgcgcaattcgtccgcgcgggggaagggaccttcaaccaccttgcagaggtttgctaaacgaaaacaagcgacccacgaggacttcgaaaactccgaggctgtgcggatgctgcggatgcaacgcagtggatcctctgggcggtgcgctgcccgacctgttgccatgcgctgcccagcacagactacagggctcgttggccgccaacaggcagtcccttttccgaggctcagctttcagccaaagcttgcgccagctttcaagcgcttccgcgcgcgacaggtgcgccgcacaggtgtcctttcccacgggaacgtggttatttcgtgagtacttcgaagcactctcgagacataatccctcgggcaactttaagaatggaacggctttggacggagcttccgcgggacggcgcctaagctttgctctccgacgaaggcttcaaagtcaggagtgtatcccgtgctcgaatagtccactgtttctataatcctagtgttcagcaatcaaatttcgtgttactaaataacactgagccacatttttcagtaaattgaagtttgcgcgcgcagagctatcgataagtatcgcgagataaaccagtgctgtaaagcgccgccatttaattgcacttatcgagtttcttgcgggctcgggatttgctttgttttttttttttgaatcggtgcggaaacttctcggttgaggttttattctctatttactggccatggacaacgcaagctcaacttttggccagtcggacttcgactgggacgccatcaacgtgggtgactaccagttggatcactcccagaactttttcggtgcgtatccaggccaccgcgtccaagctgagaaaacgcgccatttttggccgaccattgctgaccatttcccgcatttcccagcagcacgggccaacaaggagaacaacaggagcctcagcaatgttaaccccctcctgctgtgcaccactccgcagaagatcggccgggaacagcgcgatggtgacttcgatggcaagctgattagtgctggggatctcaagaaggagtcccccaaagacacgacagaggcgtccaaggatgcactcactatcaagcccaaagttgagccccacgatgtgccagaactcaagttgaaaacagagctccaggagctggctcaagtgtccccacttgacaacggcccagagccgcaggacgacatcaaacaaattgttccgctcaactggggcaaggatggggacgatgatgagaagcacatgacggaggccgatcagcacttggtccaccaggaacgtcctcccggcgtcggggccaagctccgcctggagtggtcacccccacgccaccgcgagcacgagggagccggcgcctctgccacatccgccgcccccaaggcataccagttcaaggacgtgtacgagagcaagcggcagcaggcgatgcgcaagcgctccg

SEQ ID NO: 36194 - DNA, 1365 bp, DROSOPHILA
gcacgggatacactcctgactttgaagccttcgtcggagagcaaagcttaggcgccgtcccgcggaagctccgtccaaagccgttccattcttaaagttgcccgagggattatgtctcgagagtgcttcgaagtactcacgaaataaccacgttcccgtgggaaaggacacctgtgcggcgcacctgtcgcgcgcggaagcgcttgaaagctggcgcaagctttggctgaaagctgagcctcggaaaagggactgcctgttggcggccaacgagccctgtagtctgtgctgggcagcgcatggcaacaggtcgggcagcgcaccgcccagaggatccactgcgttgcatccgcagcatccgcacagcctcggagttttcgaagtcctcgtgggtcgcttgttttcgtttagcaaacctctgcaaggtggttgaaggtcccttcccccgcgcggacgaattgcgcgcgctaaaaataacggttgcccgcccagtcagtctggtccagtcagctgaatcgcagattccttccagatccttggagtgacgagtggcgtgcggcgtgccgaaagaagccgccttgggcgccaaagtcgacggcgggcgtcggagcagaaatgcgtgccgcgcctcctgagcctgagcctctgcaattagccggatccggtgaacagatgacgggcgccaacatcgactacgattacctgctcaagttcctcgtcctgggcgactccggcgtgggaaagacctgtctcctctaccagtacacggatggccggttccacacccagttcatctccactgtgggcatcgacttccgcgaaaagcggctgctgtacaactcccgcggacgccgccaccgcatccacctgcagatctgggacaccgccggacaggagcgcttccgttcactaaccacggcgttttaccgcgacgccatgggtttcctgctcatcttcgacctgaccagcgagaagagcttcctggagacggccaactggctgtcgcagctgcggacgcacgcctactccgaggaccccgacgtggtcctctgcggcaacaagtgcgacctgctgcagctgcgcgtggtgagtcgcgaccaggtggcggccctctgccgacgctaccggctgccgtacatcgagacgagcgcctgcaccggcgccaacgtcaaggaggccgtggagctgctggttggccgggtcatggagcggatcgagaacgcggcctgcaaccgcgagttctccctgctactgacccagtcgcgatgcctgccgaacatcgcctacggtcagccggaggacctggtgcgcctccacgatcggcgagaggagccctgctcgcggcgcaactgccgcaactgttag

SEQ ID NO: 36195 - protein, 249 aa, DROSOPHILA
MRAAPPEPEPLQLAGSGEQMTGANIDYDYLLKFLVLGDSGVGKTCLLYQYTDGRFHTQFISTVGIDFREKRLLYNSRGRRHRIHLQIWDTAGQERFRSLTTAFYRDAMGFLLIFDLTSEKSFLETANWLSQLRTHAYSEDPDVVLCGNKCDLLQLRVVSRDQVAALCRRYRLPYIETSACTGANVKEAVELLVGRVMERIENAACNREFSLLLTQSRCLPNIAYGQPEDLVRLHDRREEPCSRRNCRNC

SEQ ID NO: 36196 - DNA, 3702 bp, DROSOPHILA
cgggcgttgaatgagtcaggcggacagtcatccatgcatctctccgagtggccagagacaaaggttgcgtacgccaggttcagtcgcaattagaatgcactacagcagcaatcaacacatactcatcacctttccactgcaccagaccgccgacgaccaatgtgtacatttcaatgctaatccgtgttcctttccgcctttgccattgcagcaagacgaacaacggaagcgatgcgagcaggaggagattaaggagctgcgcaagatgacggcattcaaggctcgtccgaatccatttaaatagtgctcgacggaaccaatcgactaccaaacgtttgatagccctgtccaaatttaaatgaagtgaagtcgatgctacacataatcgtgtttaccgatgcatagttttaccagattaacacaatttttgtctcttaacattaacattacttttacgcatatatcgttcccgtttttggcggataagaaccactaaaatcgtatgtttggcgagaggataaactatatggatatgtatacaacataagcaatttgcaattgcgatcattaactgttttctatttgtacaaagcccaaaaaacaataaattaatactgtaaattgaacaagactgccattcgtatgcatggataatgcatatgtatgtacatacatatgtacatatgttcatacatatgtacatatgttcatacatatgtacatatgttcatacatatatcgtccgcccttctctgcagccagaatggaatgcaacagcgagagctgcctgtctccctctaatctgggcggggatccgtaagaaaatttgtctcatttcttttgaatggttcctattttctcagaatttctggcactcacagtagagcccagctatggaaatgcgttagatcgcttcgatactagtaaatatatcgtgcataataaggtggaagcacgtgatattgggctacgctatgcagaaaaaaaaaacgaggtgtttagatataaacagctgtttatttatgccgttgaaaaggctcctgacaaaacgctgtgctgatgtagtgccatctgtggcccggacgattccttagaactggccgtcgctaccccaggaggtcttgacggtgtcctcgttccaatcctccactccgccaacggtctcggcgggaacctcatcggcccagttggtggtctcctcgacccgggtggtcgacggccctcctcaatcttgggtggcggcaacagctcccttggcggcggcctcctccttctcggcctcctcgggatcgcgggtagaagaacagatcgacgactacgggccactcgacgctgcgagagatggtgccacgcaggcggagcacttcgcgggccaacagccaccacatcagaccgatagagtgggccgacttgttgttgcacggaatggcaatgtcgatgtagcgcagaggcgagtcggtgttcgtgaaggcaatcacggggatgttcacgtagctggcctccatgatgggctggtgatcggtgttggggtcggtcaccaccagcagacgcggctcgcggaaagcgggctggatctggttggtgaaggcaccgggcgtgaagcggccggcgatcggagtggtgtcggtgtacttggcgaacttcagcaccgcgcgctggccgatcggacgcgacgagatgacgaagatctgcaaaataagtgtgtattagaatatggtgtatctatcagagactgggggcaaacactccgaggcgttgaggcgtggctggtcagcagtgaagttgaaatcattgaatttcatacccgaaagattagtaataaactcatcacgctagccacgccgcactggtatgccatggaattctgcacttgtactcacgtccgaggggttatcgatggccacgatggcgcgggccgccagctgcagcttctcccaggtcttgcccaggttgaggatgttgacgccatcagcgcggcgcttgtacacgtactgctccatctggaagttgacgttctcggaacccagatgggtggtggccaccaacatcttggtgatgtcgtcctccttgagggacagaatatctaagcctcccgacatgttaacgtggaaagagttacggacctgtgaacgagacaggcatatggttagtggacataacctcaaagaaggggctccacgtgcgacttttcgccggtgtcgcgcctgccgccagaggcgtctgcacatagaggcagcagtcacaaggcaagaagttggatgcgcccaggcgaaaccgatttcggagtaacatcggagcaccgcggcacatctagagacctggcgttcggaatttcttgcctagatgcctagggcgcagtcgttgaattttgaaggcacccggagtgcgttcaggcgtcgcgtgttgcaggcggtactcatttcgcatgtatttctaagcatttcggaggagctcggactacttacgtctagatgccgctgggagttttgacaaaatggccgatttccgggttgaagttggcgacgttggcatgcagagaatcggtgttgcgttcgcgttaaacggtttttttccgtatcgcgacgcgttccgactttttcggttttttcactccgacgcagagcggtcacactgagaatcagtctatcgaaattttcgcggaaagtgtatggattaaagtgcgcggacttttcccgggccatcggtagaatcgtggtgagtttcgcagttcaaacgagggacggcgaatgatttcatctatctgtggtaagttcggcaatcagactttataccattcccatccattcccaatgacgcaacgcaataccttttgtatacacatttattgcaagtttgtttatattttaattacgtgtatgctcctcgccatctgtaactaccacaacaatgtacgcatattccatttgcttagattagtacgtgaaacgcttcttctctcgatccgcttgcgtggttaaaaaattgtgttgtgttagtaacttgaaatacgatcggtcgtcgtgccgtgccgttccgtcccgttcctatccctccttcgctcagttgctggctggggacaggagttggcgaccgacttttgttttgtttttggattgcgattcgaattctgtcccactttatgcgttatgcgttatgcacggggaggtgtacatatcattgcgtttaaaaattgattcgacttcaattgatgcttgtgatttggtttctgttctcctcagcttgctacatatgtttaacatctaacaaaatgcactcgttattcgtgttggtgtgggtgtctggacagtgtgactgtgtgcacgctcgttattcgcactcgtaacttagtaacattaataatatattaaaaaaaaacatctttttgtatacataaacctttttttgaatgcttttatcatttgtcgtgatgtttagcttattttctttgggttttgttttaaattactaactacttatataatgtaatgttaacttgttttacttgttttaatttgtccgtaaaggttttgttttcacttctcttctccgttctccccatcctcgacatcctctccattctattaaaactattttgttgtctgcaacatcattttccagttttcgatttggctttgctttggtatcgactcgctttgtttggtagtattcgtataataaatttgaacaatttgtcttaaaaaa

SEQ ID NO: 36197 - DNA, 1168 bp, DROSOPHILA
atggcccgggaaaagtccgcgcactttaatccatacactttccgcgaaaatttcgatagactgattctcagtgtgaccgctctgcgtcggagtgaaaaaaccgaaaaagtcggaacgcgtcgcgatacggaaaaaaaccgtttaacgcgaacgcaacaccgattctctgcatgccaacgtcgccaacttcaacccggaaatcggccattttgtcaaaactcccagcggcatctagacgtccgtaactctttccacgttaacatgtcgggaggcttagatattctgtccctcaaggaggacgacatcaccaagatgttggtggccaccacccatctgggttccgagaacgtcaacttccagatggagcagtacgtgtacaagcgccgcgctgatggcgtcaacatcctcaacctgggcaagacctgggagaagctgcagctggcggcccgcgccatcgtggccatcgataacccctcggacatcttcgtcatctcgtcgcgtccgatcggccagcgcgcggtgctgaagttcgccaagtacaccgacaccactccgatcgccggccgcttcacgcccggtgccttcaccaaccagatccagcccgctttccgcgagccgcgtctgctggtggtgaccgaccccaacaccgatcaccagcccatcatggaggccagctacgtgaacatccccgtgattgccttcacgaacaccgactcgcctctgcgctacatcgacattgccattccgtgcaacaacaagtcggcccactctatcggtctgatgtggtggctgttggcccgcgaagtgctccgcctgcgtggcaccatctctcgcagcgtcgagtggcccgtagtcgtcgatctgttcttctacccgcgatcccgaggaggccgagaaggaggaggccgccgccaagggagctgttgccgccacccaagattgaggagggccgtcgaccacccgggtcgaggagaccaccaactgggccgatgaggttcccgccgagaccgttggcggagtggaggattggaacgaggacaccgtcaagacctcctggggtagcgacggccagttctaaggaatcgtccgggccacagatggcactacatcagcacagcgttttgtcaggagccttttcaacggcataaataaacagctgtttatatct

SEQ ID NO: 36198 - protein, 330 aa, DROSOPHILA
MAREKSAHFNPYTFRENFDRLILSVTALRRSEKTEKVGTRRDTEKNRLTRTQHRFSACQRRQLQPGNRPFCQNSQRHLDVRNSFHVNMSGGLDILSLKEDDITKMLVATTHLGSENVNFQMEQYVYKRRADGVNILNLGKTWEKLQLAARAIVAIDNPSDIFVISSRPIGQRAVLKFAKYTDTTPIAGRFTPGAFTNQIQPAFREPRLLVVTDPNTDHQPIMEASYVNIPVIAFTNTDSPLRYIDIAIPCNNKSAHSIGLMWWLLAREVLRLRGTISRSVEWPVVVDLFFYPRSRGGREGGGRRQGSCCRHPRLRRAVDHPGRGDHQLGR

SEQ ID NO: 36199 - DNA, 6767 bp, DROSOPHILA
tgtacatatgttcgagtgttttggcaaacaatttaggacactcccgtagcccaaacctaatttggagatcttgagaactttcgttgtctctgttttggtgcggcggaaaactggttaacatgaaagccaaaagtcagcacgtggaacgtgttctgcgaaaaaagcattcactgccattcataaggatgagcagcccccctgtggctgtgcaccttcgccacctgcacgatgcaggatgcacggaggagaaggagcggggaagatccactccgaggtccacaacgaaacattggcgggaagcaaaagccgacataaataaccattcgtggcgttggataaatcttggcacgccataatgcacacaacagaacctgagcaggatggaggacgaaggactaggacaccgtacagcaggcacgcaaccgcatagaacaacgctccacctgttcgaccccgcccaccgccccatgccaattcggcgaaacaggtctcggactgtttacctgtcagtaattaatgcaaatgtctcctggcatccgagctggtacggtggacgagatttgggatacaggacacacaaaaaaaaaaaaaaaacccttgacgtgggcttacaagaataggtggtatcagagctttctggcccgaaatataaaacgttatacttaatgcaacaaagaacagatataatcgctgaactttgcacacaaccactgtgtgacaccacaaaccacactgccaaacaaaggaatcgagcaggagtccagagcagctcaaccggcaagtgttcgaatcagagaccaccctggaaaacaaggtgcacatacatagtaaagtacctggaaactcagacttttttccctaaaatatgctgtattcgaggaaaaagtggggtaatgagtttctagtgaaacgcaaaaacatccagacccattaaagttggctgatcagaattgagtacaccttagtcttttgccccagagcaccatcgtcctgcacagatttataatccgcagtccgcagggccctttgaatggcatccaccccacagtaaagcaccacaaagtcgtcctaagcagtgagcacctggctcggagctgggttggcaggtggtggagcagcacagataaaggtgttggccggccccacacaaaactggactggtgttgccgggcagtgggacggatgcagagtgattgactgactgcctgaccattggaacttgcggtggaggaacaggaggaggagtgcggagcttggcgatgccaatggagatggaaacgataatggggatgctggctgccagcttctcactgctggatgctgggaaccctgatccgttaattgctgcccctgttggcaaggggttgcagctggacgggcaactgtggacggtcgtaaaacgttcccacatccgattatctacccggcgcccgacccattgtggacgatatgcaaatggacagacccatacaatctcgcaaactcacagtcacttgacacaaaggcacggctccattgccactgccctcctgtgctggcatgaatgacaacaggaactgccggaaattgtgctataactaaagactataaccaaggactctttccccgcccgtgtttgtgggcatggggagtgggcagtgggcagtgggtagtggggattgttgacttggggggctggtgtgtggtatgggctccagaccgagtctgtatgctgaatcaggaaccgagataaagtaatttaataaagtcatttccatatatttatattagagcagaaaccagagaaatgccccaaggggcgacttggatcgctgtagcagctgctcggcatcattagcgaggccagtaacgagtctcgttccgctccgctccgctccggaaaaagaaccgtgctggaatgttatcctaagcaattgcttaatttaattactgccacgggaggaaggaattaggagtgaggaatcgttgtgcaggggatcgtgcaggaaaaggcatgcacaaagaaaacttaccacctgtatagatcttgggcgctggcggcgagactcaggttgcccagcagtggcggccgctccttgagatgatggtggttcagcaggtccgaggaggaggccagcctgcagagagacgtgtgtatggacacattgttagtctagctcactatgatgatggtgtgttggtcgtgaacggtgttctgcggatgcggagcattgttgaacacttacacttacctcaactgcggcgccttgatgccatgcttgtccatgaccttctccagctggcggacgcggaggcgagacatgtccagctcgtgcttgaccttccataggtgtgtgtcgcagatagggtcgttgcagcggtgcttcttcaggatctcggtggcctcgaagacggcaccccgaaaggtcagtgacttgcccatggacagcgagatgagggcgcagcagtggccgccgtccttcttggccagccgcttgcggatgtacttaaaatagacgtgctcgagcagcaggaggagcgccgccagcaggatgccggccatcaggagcaggaaggctgacaagaactgctccagtgccagcggatccgaggatttgtgctcctgcttgcccggacggcacgtgcccgtcatccagtagcgtcgcagccgctccaggtccccgttcgctcggaactcgagcagccgcttgttgaacatctgcacatactttgagttgcggctgaatgccagcccgtaccctaaagcgaatggaatatatttatttcaacatgactttgccgctcatacgctcatatcttctatcagtgtattccacggaaacgaaaactacttcggccaacgttgaacgttatattacaaatgtttttaatgagccaagtgagtgttggcagcaacagtgaaaagtttcccacccatacttgacgcgctttaacttttagccaagtcgttttcacagttttacagtttacgagctgatggaaactgtgtgcggctggcaactaatttaataataacttcaaatgacaatctaatgcccgtcagagagcaaagaagtttaaaatcacatgctgcaaaggagataaagatggaaggaagtgcttacccgtcatggcataccagctgcccacggtcatgagccggcagtcctcgtcctgggcaaccagatagtccagcactgtgccatcgtagatgaaggagtctaagttgccgttgagcacggcggccactccatccgctacgctcgtcttgttgtacctgcgagagatggaagatcagtgtggaaccaagcccactctacgccctgggagcaactcactgccgcatgtagttgtgcatgacgttgaagtacttgtggatggtcgagtctgtgtggctgtacgggatggtgccgaacttgaaggagggcttgtgggagaagggatgcaccagacggctgtcgttgagaccgctaaactcgtggaactcctccctaaaatgtggacagtgatagtaagtcagatattgagtccgagcccgaagactccggcttacctcgttatcatgaaggcggccaggttggcagtgtatatggccaaaaataccacagcgaagagggcccacacattggtcatgaagcgcgaagtgaaacctcgcggcgagtccacatggacggcggcctggaagagcacggcccaaaccagccagtaggtgcgaaacagggagaagcggtacggagtcacgttggtgttctgtaggtagagcttcatgtcgtagccgctgggcgagagccactcgaagaggaagatcatgaaggtggccgcctggatggccactatacccacctgggcgcagagaaaggaaaagaaggggaagcaaggagcaaggacacttaccagtgagaaggctggacagagctcggcttcagagggtgctacttaccagcatccaagaggccgtgtcgaagggctccagaaaagccgtgggcgagatgatgccagtgcgcttcgccaccacgatggcgatgccggtctccataaagggctcagagaaatcgacgaccgcctcgcgttccgtgttgatcatcagcgaggtgaggaccatgtctgtcttgcggttgaccaggtcggcgatcaggccgttccacttgccattctcgagggtaccccatttaccatcttcgacccgcaccagctcgtaggtgaagcccagctcctcggcaaacttctccagcaggtctatgcagaagccgctacagcactggtagaaggactcgttgcggtgtgcctggcccacgtcgatgtcggcggccatctcgtggtcggccgccacccggcagagcacaccacggtccatcaggcacttgccactcaccgggtccgcaggcgacagattgatatagggtgcctcttcgaggaatgtgatcttcaaatggaacttttccggcacgccctggggcggggcgtgcgagttgccgggccacgcaatgtcgcggatgtccagcttctgtgtctcccaggacttccacactccaatctgccccaattggagtcgtggttcagatcagcaaaagtacaaagcggtgcgagatcgattgatcggtgcgggatcagattgggtcgtggatcgtggatcgtggttcagagtggatcagagtggatcagaatggagcgggaagagtgagcgtgggaagagtggcaaagtgagaaaggactgagaaaaagcatgcaagcaacgcccacttacctcttcccacacaaggttcttgttgttggcgctgggccggaggttcataatcttgagctccgccgagcgcaggtccccgtccgccgtgaactcgatgttcggcttgttgaggtcgccctcgattgacacgttgcgcaagtacttgaagaagctgggaaagagaccgtacgcttaatataaggcccggtgctcattttgactacaagattcttcactatctcaatgaggatgctcttctgtttcgtccttcacttcacctaaatctaaaccctatgacggatcgtttcggatgcaagcatgcagagcacacagcatttggatctccacttacatttctccgttgtcccagcgaccgcgtccctcgtcctcgcaagacaaagactgggtggtgaggcggcggtcacggttagccggatccgttaggtaggcctccacgccgtagctgtagatctttattgcgttggatatctcgttcatgagagccgcactggaggtgtcgaagtgcacgccaagcatgccgactgggaactgggagtgggcgtccttcttttctatgaccgactggctgactacccagacgtagttttctccggtgagcttcatctcctcagcggcgcgcaggatggtgatggcctcggtctgcgtggcataaagcagcatcacccgggcctcactgttaacaagctccatgaggtcgcttgtgcgggtgaccacgatcgagtttaggatagtgaacttgaagtgctcctgcatctcagccacacgctcccgcacagcctgcacaaagtcatcgtggccggctatctgcgacgtgaccaccgagaactggtgccacttgtagcgctccaggatgctcagcattgcggcgctttggtgctcgatgcttggagccagctgcagctggagcgtcgattgcgaggcccgtcgttccagacccgagttgtcggcgttccacgagataaccgggatgcccaggtagccggccagctgcaagaagtactgcgccgaggccgtgctgtgcccgaactgttcgttgttcatcatgtacaggattgcggagacgttcacgcggaggaactccttgcagagtgtgcttagaattgctggcggacaaagagatagataagagataaagagatcatgggcgcctcgtagtagtttggttttaaattcagaaagaactggattcccaacgaaacacatttgcctgcggctccctcagtgcaattcgtccgtgctcatttgcttacctgaccgaccaaaccaaccaaaaaccgtttcagccccagctgttgatcccgattccaattccaaccccagtccctatcccccattccaatcaaaatctcaatctcagctcgtgcgtgtcttgtgtacagatgtgtggcaattaattgcagattagccaccttccgaacttgttttacgattgggtggcgctacccggtagagtgggagccttttattggttgtggccaacgcaagtatacggtgtgtgggtgcctacggcggtcggggcacattgcgcggtctctgttcagcctactaaccaagtgaccttttttttttttttgaggaattgcgaggcggttcttcatagtcacatggtaattaatccatatgcaatctcaaagaactttaaggatagcggtgcgtgtgggggactgggtgccgtgatttggcaaccgatgccattgttcaccaatgactatagacaatttcggaagttttgcctgcctggaaatcaatgacaagacattgtcaagtcctagggaacttgcgataccctctgttcgcccctcgccgccgtaggactgtcagtcttctgtcaatgctttggcaaaatgtgaaatctcatcaaaaagtttaattaactttttcatcactttacttctgctatctgcattccatcgctactagagggctacgatgtcggatctcagggggggagggggaggaggtgttggtggtggtagctggggtctgctaatttttcatcctacccgcagacgtcttgcagtatccctgcattcaattaccattt

SEQ ID NO: 36200 - DNA, 3094 bp, DROSOPHILA
atgatgaacaacgaacagttcgggcacagcacggcctcggcgcagtacttcttgcagctggccggctacctgggcatcccggttatctcgtggaacgccgacaactcgggtctggaacgacgggcctcgcaatcgacgctccagctgcagctggctccaagcatcgagcaccaaagcgccgcaatgctgagcatcctggagcgctacaagtggcaccagttctcggtggtcacgtcgcagatagccggccacgatgactttgtgcaggctgtgcgggagcgtgtggctgagatgcaggagcacttcaagttcactatcctaaactcgatcgtggtcacccgcacaagcgacctcatggagcttgttaacagtgaggcccgggtgatgctgctttatgccacgcagaccgaggccatcaccatcctgcgcgccgctgaggagatgaagctcaccggagaaaactacgtctgggtagtcagccagtcggtcatagaaaagaaggacgcccactcccagttcccagtcggcatgcttggcgtgcacttcgacacctccagtgcggctctcatgaacgagatatccaacgcaataaagatctacagctacggcgtggaggcctacctaacggatccggctaaccgtgaccgccgcctcaccacccagtctttgtcttgcgaggacgagggacgcggtcgctgggacaacggagaaatcttcttcaagtacttgcgcaacgtgtcaatcgagggcgacctcaacaagccgaacatcgagttcacggcggacggggacctgcgctcggcggagctcaagattatgaacctccggcccagcgccaacaacaagaaccttgtgtgggaagagattggagtgtggaagtcctgggagacacagaagctggacatccgcgacattgcgtggcccggcaactcgcacgccccgccccagggcgtgccggaaaagttccatttgaagatcacattcctcgaagaggcaccctatatcaatctgtcgcctgcggacccggtgagtggcaagtgcctgatggaccgtggtgtgctctgccgggtggcggccgaccacgagatggccgccgacatcgacgtgggccaggcacaccgcaacgagtccttctaccagtgctgtagcggcttctgcatagacctgctggagaagtttgccgaggagctgggcttcacctacgagctggtgcgggtcgaagatggtaaatggggtaccctcgagaatggcaagtggaacggcctgatcgccgacctggtcaaccgcaagacagacatggtcctcacctcgctgatgatcaacacggaacgcgaggcggtcgtcgatttctctgagccctttatggagaccggcatcgccatcgtggtggcgaagcgcactggcatcatctcgcccacggcttttctggagcccttcgacacggcctcttggatgctgtgtccttgctccttgcttccccttcttttcctttctctgcgcccaggtgggtatagtggccatccaggcggccaccttcatgatcttcctcttcgagtggctctcgcccagcggctacgacatgaagctctacctacagaacaccaacgtgactccgtaccgcttctccctgtttcgcacctactggctggtttgggccgtgctcttccaggccgccgtccatgtggactcgccgcgaggtttcacttcgcgcttcatgaccaatgtgtgggccctcttcgctgtggtatttttggccatatacactgccaacctggccgccttcatgataacgagggaggagttccacgagtttagcggtctcaacgacagccgtctggtgcatcccttctcccacaagccctccttcaagttcggcaccatcccgtacagccacacagactcgaccatccacaagtacttcaacgtcatgcacaactacatgcggcagtacaacaagacgagcgtagcggatggagtggccgccgtgctcaacggcaacttagactccttcatctacgatggcacagtgctggactatctggttgcccaggacgaggactgccggctcatgaccgtgggcagctggtatgccatgacggggtacgggctggcattcagccgcaactcaaagtatgtgcagatgttcaacaagcggctgctcgagttccgagcgaacggggacctggagcggctgcgacgctactggatgacgggcacgtgccgtccgggcaagcaggagcacaaatcctcggatccgctggcactggagcagttcttgtcagccttcctgctcctgatggccggcatcctgctggcggcgctcctcctgctgctcgagcacgtctattttaagtacatccgcaagcggctggccaagaaggacggcggccactgctgcgccctcatctcgctgtccatgggcaagtcactgacctttcggggtgccgtcttcgaggccaccgagatcctgaagaagcaccgctgcaacgaccctatctgcgacacacacctatggaaggtcaagcacgagctggacatgtctcgcctccgcgtccgccagctggagaaggtcatggacaagcatggcatcaaggcgccgcagttgaggctggcctcctcctcggacctgctgaaccaccatcatctcaaggagcggccgccactgctgggcaacctgagtctcgccgccagcgcccaagatctatacaggtgttgcccgtccagctgcaaccccttgccaacaggggcagcaattaacggatcagggttcccagcatccagcagtgagaagctggcagccagcatccccattatcgtttccatctccattggcatcgccaagctccgcactcctcctcctgttcctccaccgcaagttccaatggtcaggcagtcagtcaatcactctgcatccgtcccactgcccggcaacaccagtccagttttgtgtggggccggccaacacctttatctgtgctgctccaccacctgccaacccagctccgagccaggtgctcactgcttaggacgactttgtggtgctttactgtggggtggatgccattcaaagggccctgcggactgcggattataa

SEQ ID NO: 36201 - protein, 604 aa, DROSOPHILA
MMNNEQFGHSTASAQYFLQLAGYLGIPVISWNADNSGLERRASQSTLQLQLAPSIEHQSAAMLSILERYKWHQFSVVTSQIAGHDDFVQAVRERVAEMQEHFKFTILNSIVVTRTSDLMELVNSEARVMLLYATQTEAITILRAAEEMKLTGENYVWVVSQSVIEKKDAHSQFPVGMLGVHFDTSSAALMNEISNAIKIYSYGVEAYLTDPANRDRRLTTQSLSCEDEGRGRWDNGEIFFKYLRNVSIEGDLNKPNIEFTADGDLRSAELKIMNLRPSANNKNLVWEEIGVWKSWETQKLDIRDIAWPGNSHAPPQGVPEKFHLKITFLEEAPYINLSPADPVSGKCLMDRGVLCRVAADHEMAADIDVGQAHRNESFYQCCSGFCIDLLEKFAEELGFTYELVRVEDGKWGTLENGKWNGLIADLVNRKTDMVLTSLMINTEREAVVDFSEPFMETGIAIVVAKRTGIISPTAFLEPFDTASWMLCPCSLLPLLFLSLRPGGYSGHPGGHLHDLPLRVALAQRLRHEALPTEHQRDSVPLLPVSHLLAGLGRALPGRRPCGLAARFHFALHDQCVGPLRCGIFGHIHCQPGRLHDNEGGVPRV

SEQ ID NO: 36202 - DNA, 2525 bp, DROSOPHILA
aatttcgatatgccatcaagtccgcccttgtctaacccctcaccacatccatatgcacatggctgacccaggcgcaatcactcttggccatgcccactgcccactttcaacatggtcctagttctggtcctggtccgtggcagttgcatgcggcacagagaatgcaatttgtagacatggacacttcgagcgcagccttttgatatgcaattttgagcttgcaaaacggaatctgggattcgggattatgcaatcaaaaaaggaagcagggcgaaaaagagtgggcataaattgttggaatcacatagggcactgggcaagcctgttgcaggaataagtgaccgacctagcagccctgctctgcttaaatgtgccacatgcacaatggcacctgaaaaacgagttgtcactcaaccagagcagaaaaacgtaactcaccgcgaatatgcttctggctgtcctggcaaccctgacaggggcttgcccgcagatttcaatgctaatgatgcgtttctaacttgcagttatgtacttggtcattctgttacatatccattggcaacactacacgctcgctttcaagccaagtcgttgacaaccatgccgcaaagcgtcgacaactctgcacgcgtttaattacagcctggattggcctggtcatttatttatgtaggccgcgttcactcggccattaagtatatttcttcgttttctcattttcgttttcatgatcattttaatttttattcacgtttccgctttattgcgtcgtcgtgagtggcaaagggggttaagcgcttaagaagctctaaatgaacggtcattaaaaatgcgcacgcaatcaagagcccaccaggtgtcggcgcccacgacctgtaagctgtgagctgtgagctgtgagctgtgagctgtgagctgtgacccgtgacctgtgacctgctcccccgtggtcacaataagcgtcagtaagctaattttgcgctcgagtaacaagaagtacctacataattggagaaaaggtgctttgtgtaggaaactcacccgtcgggctgggcgtcagcgacatcatgtcgaagtggatgttcttctgctcgaaggagtagtccttgaggaaggtcagcttggcgccgcgcgtcttcgttaatcctgtgaccgcgttgttgatgctgcgcaggtactcgcgctttccgaagtttgtgtgcggcgcgatcaggccgatgttgagctgctccttgttggccgccgcgcccttgctcaggctgccgcctccgttggttagtcggaggccctggcaggatctggtgtccaggatcaacagggtcaagactgtgaggaggagcagcgagatgggcccgcttggaggggtgaggattcgctttcgtctacttgttgtgctattgtgctggcagctggcagtgttcaaagtggcgattggcgtatgctttcgcattgtggtaggcatgggcgtgggcgtgggcgtcggtccgtccgtgccgcgtttcagtttgacgcgactgggcatcatggctcgtggactattagatcctgaagttcgctgggatccggtgctcagtgctccggtggtctctagtgcatctggccgggatgcaagtgtctgggatgtgctattgtttggattgtggatggattccgttttcctgaacaggctgggtccgctctctggccgcttttccctctgttcgcttccccaggcagttgatgggcttgtattgactgctgcgcattgctaaagtcaaacgggcaacagaagttgtgtacagtacatgtaaccacccacccacgtcaacaaatacatatgcacactctcacacttgcacacatgcacacatgcgcacacctaggcagcaacatctgcagcagcaatggcaacactcgtcgttgacggtttccgccatttccgtttccgctactaatttgttatggccggaaaaggcaccgtggagtcgttttcgcgcatcgcaaaacttggcacccctctgcagggaatgtcgtgcgcaaccttttcggatccactgtgccgaacgtgccgcctgctggtcgccggcgaggcattccacctctatcctcatcgccctggactgaataataagagggagcagtataactgcctttggaatgatgagaactcgggggattttatcaactggactgctcaggtattgtaataggtgtcttgcattaaattctgggtacaatggaacgaagcattgccagcagcagtgaaatgacttccgaacaactgtggcagcgcagaaatgtatgctacacagatgtcagatattgtttcccagctcccagggtactcagcccttcgatgccccggcttcccgcccacacagtttttcactcggattcaatttgagcgcagcttgccattctacataaattaaatgcgacattggtccgcataatcgctgctctggcacacactctcgcctccgccagtgcctctgcctccaggttcccgtttcctgattcaggcaacacccaacacccaaccccaa

SEQ ID NO: 36203 - DNA, 525 bp, DROSOPHILA
atgatgcccagtcgcgtcaaactgaaacgcggcacggacggaccgacgcccacgcccacgcccatgcctaccacaatgcgaaagcatacgccaatcgccactttgaacactgccagctgccagcacaatagcacaacaagtagacgaaagcgaatcctcacccctccaagcgggcccatctcgctgctcctcctcacagtcttgaccctgttgatcctggacaccagatcctgccagggcctccgactaaccaacggaggcggcagcctgagcaagggcgcggcggccaacaaggagcagctcaacatcggcctgatcgcgccgcacacaaacttcggaaagcgcgagtacctgcgcagcatcaacaacgcggtcacaggattaacgaagacgcgcggcgccaagctgaccttcctcaaggactactccttcgagcagaagaacatccacttcgacatgatgtcgctgacgcccagcccgacgggtgagtttcctacacaaagcaccttttctccaattatgtag

SEQ ID NO: 36204 - protein, 174 aa, DROSOPHILA
MMPSRVKLKRGTDGPTPTPTPMPTTMRKHTPIATLNTASCQHNSTTSRRKRILTPPSGPISLLLLTVLTLLILDTRSCQGLRLTNGGGSLSKGAAANKEQLNIGLIAPHTNFGKREYLRSINNAVTGLTKTRGAKLTFLKDYSFEQKNIHFDMMSLTPSPTGEFPTQSTFSPIM

SEQ ID NO: 36205 - DNA, 2471 bp, DROSOPHILA
ttctctttccttgactgccccgggggtagtgctccggttaaatccgcatacacttgccacaaacatgacagacttcaatcccccccgacccgcaaaacacccactaccccgtgctttgtattcaaattaagtacgtgccggaggcaagtgcacaaatagcgaaaatagttggctgccatcagcatttctgtccgcttaatcagccacggcgctctgggccagtagggttcactgcgcaggttggtgggtgtgcatgtgcaggtgggtgcacggttgatgtctcccggtggtgacacgttcctcagtggccatgcaacttatgacttgcccatgacagctacattgacggctctgcacaaagcaggacgggctcaaagatagcagcaagaaagagagcagtccgatgtgcttgtcagcttctgtttggacagtcagcctagcaggaaggtctcacctgagccctaaagaggcaaaggagaagggcagtggagcgcagcgggcggaggaattgactaactgccctcgacagcacgcacacgccagcagacatccccatcgcctcctttggcctccttcctaatgcctcgctttcttttgtgctgcccagatttttcagcctttgaccaagggagaaattactcaagaccacttctaatgtcccctagcagctgtggaggctatctcaacatcgttatcatcgttatcccaatcgaatagggagcatcctcgcccaagctcattatatttgattcgatttcgttgacagcagacttccttccgctccaagcagcttcctgtcaactctgcaactccgtattaggtttcgcctctttgcgcctatgtacatacgtgtgccgcaacggagatgcgtcatccaacacgcccacacgcgcccaattaggcccaagtcaaaacaagatttgcggcgattcggttagttgttttttatgccaagttcgccatgacatcagcacgaaaaccagcgccaagttgctacacttcaatccgcctgtgtggctgggacggccttgactttggccttctccagtttctgcgtcttcactgcgattggatataaatcagtggaggatcgagtgcataactggagggaacccacctgtgatcaggacatcctcgctgtcctcgcccacgccctcgcccttctctgttcgctggagcacctgtttacgcagcttgcggaggtaggccgctttgtactcctcgctgggcttcccgcctgccccatagctcacctccagcactgtcagcggaatcacggtggaggagacgggcaccaggtctgccgaaaaagggtgaaataatagttggtggcaagataaccaactcatctcatcgagcacccacctgcctcgtacttctcttcaggattcagcttgtacagcatcggagaggcggagacgctggcgcagaccagcaccagaaccagcaatcgcggcagaagatcggtcatagtgatgatgatggtccaaaagccacacacaaactggtctcttggccaagcaaaagtttaaatttaaatttgagaaactcaccatgggcggcaactgaaagtatcgcacatttccagcgattcatcgatagtccatgcacaaattatttttagcaagcatagaaaccgacctagcggtggtatccaccgatctagctaggacacacaccgcggtttaatatttcgacagcaaacgtcagaaagagcccgatagacacgtgaaataaggagttcgttatcgaagtaccgcacgcccgatgagatcagacatcggcagacgcatgctatcgataacggtcttgtttattaatgaattaattaattagtccaagttaactaaaaaaagtcgaaaaacagcgaaatcggcgtagtcagcgtgcccaagtggagtacccccagcgaacagaggcagcgacagagtgcaagagtgcaagagcaagacgcagtcgaaggccaggccacaaggcgcagcaacgcaacaaagacgcaagcgaagaagaaaagcatgagctgaggctgtcgtcgccagcaagcaagggaatcgcgcggacaataagagtaggagcaggagcaggagtaggacaggagtgggagcacgagcagcaaaggagcaccaacccagcggagcacccgaaccgcagcagcggcaacaccatcatgagcacggtgttcataaactcgcgcaagagccccaacgtgctgaaaaaacagggcaccgaccagtgggtcaagctgaacgtaggcggtacctacttcctcaccacaaagacgacgctctcccgtgacccaaattcgttcctctcccgtctgattcaggaggactgcgacttgatatcagatcgggtgagtgttccgtaccctatatacgctaattgcagctccccagtaaattcagtgacaagtcagtccataagtaacatcacaggtatccgaaaagtgtgcacaatgcaggtcatgcggc

SEQ ID NO: 36206 - DNA, 351 bp, DROSOPHILA
atgaccgatcttctgccgcgattgctggttctggtgctggtctgcgccagcgtctccgcctctccgatgctgtacaagctgaatcctgaagagaagtacgaggcagacctggtgcccgtctcctccaccgtgattccgctgacagtgctggaggtgagctatggggcaggcgggaagcccagcgaggagtacaaagcggcctacctccgcaagctgcgtaaacaggtgctccagcgaacagagaagggcgagggcgtgggcgaggacagcgaggatgtcctgatcacagtgaagacgcagaaactggagaaggccaaagtcaaggccgtcccagccacacaggcggattga

SEQ ID NO: 36207 - protein, 116 aa, DROSOPHILA
MTDLLPRLLVLVLVCASVSASPMLYKLNPEEKYEADLVPVSSTVIPLTVLEVSYGAGGKPSEEYKAAYLRKLRKQVLQRTEKGEGVGEDSEDVLITVKTQKLEKAKVKAVPATQAD

SEQ ID NO: 36208 - DNA, 7782 bp, DROSOPHILA
gcaatcgtgggagtgtggggcattgattaactctatgtgctctatgtgagaactgtgccacatcaacgtgcaacccaaccaccgagcaaccgagcaaccgagcaaccaaactacaccaaacaaccgaacaagcgaaccgaacagagcagatcaaaacaaacggaaagaagcgaagacaacaagagcacgacaatgcagctgccgcaaaaacaatgactgcacttgcacttgctccttttgcttgccgcgaacacaaaacacagacctaccaccaccgccagcacacgtcgcttcaggaatgcgcggacactggctgtcgacactgggcgcctggtggccaagtgcccactcgcatgtggaatggcatgcgggtcgtcgggtggggggcatgccggcgtgccgactttggcttggtcttgttgttggctgccacgactgtgttagggacttctttcttttgttggcccagccggcagcattgggctgccaacaggtggcagctacttctggacacatgcaggcagtataaccacagaccacgaccgcatccacatccacacctatattcacattcagagccgcgacccacccatataccattacccacacaggctgaaggacgttcggcgtggtggcacgcttttttatcctttgctttccattccattcctttcctttccttttggcgtgcaactttttgtgtgcactctgcctgcttcttttgccagctggctttgcgcgctttccgctgtttcttttagcaggactcaaccaaccccaccacccccatgccacccaaccagaggcatcgcatggagagcacactgtgcgggtcgaaataccccgtgctggccaaggcgacctacttgctgttcgccagtacccagaccgtcttcgttgattaaaagttatatagtatttattgtagttgtaggtactagctatagattctatgttggagaaatcgtactacgggaatttcgtgggcctcattgtgtttctacacggcgttgcggaagccagcgatgtcggtcagctccagtggcttccactggatgtcgacatgcttgtggatccgctcctcctcctcgtcgcagcctcccgtgcagttggacgtcttaatattatcagctgggtctgtggtcgagtcataggtcataggtcagggtactgggtatactagggagggctaaaaatatgcttatcaaagtcagacttaccgaatttgtggtcgtggtcctggtcgcacgacttcggacagaagacgatcttcaggtcgatgggctcgtacaccttaacgatgagctgcggcaccttctccgtggagtggtcctcgggactggacactagtggattgatcgaacggttagcgtggctcactgggttgcttggcgctcgagcggcaatggaggagatgggtgtgaggtggacggtttggttgcgcgccgccagcaaccagggcctgctgttcaccgacagcacttcctggcgcaccgcgacgggcacagctgttgctggtggcgctgattttggagtggtctgtgtgactatttctaatgtactctgtgtggcttcgtctgttcgatggttctggattgcttgtgtcgctggtgtttctgtagatatcgatggtggtgtttgagaagatgatttagtttgtgattctctgcttcgtatcgttgtttgactgactgatgagattgctttcgcatcagatgtgtgtggtacggttggtcctggaagatgctccccaacgttgtcggcaagtcttcggcttagagcctcagcaacaacaattgatgcgcggttgggaggaccttcagtgggaatctgactgctttcaaatctcctgaactgcagcccgtcggatgtggttttcaaatccactttgttttcctcactcctagttgctaatatattgagcatcgcctgccttagaggctgcgcggatggaggtgcgatgtgtcgcttggcggtggctgctgcttgtttctctgatattaagactgtgccgtgctcttttttctcagcatcagaagaaccaacgggttcgtcttccatgtagtcatcgtcctcatcatagtattccgcactctgaggtgtcaaacttttctgccgactaagtgcctctggacctaagtgcttactagcagtcagacttgaccttgcggtcgaactcgtgaccggagaagtgctctcgcttgtggtggacgcaggacttgtactgctgcttgatgtcttaggggcgtctgtggtggtggacgtgcttgtagccggcttcttcgcttctgttcgttctatttgagtaaggcgctgctttagaaggctgagcaggaagttcttcctggcctccaggctgttgactacaccgctcgaaatgtcattcgcgtcgttcacatagtcagagctcccggaactatcgtattctaggtccccagttgtcgtctcaatcggttgggttgttgtagaggaagttgccttggtcggacttggagaggaagatgttttttgtggctcccgctcagtggttgtagacggaacagcaggaagcactgcggccacagtggtgctggacatagcccttggctgcgttttgtccagtacttcgttgtcctcgtccgtgtactgttccgatgtttcactatcgtagtactcggagtcctccggctccttagtggtgttgtgcgtaacgagtgtcttgggcgggatagagcgcttctgggtggaggctagctgctggatggagagccgtagggagtgggcgataaagggcttagaggtggccaggttatgcctggccatctgggcaatggtcactccccgcgagcgctggctggaagaaggctgactggatggtcgctgagtaggagcatgctccctgctcggcggcgtcgtggagattatgtggaatagtttttgcagtaggtgggccgccgccagcgtggacattgttggtgccttcgctgttgttgcctgccctgattccgcctcagcagaagacggtgcatcatccatgtagtccggcacttcctgcccgcccaaagtgttcctacttccggttagtgcagtgtgggttcgtgtgtgggtgaattgttcttgtttctgtggtgattgtagttcaagtagattcacttgttggagttcttgtgtgcatgcagtattggtattcttatctgtaaggcaagtgtcatgattaggtgttcagtgctgcttgtgtggtggaggagcgttcaaaatggattatggattaatggatgcttatgggcagaagacttacctgaggtggagtcgggatcgggacatggcggtcgcgtgacagtggtcaaatcagtcgaggaggtggagttttgcgggttagtggtagttggaatcctcgtggttccgatacttgtagttgatgccgtaattgatgtcggttgccgagttgtagtggtcggcctttgtgtgcttggacttggatttggtgtggttatggttaccgtggaggttttcgaagtggtcgttgttggattttgagtagaaacgatcactgttgttaccttcggagtcgtccttgttgtagatgtaggcgtagtactttttggcttttgagtcgacgtagtttccgtagaggattccgaaatggttgtcgttgtaattcgagtagtcgctgtcactgaagttgtcgttggagtcgttgttctcaatggtttgggagttgtatttggttcttctgtgcttagtgtagtcaacggagaactttccgtggcttttttagtggtaatagtaaccgtggatactttttgagtagaagttgttgcttcctgagtagaagttttcaacgtagttggctttggagtcgtcgttgttatgttctgggtcgttttagtcggttcggatgtagtacttgttgctctttgagtggagctagttaacgcagatgttttcacagagttcgtggttggattttcggtactcttttcggtagtaggcttgggagaactaatcgttgttttttcggtgcttgacgcaactgttgatgtttttggtgtagttgtactaggttttggagtcgtcgaggtgataggtttctcggtactagtcggttctggattattagttgttgttttccttgtaaatatggttgttgaggtgctctgtgtaggtgttgtctctttttgcgtagtgattgctactttagttgtgtttggagccgtcgatgtcgtcttctgagtcgttgttgtaggtttaggactactagttattggcttttctgtggtcgttgttgtcgttgaggttttcggagtaaccgtaagagtcgtcgttgtcgttggttgaggtgtagttgttgttgggggttgagtggacgtagtttccgtggaggatctcaagggggtcgttgttgttatttgagttgtggttgtgactttagttgtcgttggtgtcgttcttgttgaaggcttgggagtggttgttggtttccccgtactgcttgtaggtttaggggaactttctgtggatttcttagtggtagtggaaacggttgatgttttctcagtagtcgtttttggtttctcagtagaagttgttgctgcagtaaatttgtgagtagtcgttgttgttttctgggttgttgtggaaagtttagaggtggtagaagttgggatatccgtagtctttgtagttttgggagaagttgttgtttttttggtagtggtagaagctgttgtcgttttttgagaagtcgttcgcggtctgtgggttgaaacttttaccgtagttgtcgtggaaggtgttgtcgtggaaggtgttgtcgtggaaggtgttgtcgtggaaggtgttgtcgtggaaggtgttgtcgtggaaggtgttgtcgtggaaggtgttgtcgtcgttttcggagaaagcgttgtagatcttattgttgtttttgtatctggtgaggtgttgtgagttgtcgtactgcgtttttgagtcgttgttgtcactacagttgtccttggtttttcggtagccgatgaggttttctcagtaacagttgttggtcttttagtagtagtggtcttagcggtcgtcgtgctatgctgttcggtacttgaaatttttggcgttgattttgtgactgcagtagttgtgcttggtttgggagttgtatctggtggtgaaatagtagggcatgtaagcaccactggtttggtagtcgtagttgtggtagtcgtagtttcagggagaataacaatattttccgaaaggtgcaagccctttaaaggtgatttgatttccggagcctccgtgacatcgtttttgtctgtaccataggtgtatcttttgtattgatatttgttaatatcatttaaaggctcacgagtggtagctgcagtcgctggcgtttcgggctggatgacaatgttctccgagagcttaagcttgcgcggaacgccctctttctcaagctctaggttttctgcagccctttccttaccgcgatggtgggatgaatactcatatgagggatacgatggataggcggggtatttatgataggcagtggaaggttccaaagtagttgtttgcaaaaccaccacattcaacgaaggtttttcaaagccctccgccgccacctgaagcttttccgacttaagggcaggctgctgttccctggctcccgtatcgtagtcgtcctcctcatagagtggcggtgcagctggatagggtggatagtagggctgtggagcgtagggtacctgaacgggtcccggaacaaagtcaaagcagtcgacttcactgcggggacgacacagcttccgctcgagatcaaagctattgctgccggggcatttaaatcgcgtctgcagatatgtgccactttcctgtaatcgacacgtgtagtagagggcgcagtccgtcggggagcggaacgtgccctcctcggcgcactcgggaaacttgagctcgcagttctgcgggatgtagctgccactgtccgatatctccgtcgaggggcactggtcgcctggcaagcacttgcgctccaccggcgagaaaatggtcccggccgggcaggcgaaaagccaaggctgcgtccggttcttgtcgcacctgtagtacaccttgcagtcgtggggatgtggaaagcgaccctccttctggcactgcggcggcctgtggtcgggtctgtgctgtggaacgtgttgcacgcagcgcccgctgctggcgttgaagctctgggaaacgggaaaggcgagttgagtggctggcgaagcagggcaagcggtcgtctgggactcacctcaaggccgcggcatttgctgaagattacacagtcaggcttacagacatagtagtactgctgctggtcgggatgcggcttgatgccaatgtagttgcgtgagcagcgattattctacgattggaaatatacaatagaaacatgtgttaaaaagcttaatgattaaaactaactacaaattactggttaagcaagaaatctctaccaatagatatattctaaaattcaatttgtaatttggatagtttctactcacgtaatcgaaccgcacagggaatccaccgccgggataactcttgaagacgccaaagacgttgtcgtaataaggctggtaaacgggtggtggcgcctggtagccatagccgtagggtgggtaagcatagggcggctgtccatagtatccggtgggcagcaccggtggatatgcgcttggtagttgccgcaccgagcggctggtggccgtggagagcacggacagcaggcccagcagtgtcgaccaaaggcagtgcgtcatggtgggcactctacttcagatgacttgatacttgactggaactagtttgtcctcgtggtcctgggctcatctgatggagttgactctcaagggctggtatccttagtgtgcctgttattcgtggaaccttggttgcgaccgcggtcagctctggagtggcagtggtgacttggagcagggcagacgcgcttaaaaggtcgctgggtgcgctcgcttccgagaatgttgcataactcgcatgccaattgagcgccgcgtgagttaagtacgaagatcttgggtgaacccccaaaagagaccacaacaaatcttcgctaacggtgcagcggccagaatgcagagtgcagagtgcagagcgctctccccacgtgaccgcggaccggaagagagtctccgccggggagcgcgggctaccgtatcacggccgtgcccgccgtaagatgcatgactaaatggagctgagggtgatggagagcaacgtgagctacttccgcaccggagatgctttcccgcttcagtttacatctggatgagtaatctccgaatctgcgatcgtccatccgtgatccgcagccgcctaagatgtgatcaatggatgtggccagagcaaaaccaattcctgtaacgatagagggactgcattgagatagttttctaaccactttttatcgattgggggcgagcagttcggaaccaaggtcatgtaaccaaaaaacatattcggcatttttgtctcttgacgattcttacacgtacgccgcgtcgcgcgggcgggaattacgcatccaaaaatttaaaattcgtggcttgctggtgcgtcattcaacacgttcgacgctttgggcggaaagacacgaatcgcctaccgtgccaaaaaaagagcctaagacccaatatcgggcacgttttccccaattaggagacaggaacaacggattcgttgaatacctaattgcaatactcgttctgcaatatgttccacttagtatgaaatgaaaca

SEQ ID NO: 36209 - DNA, 5388 bp, DROSOPHILA
atgacgcactgcctttggtcgacactgctgggcctgctgtccgtgctctccacggccaccagccgctcggtgcggcaactaccaagcgcatatccaccggtgctgcccaccggatactatggacagccgccctatgcttacccaccctacggctatggctaccaggcgccaccacccgtttaccagccttattacgacaacgtctttggcgtcttcaagagttatcccggcggtggattccctgtgcggttcgattacaataatcgctgctcacgcaactacattggcatcaagccgcatcccgaccagcagcagtactactatgtctgtaagcctgactgtgtaatcttcagcaaatgccgcggccttgagagcttcaacgccagcagcgggcgctgcgtgcaacacgttccacagcacagacccgaccacaggccgccgcagtgccagaaggagggtcgctttccacatccccacgactgcaaggtgtactacaggtgcgacaagaaccggacgcagccttggcttttcgcctgcccggccgggaccattttctcgccggtggagcgcaagtgcttgccaggcgaccagtgcccctcgacggagatatcggacagtggcagctacatcccgcagaactgcgagctcaagtttcccgagtgcgccgaggagggcacgttccgctccccgacggactgcgccctctactacacgtgtcgattacaggaaagtggcacatatctgcagacgcgatttaaatgccccggcagcaatagctttgatctcgagcggaagctgtgtcgtccccgcagtgaagtcgactgctttgactttgttccgggacccgttcaggtaccctacgctccacagccctactatccaccctatccagctgcaccgccactctatgaggaggacgactacgatacgggagccagggaacagcagcctgcccttaagtcggaaaagcttcaggtggcggcggagggctttgaaaaaccttcgttgaatgtggtggttttgcaaacaactactttggaaccttccactgcctatcataaataccccgcctatccatcgtatccctcatatgagtattcatcccaccatcgcggtaaggaaagggctgcagaaaacctagagcttgagaaagagggcgttccgcgcaagcttaagctctcggagaacattgtcatccagcccgaaacgccagcgactgcagctaccactcgtgagcctttaaatgatattaacaaatatcaatacaaaagatacacctatggtacagacaaaaacgatgtcacggaggctccggaaatcaaatcacctttaaagggcttgcacctttcggaaaatattgttattctccctgaaactacgactaccacaactacgactaccaaaccagtggtgcttacatgccctactatttcaccaccagatacaactcccaaaccaagcacaactactgcagtcacaaaatcaacgccaaaaatttcaagtaccgaacagcatagcacgacgaccgctaagaccactactactaaaagaccaacaactgttactgagaaaacctcatcggctaccgaaaaaccaaggacaactgtagtgacaacaacgactcaaaaacgcagtacgacaactcacaacacctcaccagatacaaaaacaacaataagatctacaacgctttctccgaaaacgacgacaacaccttccacgacaacaccttccacgacaacaccttccacgacaacaccttccacgacaacaccttccacgacaacaccttccacgacaacaccttccacgacaactacggtaaaagtttcaacccacagaccgcgaacgacttctcaaaaaacgacaacagcttctaccactaccaaaaaaacaacaacttctcccaaaactacaaagactacggatatcccaacttctaccacctctaaactttccacaacaacccagaaaacaacaacgactactcacaaatttactgcagcaacaacttctactgagaaaccaaaaacgactactgagaaaacatcaaccgtttccactaccactaagaaatccacagaaagttcccctaaacctacaagcagtacggggaaaccaacaaccactcccaagccttcaacaagaacgacaccaacgacaactaaagtcacaaccacaactcaaataacaacaacgacccccttgagatcctccacggaaactacgtccactcaacccccaacaacaactacacctcaaccaacgacaacgacgactcttacggttactccgaaaacctcaacgacaacaacgaccacagaaaagccaataactagtagtcctaaacctacaacaacgactcagaagacgacatcgacggctccaaacacaactaaagtagcaatcactacgcaaaaagagacaacacctacacagagcacctcaacaaccatatttacaaggaaaacaacaactaataatccagaaccgactagtaccgagaaacctatcacctcgacgactccaaaacctagtacaactacaccaaaaacatcaacagttgcgtcaagcaccgaaaaaacaacgattagttctcccaagcctactaccgaaaagagtaccgaaaatccaaccacgaactctgtgaaaacatctgcgttaactagctccactcaaagagcaacaagtactacatccgaaccgactaaaacgacccagaacataacaacgacgactccaaagccaactacgttgaaaacttctactcaggaagcaacaacttctactcaaaaagtatccacggttactattaccactaaaaaagccacggaaagttctccgttgactacactaagcacagaagaaccaaatacaactcccaaaccattgagaacaacgactccaacgacaacttcagtgacagcgactactcgaattacaacgacaaccatttcggaatcctctacggaaactacgtcgactcaaaagccaaaaagtactacgcctacatctacaacaaggacgactccgaaggtaacaacagtgatcgtttctactcaaaatccaacaacgaccacttcgaaaacctccacggtaaccataaccacaccaaatccaagtccaagcacacaaaggccgaccactacaactcggcaaccgacatcaattacggcatcaactacaagtatcggaaccacgaggattccaactaccactaacccgcaaaactccacctcctcgactgatttgaccactgtcacgcgaccgccatgtcccgatcccgactccacctcagataagaataccaatactgcatgcacacaagaactccaacaagtgaatctacttgaactacaatcaccacagaaacaagaacaattcacccacacacgaacccacactgcactaaccggaagtaggaacactttgggcgggcaggaagtgccggactacatggatgatgcaccgtcttctgctgaggcggaatcagggcaggcaacaacagcgaaggcaccaacaatgtccacgctggcggcggcccacctactgcaaaaactattccacataatctccacgacgccgccgagcagggagcatgctcctactcagcgaccatccagtcagccttcttccagccagcgctcgcggggagtgaccattgcccagatggccaggcataacctggccacctctaagccctttatcgcccactccctacggctctccatccagcagctagcctccacccagaagcgctctatcccgcccaagacactcgttacgcacaacaccactaaggagccggaggactccgagtactacgatagtgaaacatcggaacagtacacggacgaggacaacgaagtactggacaaaacgcagccaagggctatgtccagcaccactgtggccgcagtgcttcctgctgttccgtctacaaccactgagcgggagccacaaaaaacatcttcctctccaagtccgaccaaggcaacttcctctacaacaacccaaccgattgagacgacaactggggacctagaatacgatagttccgggagctctgactatgtgaacgacgcgaatgacatttcgagcggtgtagtcaacagcctggaggccaggaagaacttcctgctcagccttctaaagcagcgccttactcaaatagaacgaacagaagcgaagaagccggctacaagcacgtccaccaccacagacgcccctaagacatcaagcagcagtacaagtcctgcgtccaccacaagcgagagcacttctccggtcacgagttcgaccgcaaggtcaagtctgactgctagtaagcacttaggtccagaggcacttagtcggcagaaaagtttgacacctcagagtgcggaatactatgatgaggacgatgactacatggaagacgaacccgttggttcttctgatgctgagaaaaaagagcacggcacagtcttaatatcagagaaacaagcagcagccaccgccaagcgacacatcgcacctccatccgcgcagcctctaaggcaggcgatgctcaatatattagcaactaggagtgaggaaaacaaagtggatttgaaaaccacatccgacgggctgcagttcaggagatttgaaagcagtcagattcccactgaaggtcctcccaaccgcgcatcaattgttgttgctgaggctctaagccgaagacttgccgacaacgttggggagcatcttccaggaccaaccgtaccacacacatctgatgcgaaagcaatctcatcagtcagtcaaacaacgatacgaagcagagaatcacaaactaaatcatcttctcaaacaccaccatcgatatctacagaaacaccagcgacacaagcaatccagaaccatcgaacagacgaagccacacagagtacattagaaatagtcacacagaccactccaaaatcagcgccaccagcaacagctgtgcccgtcgcggtgcgccaggaagtgctgtcggtgaacagcaggccctggttgctggcggcgcgcaaccaaaccgtccacctcacacccatctcctccattgccgctcgagcgccaagcaacccagtgagccacgctaaccgttcgatcaatccactagtgtccagtcccgaggaccactccacggagaaggtgccgcagctcatcgttaaggtgtacgagcccatcgacctgaagatcgtcttctgtccgaagtcgtgcgaccaggaccacgaccacaaattcgacccagctgataatattaagacgtccaactgcacgggaggctgcgacgaggaggaggagcggatccacaagcatgtcgacatccagtggaagccactggagctgaccgacatcgctggcttccgcaacgccgtgtag

SEQ ID NO: 36210 - protein, 1795 aa, DROSOPHILA
MTHCLWSTLLGLLSVLSTATSRSVRQLPSAYPPVLPTGYYGQPPYAYPPYGYGYQAPPPVYQPYYDNVFGVFKSYPGGGFPVRFDYNNRCSRNYIGIKPHPDQQQYYYVCKPDCVIFSKCRGLESFNASSGRCVQHVPQHRPDHRPPQCQKEGRFPHPHDCKVYYRCDKNRTQPWLFACPAGTIFSPVERKCLPGDQCPSTEISDSGSYIPQNCELKFPECAEEGTFRSPTDCALYYTCRLQESGTYLQTRFKCPGSNSFDLERKLCRPRSEVDCFDFVPGPVQVPYAPQPYYPPYPAAPPLYEEDDYDTGAREQQPALKSEKLQVAAEGFEKPSLNVVVLQTTTLEPSTAYHKYPAYPSYPSYEYSSHHRGKERAAENLELEKEGVPRKLKLSENIVIQPETPATAATTREPLNDINKYQYKRYTYGTDKNDVTEAPEIKSPLKGLHLSENIVILPETTTTTTTTTKPVVLTCPTISPPDTTPKPSTTTAVTKSTPKISSTEQHSTTTAKTTTTKRPTTVTEKTSSATEKPRTTVVTTTTQKRSTTTHNTSPDTKTTIRSTTLSPKTTTTPSTTTPSTTTPSTTTPSTTTPSTTTPSTTTPSTTTTVKVSTHRPRTTSQKTTTASTTTKKTTTSPKTTKTTDIPTSTTSKLSTTTQKTTTTTHKFTAATTSTEKPKTTTEKTSTVSTTTKKSTESSPKPTSSTGKPTTTPKPSTRTTPTTTKVTTTTQITTTTPLRSSTETTSTQPPTTTTPQPTTTTTLTVTPKTSTTTTTTEKPITSSPKPTTTTQKTTSTAPNTTKVAITTQKETTPTQSTSTTIFTRKTTTNNPEPTSTEKPITSTTPKPSTTTPKTSTVASSTEKTTISSPKPTTEKSTENPTTNSVKTSALTSSTQRATSTTSEPTKTTQNITTTTPKPTTLKTSTQEATTSTQKVSTVTITTKKATESSPLTTLSTEEPNTTPKPLRTTTPTTTSVTATTRITTTTISESSTETTSTQKPKSTTPTSTTRTTPKVTTVIVSTQNPTTTTSKTSTVTITTPNPSPSTQRPTTTTRQPTSITASTTSIGTTRIPTTTNPQNSTSSTDLTTVTRPPCPDPDSTSDKNTNTACTQELQQVNLLELQSPQKQEQFTHTRTHTALTGSRNTLGGQEVPDYMDDAPSSAEAESGQATTAKAPTMSTLAAAHLLQKLFHIISTTPPSREHAPTQRPSSQPSSSQRSRGVTIAQMARHNLATSKPFIAHSLRLSIQQLASTQKRSIPPKTLVTHNTTKEPEDSEYYDSETSEQYTDEDNEVLDKTQPRAMSSTTVAAVLPAVPSTTTEREPQKTSSSPSPTKATSSTTTQPIETTTGDLEYDSSGSSDYVNDANDISSGVVNSLEARKNFLLSLLKQRLTQIERTEAKKPATSTSTTTDAPKTSSSSTSPASTTSESTSPVTSSTARSSLTASKHLGPEALSRQKSLTPQSAEYYDEDDDYMEDEPVGSSDAEKKEHGTVLISEKQAAATAKRHIAPPSAQPLRQAMLNILATRSEENKVDLKTTSDGLQFRRFESSQIPTEGPPNRASIVVAEALSRRLADNVGEHLPGPTVPHTSDAKAISSVSQTTIRSRESQTKSSSQTPPSISTETPATQAIQNHRTDEATQSTLEIVTQTTPKSAPPATAVPVAVRQEVLSVNSRPWLLAARNQTVHLTPISSIAARAPSNPVSHANRSINPLVSSPEDHSTEKVPQLIVKVYEPIDLKIVFCPKSCDQDHDHKFDPADNIKTSNCTGGCDEEEERIHKHVDIQWKPLELTDIAGFRNAV

SEQ ID NO: 36211 - DNA, 3257 bp, DROSOPHILA
tgtatttgtgtaagtgtcaagcagacaagacaactctaaggaagcaaaaccaaaaccaaatcaaacaaatccgaaccgaaccgaactcattcatttcgttatacgtaaatcggagagagcaagatcattgaaatcagtcagtcaaatgaaaaccgcacacaaaaacacaatgcaacgcagacactcacacactcagacagacagacaaaaggaaaacgaagtattttcataattaaaacagaaatgatatcgtgttattatttaaataaatagaatgtatataagtgaacctttgtatgtgccgaggatttctttcttaaccccccggttgtcctgctacgggaaccaggaaccaggaactgggaacgggaaacttggggctctcgattctatgattcagtgtccactttgcaatctccccccagcccattctcccccttttctccacggccccgacttgatcccgcccgactaccaaacctgtgacgccgttgagtccatgagtcgatctgtgcgagtgtctggtggtgggaccactcattctgtccactccgctccacttcatccaaaacaacaacgcacccaccccattgagcgcagaatgccgcctaaccctggcatggtcgctctcagtctcgcccctgtctcgccaaaccccccggcctaacaccagatcgctatattaatccaatgtcacccaaccttccaaccttccaccacccactacccactaaactgataacgctagttgtaaccgtaactgttaactgtcagtcgataacacgggccactcatcaccgccggtggtggagcaccactccactcagatccaatccagtccagtccagtacagtacagtccagtccagtggactacgctgaccccaatccgctccaaggatggaagttggtgaaggtggtgtagaagctggagctggacgagaaatatatacctataccttaaatttacgttttgtatgtatatgtaatgttatttatttatgtattttaccattgccacatatgccaaacactcgaacacacacctgcagctgttcaccgcactgctcggtggctattcatgtgtgggcaccattcattagaaacatttcagttactccaacccagcgtaagaatggtccggcgcaaccaagttctatgcgaataaaaatactataagatatcggtcaatttccgtagttaggataaggctacaaccaaataccaataccaaataccaatcataccaaacccaaatccaccaatccaccaatttgcaggaaactcgcccaagaaactcttctcatgccagctctgcggtaagctcctctgctcgaaagcttcgctcaagcgtcacattgccgacaagcacgccgtgcgccaagaggagtaccgctgcgccatctgcgagcgcgtctactgctcccgcaactcgctcatgacgcacatttacacgtaccacaagtcccgtcccggcgaaatggagatgaaggacattaagctctataaccagttcaactcgtcgatctgagactcaaagcccttgccgggccgccttagcagcgtgccacagcaaagccaacagccacagcaacaatcaacagcgatgaaagacagcacgaccatgaccatgaccatgaccccgacaaccattaccacgccgactcaaactccaagccaggctcagactcctacctcaattccgatggcagatcaccaggatctagccatctacccaaagcgaccaatgccgctgaatgaccagtatcaactgctaatacagcagcgacagataatgaccctgtacgactactacctctaccagcgtaatagtcacagccacagtcacagtcacagtcgcaatcacggtcaaagtcacagcagcagtcacggtccttcaattgccaccacgagcaactagatatcggctagaactaagctcaaacttaaagcaatgccattatgtagtgatatatatacatacctaccaatctattatacacgacgaacaaaaaatgtttaggccccatctttattattacgaggtggcgacgattacaaacaatacaattaatagcgtattataactaaagacattagatgtaagatagttatatggggacatttgaaacacttttagattagacctagattagtcggatcaatctatacatcgacttgctgactttttcacaactcacgcctatggaccagtatatagaatacggatatacactgtttacactctgtggccttcttttaccttatacctcatacaacgtactcgtagtcaattttacaattatagctattttcgtgtttctgttggttcgaaaacggacggacctcgcacaagttgcctttctgaatatctgcgtaatttttcactctacctggacaaactggacagattataacagtgctttcttccgcaacataaatatactactatgaagcaataaaatatatacatatatatatatacccatatttataacctatatacaatataaatcgacgacaatagttgataatgaaagtaaggcgcaagaatataacttaggtgtaagtccccagtttgccgatcaacttgtgcctagagctatagatgttgaagcaagagcaataatggcgtggcagcatgcggctcggcttatctcaaccagatcaagaacaactaccaaatacagtttgtcgagcggagaataagatcgagatgcaagagaagcaaaatcctgaatcttgcccaaatcggagggatgatgtaatgatgtaccagaatgccagtgccgcaacttgaaatttactcgctaccagcgtctctctactcgcacccgctactcgttattcagtcagtagacgatcgcgcgcttgctaaaggttagcccaacatcttaaactacattggtagccaagtatccgaccatgcgccgatacgtagttagtacatacatgctatctccctctcatggccacgttctacacactgtcctactctctactgaggccagccgtccctattcggctgaatctgcatctgtctgtacaagcatttcttcttcctctgtatctatcctttatctccttgccaaacacactaacgatccattaagcgtgcttcgccttcttcgcgaaacgctctaatctgtacaaattgtttctagatgaaaacaattaacccgaccaaccactgcgcaacatcagtcagtatatggtcagcttggcactaaaaatatgcacactcctcgtctaaactcg

SEQ ID NO: 36212 - DNA, 1000 bp, DROSOPHILA
atgtattttaccattgccacatatgccaaacactcgaacacacacctgcagctgttcaccgcactgctcggaaactcgcccaagaaactcttctcatgccagctctgcggtaagctcctctgctcgaaagcttcgctcaagcgtcacattgccgacaagcacgccgtgcgccaagaggagtaccgctgcgccatctgcgagcgcgtctactgctcccgcaactcgctcatgacgcacatttacacgtaccacaagtcccgtcccggcgaaatggagatgaaggacattaagctctataaccacagcgtgccacagcaaagccaacagccacagcaacaatcaacagcgatgaaagacagcacgaccatgaccatgaccatgaccccgacaaccattaccacgccgactcaaactccaagccaggctcagactcctacctcaattccgatggcagatcaccaggatctagccatctacccaaagcgaccaatgccgctgaatgaccagtatcaactgctaatacagcagcgacagataatgaccctgtacgactactacctctaccagcgtaatagtcacagccacagtcacagtcacagtcgcaatcacggtcaaagtcacagcagcagtcacggtccttcaattgccaccacgagcaactagatatcggctagaactaagctcaaacttaaagcaatgccattatgtagtgatatatatacatacctaccaatctattatacacgacgaacaaaaaatgtttaggccccatctttattattacgaggtggcgacgattacaaacaatacaattaatagcgtattataactaaagacattagatgtaagatagttatatggggacatttgaaacacttttagattagacctagattagtcggatcaatctatacatcgacttgctgactttttcacaactcacgcctatggaccagtatatagaatacggatatacactgtttacactctgtggccttct

SEQ ID NO: 36213 - protein, 220 aa, DROSOPHILA
MYFTIATYAKHSNTHLQLFTALLGNSPKKLFSCQLCGKLLCSKASLKRHIADKHAVRQEEYRCAICERVYCSRNSLMTHIYTYHKSRPGEMEMKDIKLYNHSVPQQSQQPQQQSTAMKDSTTMTMTMTPTTITTPTQTPSQAQTPTSIPMADHQDLAIYPKRPMPLNDQYQLLIQQRQIMTLYDYYLYQRNSHSHSHSHSRNHGQSHSSSHGPSIATTSN

SEQ ID NO: 36214 - DNA, 2787 bp, DROSOPHILA
tgcaaggctgtacatataaataaattaccggcatgtaggggattgtgagactttggtattccctgtatgtcatcgctaaatgacacggacttctcaaaggacacggatttttctgcaagacaaggacaagacaatatgtgacggcttttcagaggctgcaaaggattgggcctccggttccggcgacacttacggcacgagtttttgcccagcttgggagctttctcccgaatgtacagctcatccccggagccgttggctgcgcggcgtgcggaagagagaacaaattagacatgtagttagaggggagagaccgggtgcaaggagtctggaagttgggccatgtctttagatctacaaagcggtgctacaagccaagcgagtgccgtggacaacattcagggattgcagggactcatattcgtaccttgcatctgcgacggcacgaccagatagtttgggtccagagtgggcacggccagcggggcaatctgggggttctggttaacgagggccttctgcactagtcccgtcaggttggccagctgcctttccatgtgctccacacgaatccgatgcaagtcttcgggcctgcaagtgcgtaagcaaaaagtcaccaaatcagtacaaaactcaaaaacttgtctccaggtgttgcgtgcttggcaagcagcgatcattgggccacacatccgctggcaccacatcgctccaattgcgcagccaagcctaggcatccgacatcagagcatagacaccggaattggatttggtatccaagtcgaagtcgaagtcgaaacgcgggtcgcagcacttagcgcatgggagcgtgaaccaaaacagcaagaatgcagctgcatgactgcataagctgctattcgacttctttataccctaacctgcgctgcgctgtgctgtcaggccgctcatctggtccaatataccctccgtctcgtttggccgttggaggcagcgaaaagtaagtccgtgctagcacgcaatgtcggtgccaatccgctttcgcagtcgacgagttggagctgcgcaagaaccaccaagagctgcccgcaaagacatgactacatgcagtggtatgtacgatgcaattctattcgattgggaaacccagtgtcagtggactcatgaccaatccgaacagtgaccagcacaccagcgcggtttgcccgctgcctggctaacttccaggtggacgagctgctgctgttaaagaagtccgtgatgagtatggaggcgctggataagaacgatagtctccagccgactacggaatgcccacagatggcgccggatggatcgccactgccagagcgaatggccttgatggccgcagatcggtaagcctgctttccattagttcacaacatgaagctttactagatgattgcaggggtgagcacgacaccactggctcccatggtccctggcactcccatccacacgcgccgacttcctggaccgaggaaaagccctcaaagttgcagaccctattccagatcagcattacggccctggcctttctctccttcggcggctatctactctgcctaatcgtgcaggccatcaagagcaagggcaccacctacttccatccggtggccacggccacgaccagctcatccacaagcaatgtgaaacgcatcaagatataccgccgcagcaagcgcagctctgtgcgccccgataccgatctgccaaccctgctgcagcaggactacgcctcctacatgaaatctttgcgagatcgcggctggggcatgcttacctagtgggatcgtagatctggttgccgcgatgcgtgaggcggttgggtcctggtcccacctttatgccgtacagtgcgtactgatcctctgtcatggttccatcgctgtaaatggcaaagattagttaagatgctaatgctactacaacaacatctattcctactccccccctcgcacctctgctcctcgtcgataatgggcgccaccacggcgcccctcgttccgtactggctgtagtatggctcctcgtagtttccgcggctactgcgctccggggaactggtatatccatctgcaaatacagcctggtcgtttagaacttggactcttaatgatgggaggatcgtagctatgtgcgtgcttggtagcctatagtttgtggttcaatttaggtataacgaaacgcaataaaggaacgcaaacgagcaattcgaaatgaagcgaatgaaatgcatgattggggccgcataaataaatgcttccgattggatgtgtggatagtgcacagtcagtgtgcatttgagattgagattcgttttggatttggatttgaatttcaagcgcaagccaatggataatcagatgcaatcgctataatgtgatgtgatgtgatatgtaatgtaaaatgcgaaatgcgaaatgtcaccgcttatattgcacacacactttgggtaaatggaagcgatcgtacaatgctagctataagtgggtagaaaggcaaattcttgtgtacctggaatgctgtataactgatccggggtgtaggggaacaggggttccatgctaccccttggattaagcgatctgagtggtttcacaggcgctcctttttcggttcgttggttcagatacataggtttggtttggttcggttcggtttggtttggtttgattggtgttcgagtttgagtgtgttaatggttatggatggattgaacatgaatcatatttagactgggctttcactgcagaatgcgcatgacagagaactgaactgaacgga

SEQ ID NO: 36215 - DNA, 666 bp, DROSOPHILA
atgtcggtgccaatccgctttcgcagtcgacgagttggagctgcgcaagaaccaccaagagctgcccgcaaagacatgactacatgcagtgtgaccagcacaccagcgcggtttgcccgctgcctggctaacttccaggtggacgagctgctgctgttaaagaagtccgtgatgagtatggaggcgctggataagaacgatagtctccagccgactacggaatgcccacagatggcgccggatggatcgccactgccagagcgaatggccttgatggccgcagatcggggtgagcacgacaccactggctcccatggtccctggcactcccatccacacgcgccgacttcctggaccgaggaaaagccctcaaagttgcagaccctattccagatcagcattacggccctggcctttctctccttcggcggctatctactctgcctaatcgtgcaggccatcaagagcaagggcaccacctacttccatccggtggccacggccacgaccagctcatccacaagcaatgtgaaacgcatcaagatataccgccgcagcaagcgcagctctgtgcgccccgataccgatctgccaaccctgctgcagcaggactacgcctcctacatgaaatctttgcgagatcgcggctggggcatgcttacctag

SEQ ID NO: 36216 - protein, 221 aa, DROSOPHILA
MSVPIRFRSRRVGAAQEPPRAARKDMTTCSVTSTPARFARCLANFQVDELLLLKKSVMSMEALDKNDSLQPTTECPQMAPDGSPLPERMALMAADRGEHDTTGSHGPWHSHPHAPTSWTEEKPSKLQTLFQISITALAFLSFGGYLLCLIVQAIKSKGTTYFHPVATATTSSSTSNVKRIKIYRRSKRSSVRPDTDLPTLLQQDYASYMKSLRDRGWGMLT

SEQ ID NO: 36217 - DNA, 2376 bp, DROSOPHILA
atgtcaagttattttggctgcatgtacatgtttatctcgagcaagaaatccgaggaaggggcaccaaaaggaaacggacgcagagatgggtacacacgaaacatggtatacttttcagtgcagcacttcacgggttttagtatgcctttgcctttgccagtgccagtgcctgggaatatgtacacagccacccacattcactgcccatcggcattattgcgggccactaaaggaatttttgattagttttaggtgcggtgccccggcccgttttttcccagccgccattaattgtgtcagttgcgtccagtttccagggcacgagtgcacattaaacacggtggaggggagctcgtgtctgttgacttttccacacacgtcagcggtcagttggctggattcctttgggttttcatgggggatctcgtcctagctgtaccttgtatacctatgcacctttgggggtgtgtgggcggttcaccggcgatgtttctggcattttctcaaaccgcacttgccttgccgattcaggaaggtttcacaattaacgggtctaggtgctcatagctcgaggagctcaccgatttagccgtgtccttaggataaagattcgattcaattcgcttcgctttgcactcgtcactacacagctttctggagtcaggacacggcactcgtccaccgacgcagcataacgccagaagagcagaaatatttctggtatatctacaccggaaagcgtttccgccctagccgaacgaggactgcgtgcttgcacggcgcatgcgttaccaatcgagtgttcccggaccagcgaagttccctggcatccagccgtcagaggtcctggcatccctgcattccgacgctgctctgttgtgtgtgtttacctggtgccggggcaatcgagtaattttcttggcggttgagcgcatgtggctatcgaatggctccaatcgattactgggcggaaggcctttaaaaacaggtgacgaaacacatgcttgtcctgcgccggcttgtttatccgggagtagccaggattccagcggatgtctgggcccgcagccacgccctggtggagtttcccggccagtggcctcgctgtgagcagcaccagtttgaatcggacatgcgggtcatcagggacttcatcactgcgaaggaggagcaactactgatgcgggaaatcgagcctcacatcagccgcttgccgtacgagttgagccactgtgatgacgtgggtgggtatatatagagactatatagtatcggatttctggctaaacttcttaaacttcgcaggcagataccgcgaagttgaacgccgaaagtggactccccaaaaccaggccacgctggatcacgtctcgtgagtttccttcggtgagcaggtcatgcccttcgtgcacatcctggacttggctgactctggcgcgatcaagccgcacgtggacaacactcgagtgagtttggccacagaagatgcaactcgatttcattttcatttacgattgtattcgacagttttgcggcaacaccactgcgggcattagcatgctcagcgactgaagcgcgtgaccaaggatcccatgactttgtcagccactctgaggatctgctcctgccgcaactctcgctctatattaagagtgccctagcgcgatacgagttcacccacgaaatcctggccagagatcagtcgtggttcaaggagcgcttggtcgaaacgaaccttgatggcatacgcatagtttccttttctcacagctggtgtacatgtatatatatatatatatacaatgaaaatttattccggtttggtgatcagctaatgtaatacagacggcggactgcgacggattacacgacgtgattcagccatgtaatatatgatacactaaatcaaatgtacatatacatagtatatcttaagctagctacttgtactttataaatattgggctcacctttctcactcgcttcaaattttctactccctcttataatcttttgaaatttgtgttttttgctcaacaatgtatatgggttgatgcttttctactttcatttgtacgttgtcgtctcgtttcatttaaagcttaaaatatgagaatgacagagacagggagattaatgggcaactgagtgagatggagagaaggtgcttgggaaaggggaaggatacaaaaatcgaccggacaaggactagtcctggattcaaggataactgggaaatagtgatgtgttgtcgctaaacctacgttcatatttgcacttctagccactgctagttaaagtctatgccgtgcttccggctcggggaatgatattatggcgatggggactcggttctggcgggtcatcggtcatcag

SEQ ID NO: 36218 - DNA, 315 bp, DROSOPHILA
atgcttgtcctgcgccggcttgtttatccgggagtagccaggattccagcggatgtctgggcccgcagccacgccctggtggagtttcccggccagtggcctcgctgtgagcagcaccagtttgaatcggacatgcgggtcatcagggacttcatcactgcgaaggaggagcaactactgatgcgggaaatcgagcctcacatcagccgcttgccgtacgagttgagccactgtgatgacgtgggcagataccgcgaagttgaacgccgaaagtggactccccaaaaccaggccacgctggatcacgtctcgtga

SEQ ID NO: 36219 - protein, 104 aa, DROSOPHILA
MLVLRRLVYPGVARIPADVWARSHALVEFPGQWPRCEQHQFESDMRVIRDFITAKEEQLLMREIEPHISRLPYELSHCDDVGRYREVERRKWTPQNQATLDHVS

SEQ ID NO: 36220 - DNA, 12008 bp, DROSOPHILA
tgcgtcaaacagtcaccagatggcgctacatatgtatcatcgcggagctttgcaagggagcgcgcactcactaagttgggaaggcgtcctcgctaaagcccattgacaatccggtgtgaccagcaccaggacataaaaaaatactaatgggtgcaactaaaccaagtaacagaaaaaacacaataacatcgcaatggcgatatcgatgttagcatatatataattaatatacactttcattaacaatttcgtatttagtgctaaataaattttaaaaactaaagaaagaatgtgagccgataaaaactaacgaaacatatttttatatcaaaagaatttttatgtagctatttgaattttagtatttgaagcctgttagatttcatgcaaaattaaacgggatccatttctgaaaaatatatacgcaagaaaaaagttcttcattaaaagttgattaattatgtatggaaaccaaaaaatctatatcagttaaaagtaaaattaattttaaacacacaagataaatggataagtaaaatcgttaggtacctaaacaaactgttgcagtatattcacaatatattcacaaattggggtacaatttccgcaaagtagtgtgtaagtttaagtacaccaagttaatttttagtattataagtgaattgttcgaaaagtaactcttaaaacaggcactcgttagtataacgttttccaacaattctgttaccatgctctggataatatagtttttgtaattgaaggtaaagaatgttaatgtatgaaagaaggtgaattaaatgcaaaccattttttttagaccaatgtgcctaacaaatcatacaattactacaactaatactactcatttctacggtgggaaattttgttaacagctactgttggcagatatccaaaatatcgatataagcggactgattcgagcagtaacattacgatgtaagtatcgatattagatattgtgataactgctcacatcgctagattccgagcaacaaaaaagcgacgaagggtcattgttattttttctaatgcaatgtaatgcagcaaatgtgcagatttgaacaagtgtaacgcgatttatgtttaatccgcatcgaggaaccaaatcgaagtaaacgcgcggccagagaaaagagcagcaccgcaccgaagataaaacaaacaagcattgatttgtttgtccggccatgtcagtgtgtgtgtcacaagggcttgcaagtgtgtgcgtgtgtccgtgcgtgtacgtgggtgcttttttttttctcccgagtgccgccaagtgaaatatgcaattgcacgccactgcagttgcagccacacaaatcctatcctaatcgacgaaacagcgaagcgaggaggctagaatcggctgcccaacgaagagagcagaaccgttaacaaatgacactctgccgatacagcgaagtaaaaatcaataattagagcaaaaaggtatgcagtagccagaaaagaacagaacccaatatacatgtgcacacatctgcagccgtgtgtgtgtgtgtgtgtgtatgtgtcgttgtatatcgcgtatcgcattcatgcaaataaaaggcaagcgacggaagtcaatagattttataggtattgtgtcccgaaataggagcaattccccccgataagtgccgcaaaacggcataataggtggagcaaagtggatagtgaatagtgggtagtggataaggggtgttacgtagctacatggcaaaaacaaaaaaacaaaacacaaacacagggacacacatgcaaaagcacatgcgacgtaacattccgattccgaccaacatcaaagcggaagagaacgaaagaggaggaggagagagaggagcgagtggcgaagagaggaaggaaagaagaagggaaaggcttcactgctgcattgcagtgaattgcgttcatctgcccctcgcgaacttcccctgttcactttgcatttcactttcttgagcgaaacaaacaagccaacaagctataggccaataagtttgcatccattcttgcagcgagtctcaaaagtcgctcagatacatatacagctacagattgagatccaggttcagactcagattcattcagaatgcgcggctcgtagaggaagaacacgagatacatctgaccatgtgtaattacctaatgtggcgcagagcttagtgcataaaagagcagatagtaaggtgcctgcataagttgtatactgtgtgtagtgcacttttggccagccagtcgatggctacgacggctatgggcccgattggccaattcacgagagtgtgggtgtacgaaaatcgatagaatcgtgtaacttgggcatacaagtacgtatgtttaatgttgcatgcatgtggaatgtacatacatatatacgcatgcctataatcatgcttatgagcagttttctagtttcaagagtcgagattgtatgcgatgtctttatatcttgccgtcccgaccaagaccaatcaatgatctgatttgactgatagatagatagatatatagataaatagatagatatatagataaatagatagatatatataggtaggtagctagatagataggtaaatacttacatacataccacattgtatgcctaagccctacgaactgcattctaaatggacacgaaaatgaaacagaatccaatcggaaggagaggagaaattcttattagacttacatactctcaggtgggactagattcgtagctttgatttaattaatagactaattattagcattgaattttatgttgttaacaaagagcttctgcttcagttcatatcggtttgatgttacttttctgaatattggtagttcatcatcatagtcctttaaatcataaatcaccattaaaatagcacaacagatttcaccaagatatataaagtacatgaaattcgattccagagtcatgttaaacagcgctaataacaattctccccagcacgtaagtagacgaaaatcgtcattaaaaattagatttctttataacttgcttatgcgatgtttatgtatgtaaatgtacttttacgaattctccaacacagcttgcatgttaagtttacgcaaaattgcatatgtacgcttagattgaatcggtcgatttcaggactttacttttaagaactctactatagtcagaaatttaaaggcagtgaagcaaagtaagaggcttcatccaggaagtaagaggctttggtcacgaggaccggggttattctgggtctttcatggtaataagactgcatattggctggaagcgatatggttcagtttgatcttgccgtagactcctatgcataaatgtaaacgtattattactattaaacaatatagcatgatattaggcgtagttatgtgcaattattatactccatatggcatgattcgtagttttaggacaattacattatattctggtgtactttcttgttccgttttccatttttgcaactcgtttttaaatagcataagatacttatgattaaatggtaggtaactttataccttgctttcctatagatcctctttattttcaacatttcttttgctatgaatcacaacaccacctaagttccccaaaggaatttcttattattctttttcgatgtgtttatttaaaatgaaaaaactgatcataatttaagaacggaattatgcttgatgttgtacttgatgttcattagtacttgaagctggccggtccggtcctattatactagacatttacaattttcgccatcacttgtccgacaaatgacactcaacacacaggtgctgtgttatataaatatgttgtaatgaattcgaaatggtcagaacagcgacagaggatatttctcgagcctaacgagtttccgattgtttcacttgtttatttcgtgctttgttcacaacacactttgggcatttcacatttattgtttcccactttgggcaggcaatatatctacttattgaaattataaagaaattttaaaggtattcttcgtacttgccgtgcagctcggtgagctgtccttttagccacctatgcgcacataaataaactacgagactgcaagcgccaattgctccaaactttgaccataaatataatttcttcgaactgagtgattccgcaaatgtgtatcgtatatcccggagtcttagtatatgtacacgcacacattttcgcaagatatttattttaaaatgttgctgttgattactgcagattttgatacgccaatgcaactcatgcatctctgagtttgtgctgcagctgctgcagcaataaccgctccaccgacatccaaattttaatgtaaattcgttcatgctgtagggttggtaatgtctttctgacattttgacttcattaattcgacgaaatctgccttctgggcgtctgcgaaagttttatcagcgccaaagcatctcaattttcgacatgcaccgtgctttctgttcaattgcaaaacaaatgacacctgccattaaagcaaggttgatgtccttcgattagaacgggtgcccccttaagagtggttttcaaaattaattccatgctcgactcaaaaaagatggctaacacagcttattatgtatttttttttcggccagtactggtacgggttagggagcaaatcaaacgaattccccagtatcctatcagataccttttcagcccagccctttgaagtgtccccgaatgccttgcactgaaacggactggcatggcacatgtgccttccctttaaaagggtatataaatatcgagctcctcgagatcgcagctagtcgcgcaaattatctgcacacttacaaacatgtgtttttacacatgtatgtacatttttaaaatttttttttcataattgcagttccttctacaaaattagctgcagttggcttttgtcgttgtcagataaatgtcagtgcttagccgggaaactcgaaatttatcagtcgctgggttgtagacggtcttgaatgtcatatcgttgctcgatgctcgctgctcagttttcttgcaacagaaatagcagtgaaataggtggaccaataatgtatccagtgtcctacaaaccagggcgtgcgtgctacaaatcatgccaccatgcaatgcgagtagctcgatcctcatttggttaccaacgtcaacagttttatgccgcctctagttatgcaggaaaaaggtcacgattttttgttaagcgccgatttacgttcccatcattgcctggcaatgtaagtagatttagtccaaccgaactctgtgttcaaaccaaactgaaccgaaacaaactcgcactcaaggagagatacaacatgtagtttaatatttgtatgccttttagccgtaagcccacaaaaaactaccaaaaatataacacaaaattatatgaacatattttaaccgagcaaaatgtgtgagaaagtcgttgtaactaaacgtattcgtgtgctattgttttacaaacgtcttgctataactgtctatatggtatcgatgttgttgtgcgtaatattaaacaaagcgttgtgtgtatgtatgtaccatgattggtctctaagtcatgtttttgctttctagaagtgcataattcaattcggcaatatttgatatatatggtaatatcaaatgaagaaccgtgtcaatgatacttgctttggtgccataaaaagcaagtcctctagaagacgcgagttactacatgcctacacacaaaacgggtccttaaaatgaagtttgaatgcttttcgttgtactgtacagtgttaaaagtaaatgcctaaatactcttgatttcactattaatgcatacgtatccatagccggtgagtgcaccatccgatatcaacatgaatggctataaccgaaaattgccacaaaaacgtggctatgagatgccaaaatactctggtaagtccatccccaagcactaggatgtgcccaatgtgccatgcgggcatatcccagattgctagatcaaatgcgaattagtacactgattcccaacgccatttcgtttcactagatccaaaaaagaaaatgtgcaaggagcgcattccccagccgaagaacacggtggccatgctgaatgagctaagacatggactgatttacaaattggagtcacagactggtccggtacacgcacctctattcacgatatccgtggaggtaagatatgtttaaacccatcggaccctctgagcgatcgaccactgagctgaaacatgaggaggtcgctttgaggaattatcaaaggaacggaacctgcgatctcaagttctctaatctaattcacaggtcgatggacagaaatacttgggccagggccgtagtaaaaaagttgcacgcatcgaagcagcagcaactgcactgcgcagctttatacagtttaaggatggagcagttctgtcgcctctgaagccggcgggcaacttggactttaccagcgatgaacatcttgaaaatggtattgaaaatttgtccagttcaaaaatgtttgagatcattcagacgatgttgactgaaaagctatccaaccctacctcgcttgaacaacccacgttttgcatgagtcagagcaagtattagtgtttttatcctcttttgttaattattttaatttattatttaatataatttattctggaaccttatgcgttgtggccatatcaaagatgtctccattcatctaatagcaatgttttggccgaatatccaatagtatcggccatgtcacaaaatcaattgttatcaatgattttaagcaaatatgtatgtttaaagtgccgtaaggttcgcaatgttgattttggtatcgtttgtgttatttgtatgagagcacacacagctcatttggactgaagtttttataggccaaagagaatgctttttacttactgaacccatttttaataaataacccaacaatcggctactaaaaggcctcggtgtacttgagtcctgtttttctcttggtttttttttttttttttttttttccttttattaatgcgccttattcagcacattatgcttaatagagcaaccaattctgtgcttcagtgtcgtacgcttacttaaattgactttcattggttgatctctacgtttttataagtttcttgtgtttcttgttcattgttcccctcgcgtttgtctgatatggctagagaccactattgcgtctgaaataagattagaaaactaaggcgtagcttcagagtgacgagcagtcaaatatccccagctaattttgttttatattgctagatgtcagcaaaagtgctattactgttgacggtcagaagaaggttccagataagggtcctgtcatgctcctctacgaattatttaatgacgttaatttcgaatgcattaatattgacggcgcccagaacaattgtcgcttcaaaatgaccgtcacaatcaacgaaaagaagttcgatggaacaggtatgtagttgaattatctcgttgttaacgtcaacccacccagccacatacaatgtatgctaatgtgtaactcaatttttctcaaggtccttccaaaaagacggcgaaaaatgcggcagctaaggcggcacttgcttcgttatgcaatatttcctacagtccaatggtggtgccacagaagaacgtacccctgccaatcgacgacaagtcgtcatcgatggagttgcctcagatacacgcggatacgattggtcggttggtcttagaaaagttcatggaagtaatcaagggccaggaggcttactcgcgtcgaaaggtattagcgggcattgtaatgactgaaaacatgaatttttgtgaagccaaagtgagtccgcagccagcgaagcattgcgaaaccaattataatgccaaacccatccttgatcaggttatttcagtttcgacgggcaccaagtgtgtcagcggtgagcatatgagtgtgaacggagctgtcctaaatgattcccatgctgaaatagtctccaggcgttgtcttctcaaatatttatatgcacagctggaccttcagtgcaatcagggtatagttgtttgatgtatatgctaagttcagtttacgtatactaataataccatagaacttaaatctaagagtaatgcataatctagttgttaaatgttgatatcgaaaatgtacgctttaccagcaagaattgcctacatagaagctaaagttccgatttgtgctcattaaccgtatacgagcacaaacttttattttttctttcttttacacattataaacaagcactttaagctaacttatgttttccccgtctgatcgttttagaaggtgtttatacaaaattaaattttaagggcaaaccatcttaaaaataaacaatttgtaaacattatcaaatctaagcacaaacattaaaaatctcgaatatcctttattttgaatggcatttaccttaattacttaattactaacatttcagttgtactatttcattgaattattatctaaattgcaaaccaattattaagtagcaaagggaaagcttctaaagtaacattgtttcttttgaattcaatgtaatgcctgtggcatgatttgggcccagtgaacacatttagtattcttaagtcaaaactcacctatcggaaacacaattaatgatagttcttttgacttggaaataagagtgggcattataggaaaaggtatttgcctttggctcaaaacaaaatcataaaatatgtataagttgcgtagtattttgcgattggcattttgctttcccagcttaacattcttactaaaacatgtttcgcattgttttgttggacttcttttcatgtatacctttgcgtattggtgaaaagaatgagatttaaacataaaactacttcgttttactttaatttatatttgattactcttattcaattttctcctaaatttagccacagcatatcagtcgattttcgtgaggaatactgatgggcaatacccttataaactaaaatccggggtacatttccatttgtatataaatacagcaccttgtggggatgcacggatatttagtcctcacgaaaacgacactggtgttgataaacatccaaataggttggtacaaactgcattctataaatactcgatatttttatatgaagaatactttctctacctatttacacatttaaattgtattattcaagtagaattataatgatttatatttgtacgcaataagaaacgacatttccctgcaggaaacacgttgagattgcaaaaaaaatttgtatttgcataaaaaaaatatatatttgtatatgtacaattgcgtgcttaagaatgccacaagttaccgtcaatgaaattgcgacatttgttcattataaataacttttaaaatctggaatgcaagcatatgccaaaagaagaaagcactatatcgcacactttcatttcaatttgtggcaacataatgcacgaaattgttcatattaaatattagaactatcaatttgaacatgagcatgaatgtatacaagaaatcaggtattttaaagcttttactctttgtgttgagtctgtttagaaatgtatttgcccccggctttttattcgccatccgttgtctgtatgtatgtgtctgtaacgattcagtcaagtgattaagatgacaaggatatacaaaacatgggcttccgcttccacaattttgttaaatacgtatttgtatgcccttgcagttgttatagaacgcagagaataaggcatctcttccgctattaataaactattgcatagtctatatggcaatgtccgtctacaaacttcggagctccgaagtttcctttcttgtttgcaacaatcgtttaaaatgacagttcgaaataggttaagcataaaagtacctaccatttgaatcagatttaataggtgccggtctgagggattactttgaagtatatgtgagaaatgaattttaatgataagccttgccgcccgccactccctaccacataatgaagtaattcataccatgttttgtttccagtattacttggcatgttttaaacgtagtttttgaacaagctaataattatattttccatactcacattttataatgccgacaacgaatcatacatgaaataatcatcaatcaacagaaaagctcgtggccagctgcgcaccaaaatcgagtccggtgaggggacgattccagtgaaaagcagtgatggtatccagacgtgggatggcgtattgcaggtaacccgattgggcggttgctattagatcgtggtaaaccatcaacattacaacatttatgacttttgtgcagggccaacgcctgctaacaatgtcgtgctcggataaaattgcccgttggaacatcgtgggcatccaaggctcactattgtcttccataattgaaccggtgtacctgcattcgattgtgctgggaagcctgttgcatccggagcacatgtaccgcgcagtttgcggccgaattgagaagtccattcaaggcctgccaccgccgtaccatctgaacaagccgcgcctggcactagtcacttcggccgagccgcggaatcaggccaaggctcccaacttcgggatcaattggaccattggggacaccgagctggaagtggtgaactcgctaaccggtcgaaccattggcggccaggtgtctcgcatcacaaagcaggcgtttttcgttaagtatggatttctaatggcaaacttgcccggtattttagtccgcaaagtaaccactgactatgggcaaaccaaagctaacgttaaggactatcaggtgagtgtttatatgctggatcatttgaggatatgcatcaaattgtttgccacatctgttcttgtagatcgcaaagctagaattgttctctgcattcaagcgagaagaccttggcagctggctgaagaaacccattgaacaagacgagttcggtcttgccgaatgactgcactcagcactattatataattttaaaaaagacaacagcaacggcaagcaattaatagaattagacgacatagattttatgacaaattctgatatagaatgcaaattatattgggtgcaagcacatcgctatgatataccacttcatatgattgacaacctgccaactttgcgtacccattgcaatagcaagcacaaagatgcttatgctcgaaatataaagaacagctctagaatatttatagaatagaatgtagtttttatgctggaactgagtaaaggagtattatggcgtttttttttgaatcaattcatttttaaattggctaaagcaatttctttatcatttaagtttgtgacttgttttgttatttgaatgaatgcgatgcgttgcgatgtcgtcgtaaccacactgtcgaaactttcaagtgagttgtgtctttcgttttccgtattttatatggtaaatatggtaatatggaatgttacgaaacagttaaaagatatatataaaaccaaaaaccaacaagtacactcaatgaataacaataatccaaacagaaatctagaattcgttctcttatcgattaagcaatgtattttgttaagtaatgttatttgcaacgacataataattataataataataaagtcacgcttaatataagcataagaacattttaggtgaatctgcgttaatttcgcgtacttttcttcagatcagatataaacctaagctttaatcgattttcaatgaataaaactgtgttcttggttgaaaaacattatatctatgtaacaacattttatcaattaaattacgtagatttctttgcatattagttgatacaaatcacatgcaagcgaaagcagataagaataaaaatacatatattagttaccaattttgtagcatgctgataaaggcatttgaactacctaactaagtcttatcatgaagcttgtatcgctatttcgtatattgtagaaatacatactat

SEQ ID NO: 36221 - DNA, 2442 bp, DROSOPHILA
agattccgagcaacaaaaaagcgacgaagggtcattgttattttttctaatgcaatgtaatgcagcaaatgtgcagatttgaacaagtgtaacgcgatttatgtttaatccgcatcgaggaaccaaatcgaagtaaacgcgcggccagagaaaagagcagcaccgcaccgaagataaaacaaacaagcattgatttgtttgtccggccatgtcagtgtgtgtgtcacaagggcttgcaagtgtgtgcgtgtgtccgtgcgtgtacgtgggtgcttttttttttctcccgagtgccgccaagtgaaatatgcaattgcacgccactgcagttgcagccacacaaatcctatcctaatcgacgaaacagcgaagcgaggaggctagaatcggctgcccaacgaagagagcagaaccgttaacaaatgacactctgccgatacagcgaagtaaaaatcaataattagagcaaaaagagtcatgttaaacagcgctaataacaattctccccagcacccggtgagtgcaccatccgatatcaacatgaatggctataaccgaaaattgccacaaaaacgtggctatgagatgccaaaatactctgatccaaaaaagaaaatgtgcaaggagcgcattccccagccgaagaacacggtggccatgctgaatgagctaagacatggactgatttacaaattggagtcacagactggtccggtacacgcacctctattcacgatatccgtggaggtcgatggacagaaatacttgggccagggccgtagtaaaaaagttgcacgcatcgaagcagcagcaactgcactgcgcagctttatacagtttaaggatggagcagttctgtcgcctctgaagccggcgggcaacttggactttaccagcgatgaacatcttgaaaatgatgtcagcaaaagtgctattactgttgacggtcagaagaaggttccagataagggtcctgtcatgctcctctacgaattatttaatgacgttaatttcgaatgcattaatattgacggcgcccagaacaattgtcgcttcaaaatgaccgtcacaatcaacgaaaagaagttcgatggaacaggtccttccaaaaagacggcgaaaaatgcggcagctaaggcggcacttgcttcgttatgcaatatttcctacagtccaatggtggtgccacagaagaacgtacccctgccaatcgacgacaagtcgtcatcgatggagttgcctcagatacacgcggatacgattggtcggttggtcttagaaaagttcatggaagtaatcaagggccaggaggcttactcgcgtcgaaaggtattagcgggcattgtaatgactgaaaacatgaatttttgtgaagccaaagtgagtccgcagccagcgaagcattgcgaaaccaattataatgccaaacccatccttgatcaggttatttcagtttcgacgggcaccaagtgtgtcagcggtgagcatatgagtgtgaacggagctgtcctaaatgattcccatgctgaaatagtctccaggcgttgtcttctcaaatatttatatgcacagctggaccttcagtgcaatcaggccacagcatatcagtcgattttcgtgaggaatactgatgggcaatacccttataaactaaaatccggggtacatttccatttgtatataaatacagcaccttgtggggatgcacggatatttagtcctcacgaaaacgacactggtgttgataaacatccaaatagaaaagctcgtggccagctgcgcaccaaaatcgagtccggtgaggggacgattccagtgaaaagcagtgatggtatccagacgtgggatggcgtattgcagggccaacgcctgctaacaatgtcgtgctcggataaaattgcccgttggaacatcgtgggcatccaaggctcactattgtcttccataattgaaccggtgtacctgcattcgattgtgctgggaagcctgttgcatccggagcacatgtaccgcgcagtttgcggccgaattgagaagtccattcaaggcctgccaccgccgtaccatctgaacaagccgcgcctggcactagtcacttcggccgagccgcggaatcaggccaaggctcccaacttcgggatcaattggaccattggggacaccgagctggaagtggtgaactcgctaaccggtcgaaccattggcggccaggtgtctcgcatcacaaagcaggcgtttttcgttaagtatggatttctaatggcaaacttgcccggtattttagtccgcaaagtaaccactgactatgggcaaaccaaagctaacgttaaggactatcagatcgcaaagctagaattgttctctgcattcaagcgagaagaccttggcagctggctgaagaaacccattgaacaagacgagttcggtcttgccgaatgactg

SEQ ID NO: 36222 - protein, 632 aa, DROSOPHILA
MNGYNRKLPQKRGYEMPKYSDPKKKMCKERIPQPKNTVAMLNELRHGLIYKLESQTGPVHAPLFTISVEVDGQKYLGQGRSKKVARIEAAATALRSFIQFKDGAVLSPLKPAGNLDFTSDEHLENDVSKSAITVDGQKKVPDKGPVMLLYELFNDVNFECINIDGAQNNCRFKMTVTINEKKFDGTGPSKKTAKNAAAKAALASLCNISYSPMVVPQKNVPLPIDDKSSSMELPQIHADTIGRLVLEKFMEVIKGQEAYSRRKVLAGIVMTENMNFCEAKVSPQPAKHCETNYNAKPILDQVISVSTGTKCVSGEHMSVNGAVLNDSHAEIVSRRCLLKYLYAQLDLQCNQATAYQSIFVRNTDGQYPYKLKSGVHFHLYINTAPCGDARIFSPHENDTGVDKHPNRKARGQLRTKIESGEGTIPVKSSDGIQTWDGVLQGQRLLTMSCSDKIARWNIVGIQGSLLSSIIEPVYLHSIVLGSLLHPEHMYRAVCGRIEKSIQGLPPPYHLNKPRLALVTSAEPRNQAKAPNFGINWTIGDTELEVVNSLTGRTIGGQVSRITKQAFFVKYGFLMANLPGILVRKVTTDYGQTKANVKDYQIAKLELFSAFKREDLGSWLKKPIEQDEFGLAE

SEQ ID NO: 36223 - DNA, 3018 bp, DROSOPHILA
cgcaatgaaatggaggcatgcttaggtgctccgtgcagtacaaagccaatagtgcattgcacccctgactatgtacgattcccacgtaatctgtgtggaagttgtgctgagtgccatgagtagttaagaggtacccgatagtcgggaaccgtggctcgctttcgtgctcacggcgctctcctgcgcattcgaactctttggcgctgatatattcttggaattatgcacaaagactatagactatatggcacttgcatacagcgacttactggctgcgggttcattctgttcggaaatcaagagagagcagtgctgccttctgtcgtctgcgacgtcgacagagccagaagcggcagcctcatttgctgccagtccatttttgagcttcaatcatacgcgggcactttgttgttgtttgtccaagctgttgggcggtgcgctaggctaaccgttctattcttgttaataattggagtgatttaaacaagttgcgcgtgcattgtgcttgcgaaagtagattcagtgtgcaaatgattagcgaaacagcgagttcccaatttggtgccattttctcaattttcatggcccggggtttactttcgagtgctgcgtcgtagatcgtggttttttttttgctcccaaagaagtgacgtccaacgggaaatatacaatatacacatgactcttttgcttttccgcgtgtttattgtgcttattttttatgtgagtgcgacagccagtgcccagagtagtgctgatgcatccgaaagaaatagtgatgcaaacagaaccataagtagtggcagccaaacacgaaactgtccttggaggtacaaggcttcgacagccccacatgttgcagctaaaggagcaacatcagtgtaactgacagcaaaaaaaaaaacattcggcagtcaaaagcatacacagcagacgcaacatcagcatttagagaaataagttcgcaaagttcgcgtccaacggcaacaggcagtgcaacatgctgctggcggaaatcgggcaacaggaaaacatgctaccgcccccctacgtagcagcaatcaagcgaaagatcgatccagagcaacagcagcaacgcaagcagcacagaagcaacatcctcggatgcaacaagagcagcagcatcaactgcagcagcatcaacggcgacaatcgacaccttcagaggcagcagggcaaaatgtattacaactccagttcacgacccttttggaggaaatgcagatcggctgccccaacgaatctcatgaccacaatacccactaacaacgacttgtgcaacacagcagcagcggcaacatgtgagtttgtgattctttgcctctttgctttgcgctgttttgcctgttaattcagcgttcgctttttgttatgatgcggcctaatcgcaagccacacgtttcgggtgtacgttcaaaaacagctgtgcacacttgcagcagtcagctgattgccagtcccacacgcacagtggtgcaaagcacactagccacatatcgcagccacacatactgcacattcatcgggggctgggtcgtgttttattttctaaatatttcgaacgaccaatatattcaaaaacgctttgtgtccatgcatcgttgatggcttccatttgacaaacttatttgaataaaatgtattcttatcaaaggcaattagttggcttatcgccgagacctgaggaatgtaacagctctagactgaaaacaatatgaactatgaaagtggtaccactgtaccgccgaccagggctatcagggcaaatgcaaagtgctaagcttgaccggtcaaggattctttggaggaaaataaagcatcatctcaccaccaccaccatcatcatcatcatcatcattgcggcctttgttgttgtcgctgtgaacgtcatgatgatcgcatgcaataaatgcgccggcaacaacaatgaaatcaacaacaatcacaaaggagcgagggagaggcaacgcactcgcgaggtcaaagtacgtcaatgaacttcgccgccgaaagaaaagtttgttttcgaggttgaatttaatggcaggagaaatggcgagttttgttcggctactgttatttggttttatttttgtttttgcttttgcttctggttcttttttcgatttttttggcaatggcattggcattggcaaaaacatcagcagtttctacttagcgccccatatcgaaagctcgcgaaattaaataaacaataggttcaatgcacctaagacgcagtagaattcagtttgagaaagctcccttgatatctgcgaaagctgctcactcggttggccttcagaactcggaaacgtaaatcgcatatcgcatcaaatgcacaagcacccgcgcttactacccttatattatttaataagaatcattcaataatgattggatagtattcgcattcttagcgcaacttaaaacggctttgcgtataccacatgtgtgacatcacgttaagtatacgacatgtgtgacatcgcgttaagtatacgacatgtgtgatttgtctcccgcactctcccactagttgcgtaaaaggtatctgatagtcgagaagctctcttagataagagagagagtaagattactctaccattttcgctttcacccaaagaacggctagttttctcctgcgcagcgtccaactaaatcgcattaagtataccacatgtgtgacagctgacaagcaaagtgattcttggtgctccgaggattaataaccgaaaaggtgattaaaaaccaagccaataaaatcaacttccgggcgagaactgtcagagtgcttcgatttccgcataaattcgacgctgcatgctgcactttatttatctcagtgtcatttgtggcttttatatgcatgttttcgggatctctgtaggttttggctacccggcagacaggtggctctcaagataagcggggatccgatacccgcctccctttcgcaaacgtgtttgcaaacggatcgtacacgaaagtcggggc

SEQ ID NO: 36224 - DNA, 567 bp, DROSOPHILA
atgctgctggcggaaatcgggcaacaggaaaacatgctaccgcccccctacgtagcagcaatcaagcgaaagatcgatccagagcaacagcagcaacgcaagcagcacagaagcaacatcctcggatgcaacaagagcagcagcatcaactgcagcagcatcaacggcgacaatcgacaccttcagaggcagcagggcaaaatgtattacaactccagttcacgacccttttggaggaaatgcagatcggctgccccaacgaatctcatgaccacaatacccactaacaacgacttgtgcaacacagcagcagcggcaacatggctatcagggcaaatgcaaagtgctaagcttgaccggtcaaggattctttggaggaaaataaagcatcatctcaccaccaccaccatcatcatcatcatcatcattgcggcctttgttgttgtcgctgtgaacgtcatgatgatcgcatgcaataaatgcgccggcaacaacaatgaaatcaacaacaatcacaaaggagcgagggagaggcaacgcactcgcgaggtcaaagtacgtcaatga

SEQ ID NO: 36225 - protein, 188 aa, DROSOPHILA
MLLAEIGQQENMLPPPYVAAIKRKIDPEQQQQRKQHRSNILGCNKSSSINCSSINGDNRHLQRQQGKMYYNSSSRPFWRKCRSAAPTNLMTTIPTNNDLCNTAAAATWLSGQMQSAKLDRSRILWRKIKHHLTTTTIIIIIIIAAFVVVAVNVMMIACNKCAGNNNEINNNHKGARERQRTREVKVRQ

SEQ ID NO: 36226 - DNA, 3260 bp, DROSOPHILA
tgtagttttatataaatcttcaaactggattcaagccgtcaaccatgcgcacatcggctttttatgaaactatgcgaatgtgaatgctatgtggatagcatgattggcctgcctgccctatgagttcactggttccgaaactgaaagcgaaacttaaaccgaaaccgaacccaaaactgttgaattatatgaagaaaaaggtttccagtaaaagttttcgggaaaaaagttgggatcacatgggccggtagatttccgttttctgagctccttggcagttgacgttgtgctgtagaatattattatcaacatgttatcggaacagttcaagacactttcaaaacaaactaaacattttcacaaaactatcaaaattattgccgtttgtttcgcttcgttttgtctttagtgagcacacataaccaacaccaaccacttcgactcgatctaaatttttcaaaagcactggacaagcggagaagcgcaaaaactgcatactttatcgaataggttttaaatcaaagttcggggatcaaaggttggcatttgaactgcgcgcccccacacagcatagccccaaataacacaagtggtctgttgttgtcgcaagcggaaaacccatccaatggcatagctcatacgacccgttggttcgctttatctaagtaggaagcgtgtgggggggcgcacgtggtcgagacctggtcgaaacctggtcgaaaagccccacaaacacagtgtgacttgggctaggttttatttgccgtcgtcaccgccgccgccagcgaaagagtcggcaacagagatatagaaagagagagcgacagagcgatgaatgcgctgtattcccgctttatcagcgaatgattcattgtgtcgtcatcgaaatgtgaattgcacgactatgtctctgggctttttcgctgtgttttcttggcgcccagcttttgtttatatcgcgagcgttcgctaatcgcgccatttagttgtctttcaactgcaagtgcgggcggttagcgaaggttcgccaacaaattgaaatattgaaatattcctaatccataaccaacacctgatctgatcaccgctcactgattagacaaacccagagagacaagacgaaaaaaactctctgttgccaaacccgaaactaattcgaacgcgtttatgtatgcagtggtgcgatgcatttctttctcgaagattttctgcaagcacatctacctaagatttgtaagtttggatcccgcagtttgagatttataacatttatgtgcaggatctgaaaccatagctcattcactcatcaccactacgacttactaatgccctgcccactcttccagatgacaaaatgcagagttgcaacaaaaacagcagtagccgtatcaccaccaccaacaacaacgttactacaactagcaacattagcggcaacagcagcaacaagcgctgccctcagaagtacaccggcaacaccctagccgtcaacagtaacatgctggcctatcagcagcaagccaccgccggtggcaagaactccactcggaagagtcgtcacaacaacaacaagcaaaatcatcagcagcaacaacaacaacagcagcagcagtttgatcatatccacaagcgcaatggaaccgctggaggcaccggatccgagtgctctcccgctgcacccacatccaactggctccaacggggctacggacgacagtttgtccattcttcatgcatcgaaggtgagtgcttgcacctaataactttattggtagtgggtcaaacggggtaattacatacatggataagcaatagggatcagcatcaggccatttctctgagtcacttgaccaccaccactgaccaccactcttgcctcgaatttcgatggttctgcggggtatttagtcagtcgtccgcccacatacgtatatatttgatcgtatctcggctcatgggtatcggagtaaagacgacgctgaatcacgctttcgcattgtttttaataaaattccaagcaaatcggccggcatctgaagtgaatcacacactcagcaacgaattcggcgtcatcgccgctaacggcaatggaaacgggaacgccaatttggatcgtatcgggtttgcggaacgggaacggttatttcgagagcgtcattcccgcaaacggatgaatacaaagagattcgatctatgtttctgggtcagtggatttatgggcgaaggattcgagtttctcattacaatgcctctgaattgagttgccacaatgagcagcccaagcaaagattatatttttgtcaaaccaattctctttcgtaaatgattttctattattagtgtgtggttttcccaccttaaattttccatactgcgcttccactcgaactgaaacgatatctatttacggaaggttgttatcaaactggctctatctttgggtagccattcgatggggggtaagccctaggttaccaatatttcaattggaatgctcgagcacctcaccacttgaaataagccttgttcgcaattgataaattaccaggatatatatatgtatgtatgtacgtttatttagggacatagaaagcatacagctactttcattcgggttcttggccgtggatttcgctttcgtttgcattaaaaatcatttaaaaacgcggcggatcgacataaacaaaagaaaattaaataaacaaacaaaggcatattcttcgtagcagtcataaaaacatgaggaaacctagcaaaaaatttacatttttatccactttcataatgtatgcgcatcgggaattttgcttgtctatttattgatcggcaattatgattgaaagcggatggctggctgattgtaatggcacataaatcactcccattaattgattattctctgtgtggaaacatacattaatatgtaatgtttgtttgcatggaaattggattgatactcatataatgtgtggtatacaatcacagtcccgataccgaatttattattaccgatttcagtgtaattttgtttgttagaattttccactatttatttttggcattaatcagcgaaactttccagaatcgggtctaaataattcttgttatcatcgaactggaataaaacgtgtatttgtggggaaagctaagacgcaatacagagcagctgattagagctcagattttttagttcctagtcagctggcgcctcttgaccatttgtgcttgctatttgctcttgctattcagtgtttgctatg

SEQ ID NO: 36227 - DNA, 857 bp, DROSOPHILA
caagtgcgggcggttagcgaaggttcgccaacaaattgaaatattgaaatattcctaatccataaccaacacctgatctgatcaccgctcactgattagacaaacccagagagacaagacgaaaaaaactctctgttgccaaacccgaaactaattcgaacgcgtttatgtatgcagtggtgcgatgcatttctttctcgaagattttctgcaagcacatctacctaagatttagttgcaacaaaaacagcagtagccgtatcaccaccaccaacaacaacgttactacaactagcaacattagcggcaacagcagcaacaagcgctgccctcagaagtacaccggcaacaccctagccgtcaacagtaacatgctggcctatcagcagcaagccaccgccggtggcaagaactccactcggaagagtcgtcacaacaacaacaagcaaaatcatcagcagcaacaacaacaacagcagcagcagtttgatcatatccacaagcgcaatggaaccgctggaggcaccggatccgagtgctctcccgctgcacccacatccaactggctccaacggggctacggacgacagtttgtccattcttcatgcatcgaagcaaatcggccggcatctgaagtgaatcacacactcagcaacgaattcggcgtcatcgccgctaacggcaatggaaacgggaacgccaatttggatcgtatcgggtttgcggaacgggaacggttatttcgagagcgtcattcccgcaaacggatgaatacaaagagattcgatctatgtttctgggtcagtggatttatgggcgaaggattcgagtttctcattacaatgcctctgaattga

SEQ ID NO: 36228 - protein, 229 aa, DROSOPHILA
MYAVVRCISFSKIFCKHIYLRFSCNKNSSSRITTTNNNVTTTSNISGNSSNKRCPQKYTGNTLAVNSNMLAYQQQATAGGKNSTRKSRHNNNKQNHQQQQQQQQQQFDHIHKRNGTAGGTGSECSPAAPTSNWLQRGYGRQFVHSSCIEANRPASEVNHTLSNEFGVIAANGNGNGNANLDRIGFAERERLFRERHSRKRMNTKRFDLCFWVSGFMGEGFEFLITMPLN

SEQ ID NO: 36229 - DNA, 4892 bp, DROSOPHILA
aatgtggttcccatttccccgatgcgcagagtatcaacgacttcgcccaaactctcgatcataaatttcgctatgtttacctttcagtcggacgtagaaatattataggttcttctatgctttttcaaggctgcttggggatttcggcgcgtgcgtgtgtcgccgataatgctccattatagggcctgtcaaaaaagcgtttggagagcgttccgagagtcggacagatggccagccagaagccgaaacacgcccaaaagcggccacgccttatctaatcgctgaccacgcactcgacgcccaatgtactctgcccatatgtacatacatatgtacgtgatggacatacacatgtgggtatgtgggtgctcctctcacatgtgcgagtatacaagtatagtacatatgtaaaccataacccgatccagccaatatcgtttcccgccgcctggtgatcccatcggctctttgggcatccaactcacgtccgggtgcttagtggcccggcgtccttcggccgggcgaagtcaacaaacccacctgccatatgatttatctatgcgcgcattgaaattcaattttagcccgagtggctgccgccatctgggccccctaggaaccccaggggggtgtgcacataacactccatatccgttgatgatgtactgcttggggagcacataggtgtttaaggaagtgctcgagcgcctgtactccaagtaggccggtagctgtttggaagcggaagagccactgccaagtggtcgataagaaagtcgagtggcggaacaggaagacgcaccacatgaccgagtttcggtgcacgaaaagcgtcaactctaggatcactgagagataaccattaaccattggggaagctggttaattgtagttagactactggctcctttcaaactctttcttggaacttttgacctggaaacccatggatccgaatgattcgttcacaacgagagttaaaatgaaataaaatgaataaatgcggaagcgcagctacaagcacatcataatagtcatactaaaagtctataattgtaatgcgtcatcacaagcccccagccccccagccccccagccccctggtccaccccccccctcgaattagcccctgccccctgggtggcaaccaaataagctgaattggcgaaaagtcgggtaggaaccccgcacaatttgcgtcaatttccagtcatgcgtaaccttccccaaatcaaatcacacactcgaaacttaaatacgtaccacttacacggagagaaataagtttaaatagtaactaatacttaaagaacattcttacttggttcacacgcacttgttcgaaaatcgacctatggacttatatttattaatcaatcgaaactgcaatagaaggcacattttgcatgctaaaatattggtattttatttgttcaatatttgaagcagtattatattataatatgtcccgaaaattccaagtgtaatgaataataaaacagagaggtggaaaacgagcaaaactctaaagcacgtggttctgttgataagcgtgtgtgtcgagcattagctaactgcgcgtgcgtgtgtgtgtgtgtgtgtgtgtgtgtgtacgagtgtaggctgttatcagaaatttgaatttccaaccgaacgttttattttatggtaataggatcgtgaaatttgcctaatgaattaaacgcatagtttaataaatacaagcccatattcgaattttaatagtaggcagtttaataacagtcgttcttcataaataagttgatttactaatttacttaaaattaattaaacataatacttgtaaataaaagccaagaaatcggcttacttacatcatatgtaagtaagtatgttgggaaatttcagcgatcaatttggatctcattttgaaaattaattccccactctctcccttttttcttgcagacaaactcctaggtcatcacaatccgggccatcgcaatagcaccagcagcgacgcgaccagcgaggatatagactccagtagcgagcttccaaacaagtcgaagggaaattcatgcgccggcagcatccatgcttcaggcggcagcaagagtcgctcgaagcgccaccaaaagcagtccggccagcagactcgcaatcccgatcacaatggccaaaggaccggagcagctaccccctgtacgggccagaaagccaagcaggggaatgccaagtggcgccagcagcaacccaatcccagcagcaacaaccaacagcagcagatgcaacaacagatgcaacagcagaagcgcggcaggaacaagaagcccgggaagtggagcaacaacatcattgacaacccaaacagcaatcacggcggcagcagtcaacagaagacttgcgacagcagctcctcctctgcgctgagttcgccaaccagttcggccaccacatcggccaccagttcgcccaccaattcgcccaccagttacccccgtgccaatggaaatcggaagcggatcgaagcggcactggaatggcgccgggagcaagagcttggtcgccagaatgccaacttcctggttcctcctctccgccagtacgagcaactggagtttgacgataaaaccgtggtgcagcaactgcgtcgacacatcatagataatcatctgctgagggtctacggctttcccgtggattcggtggtccacgaaggcgccatcgaaatcttcaagtgcatgccgcacatgagttttgcagccgcgcttgcggaaactgctcaggccgttacagtgatcaactaccacgacggactgaccaaccgcgccgaggaggaggtggccaattcgaccgattcgggcaacagttcaccccaatccttagactccgaatcaggcggcgagtggagcggcagtgaatgcgagtcctcgaactcatcgtcctcctccgccggcgaagcagcgctgggtctcgagttgaagtactgccattttgtgccggtggaaaggagtctgtccaagccttgtgcgcgctgcaagcgccactttctggttgacgagctgacgggtcagtatttgacccatgaggaatgccaataccactcaggcaagtaccagcggtactacgatggcgtcagccacggacgctggacgtgctgcaacgagggcgaggaatcctcgccgggatgctgcctgggcgaccgtcatgtgtggtcgggatcggtggtgggggtcaacgggccctactacgatttcgttaggaccgagcaccgaggatccggcgaggacgagcccgccgtatacgccctggactgcgagatgagctacacgggtcgtggtctggacgtgaccaaggtctccctggtggcactcaacgggcaattggtttatgagcatttcgttcggcccgtgtgcgacataatagactacaacacccagtattcgggcattacggaaacggatctgtgttccggagccaagagtctggccgaggtgcaaagggatctcctccagctgatcacggcggacaccatccttatcggacatggattggaaaacgatctgcgagcgctacgcttggttcacaacaccctgatcgacacctccattagcttcccgcactgcaatgggttcccctaccgccgggcactgcgtcacctcacaaaggttcacctgaagcgtgacattcaagctggcgacggcaccacgggacacagcagcttcgaggactcgcgcgcctgtatggaactgatgctgtggcgggtcaaccgtgagctggatcccgcttggagctgggacgattagaggactcgttcgggtgcgaatctgtgacatttggggtggggtggggcattgggggatgggcagcaagtacttttagttgttaagccagctcgtaatagtactgtattcaaaaagaaaaacacaatcgtaaaatctcagctgggtatctctcctggcaatcggtttctatagcacagactaactgatttatctcggttaaacgtataggtgcccattgccaggggttgggtcagcatatacatatacatatagaatatatcaagtaaatcgcaaaattgaaatgacaaaaatggcaaaaggaagcaagcgaaggaggaggaggacaagcccataattatatgcggtacataaggcacattttgtaagcgtatatttatagataaatattactttaatctacatatgtatatacacatattgttttttttttttcttgattaatttcgagccacgagaaaatgtactgaagttttaactgtgatgttttttcactttctcacatatttacacgacaaacggaaatgaaaagtaaaagcttaaaaaaaagaatagaaaatacaaaaatatatacatacatgcccgcgcacattattttgttaagaaacgctaaagaaaggcaatccaaataattttaattttgaccaaaactttcaactaaaatcactccatttatcttcatttaccatcaggtttcgtttcgtttcgtttttgtaccttcccaatcatttcttttattttttttaacgaataaagcatctcatactcgtatacaaaagaaaacgaagaaaagtaaagtttaacttgaactagtttatacactatgcataatcgtaagttaggttaacctaatgttttctgcaaacgttttgattatttatttaacgaatcacgcgacaagttcattgaaaatttattcaagtgtataattttccacattgaactccattttaggctaagaaatacttttaattttctctccagaagctgtcgacgtttttaactatgattcctcgactctggtgtcttttgaaacgagccgaggagcactttaattgaaaatcgatgttcctagcagaataagtttcagcacaaatacactgc

SEQ ID NO: 36230 - DNA, 1997 bp, DROSOPHILA
atgcggaagcgcagctacaagcacatcataatagtcatactaaaagtctataattacaaactcctaggtcatcacaatccgggccatcgcaatagcaccagcagcgacgcgaccagcgaggatatagactccagtagcgagcttccaaacaagtcgaagggaaattcatgcgccggcagcatccatgcttcaggcggcagcaagagtcgctcgaagcgccaccaaaagcagtccggccagcagactcgcaatcccgatcacaatggccaaaggaccggagcagctaccccctgtacgggccagaaagccaagcaggggaatgccaagtggcgccagcagcaacccaatcccagcagcaacaaccaacagcagcagatgcaacaacagatgcaacagcagaagcgcggcaggaacaagaagcccgggaagtggagcaacaacatcattgacaacccaaacagcaatcacggcggcagcagtcaacagaagacttgcgacagcagctcctcctctgcgctgagttcgccaaccagttcggccaccacatcggccaccagttcgcccaccaattcgcccaccagttacccccgtgccaatggaaatcggaagcggatcgaagcggcactggaatggcgccgggagcaagagcttggtcgccagaatgccaacttcctggttcctcctctccgccagtacgagcaactggagtttgacgataaaaccgtggtgcagcaactgcgtcgacacatcatagataatcatctgctgagggtctacggctttcccgtggattcggtggtccacgaaggcgccatcgaaatcttcaagtgcatgccgcacatgagttttgcagccgcgcttgcggaaactgctcaggccgttacagtgatcaactaccacgacggactgaccaaccgcgccgaggaggaggtggccaattcgaccgattcgggcaacagttcaccccaatccttagactccgaatcaggcggcgagtggagcggcagtgaatgcgagtcctcgaactcatcgtcctcctccgccggcgaagcagcgctgggtctcgagttgaagtactgccattttgtgccggtggaaaggagtctgtccaagccttgtgcgcgctgcaagcgccactttctggttgacgagctgacgggtcagtatttgacccatgaggaatgccaataccactcaggcaagtaccagcggtactacgatggcgtcagccacggacgctggacgtgctgcaacgagggcgaggaatcctcgccgggatgctgcctgggcgaccgtcatgtgtggtcgggatcggtggtgggggtcaacgggccctactacgatttcgttaggaccgagcaccgaggatccggcgaggacgagcccgccgtatacgccctggactgcgagatgagctacacgggtcgtggtctggacgtgaccaaggtctccctggtggcactcaacgggcaattggtttatgagcatttcgttcggcccgtgtgcgacataatagactacaacacccagtattcgggcattacggaaacggatctgtgttccggagccaagagtctggccgaggtgcaaagggatctcctccagctgatcacggcggacaccatccttatcggacatggattggaaaacgatctgcgagcgctacgcttggttcacaacaccctgatcgacacctccattagcttcccgcactgcaatgggttcccctaccgccgggcactgcgtcacctcacaaaggttcacctgaagcgtgacattcaagctggcgacggcaccacgggacacagcagcttcgaggactcgcgcgcctgtatggaactgatgctgtggcgggtcaaccgtgagctggatcccgcttggagctgggacgattagaggactcgttcgggtgcgaatctgtgacatttggggtggggtggggcattgggggatgggcagcaagtacttttagttgttaagccagctcgtaatagtac

SEQ ID NO: 36231 - protein, 631 aa, DROSOPHILA
MRKRSYKHIIIVILKVYNYKLLGHHNPGHRNSTSSDATSEDIDSSSELPNKSKGNSCAGSIHASGGSKSRSKRHQKQSGQQTRNPDHNGQRTGAATPCTGQKAKQGNAKWRQQQPNPSSNNQQQQMQQQMQQQKRGRNKKPGKWSNNIIDNPNSNHGGSSQQKTCDSSSSSALSSPTSSATTSATSSPTNSPTSYPRANGNRKRIEAALEWRREQELGRQNANFLVPPLRQYEQLEFDDKTVVQQLRRHIIDNHLLRVYGFPVDSVVHEGAIEIFKCMPHMSFAAALAETAQAVTVINYHDGLTNRAEEEVANSTDSGNSSPQSLDSESGGEWSGSECESSNSSSSSAGEAALGLELKYCHFVPVERSLSKPCARCKRHFLVDELTGQYLTHEECQYHSGKYQRYYDGVSHGRWTCCNEGEESSPGCCLGDRHVWSGSVVGVNGPYYDFVRTEHRGSGEDEPAVYALDCEMSYTGRGLDVTKVSLVALNGQLVYEHFVRPVCDIIDYNTQYSGITETDLCSGAKSLAEVQRDLLQLITADTILIGHGLENDLRALRLVHNTLIDTSISFPHCNGFPYRRALRHLTKVHLKRDIQAGDGTTGHSSFEDSRACMELMLWRVNRELDPAWSWDD

SEQ ID NO: 36232 - DNA, 2883 bp, DROSOPHILA
tgcgtatcgttgttcgccagttgtgtgctgttgtaaatcggcctggtagtgggtggctgccagtcctcgtcggtgggcgacatggattcggtgtccgcatcggctagacgggattgccgctggctggaagagagggggggcggtgtcaatgggccattccactccatctcgcgtcgctctatggacacatcgcgcagaaaagcctcgatgcgctgcactttttcggttgtgagcatgggctgtggtatgtcttcctggccgggattagccacaatttcccgttcactcacagccatgctatcgggaggcaagggttcttgctcatcctcgctagaatcggatatggtgatacaggaggcggcgtcgtcgtcgccggatacgttctcttccgtagtggaggaaatgcaaatggagatctccggcttggccgagtgctcctcatttatgggctgcactttcaaattgctgatgccagcggacaggagctctacatcgcccacatttgccacatcctggctgcagccgtcggcgctcagctgcaaggcttccatgtagtcggaattgtcgagttctgtgtcctccgtatttgccccgcaggacggagcgggtgctcccacattggcgcgcatgggagctgctggcagtttccttgttttctggtcgttcctcttttctggatgatccttcggcgcatgggacacctggagtcgttttttgtgggaggatagcgtcaaattggcgaacttttgattgaagggaacttttactttgctcgggtcgaccgcattgaagagcctatacttatgatccgccattttgggggcgtcgttggggcatttacggtaaatcaatctctatgaatatgctttaagcaaaattcgtatttgctattattctgtgcgcgtcgatttacgttcatcgttatcgatagactatttgattttccggcatctagctagtgctgttcgaaaatgtctaaaacggcatcactagtaaaacgaattcttccaaggaaatgaaactaaaaacaaaaccaaactactgctcagttaatttaataccatagtacacccaaacttacaaaattagccaatggcgattgtgtcgtcggcccgtgagtcgctctcccatgcgatgaacaaccgcttcttgcccaacctggagtacttgctgcagggatctatcctggattccgccgtggaacacttgatgcacaggtgggagacccagtgtcagatttgaatcgtttgcacccgactaacagtctaaccgcctacccactatcagactaaagggactctgcgacaatgtggacacctcgccggagccgtttcacgatctggaagtgtgtatgagccttcgccagcccaatgccaaccagccgctgcttcttcgcgtgcgccgagcccttggtcgcgatgcaccctttcagatgcgctacctaggaaaccccgaggtggatctgcgccggcctacattggtacgcagctgcatggactgcgcctgcaccaatggcattttggaattcctcacggaaatgggcttccgcctggagttcgagtacatagcaaagggttggaatcatgaaatatattacgcttgggttgccaaaatggatagtgacaaatggacttatttcaggctatatgttccgcaaggggcgcatgaagattaccgtctccaagctcattaagattgtgcccggcaagcagcaggacatggccaacgagccaatctcacaaagctacatagtggaactctctgtggtggcgccaacggggcaggagaatgtcggcgaggaaatgcgcgtgtttgccgagcaactaaagccactcgtgcagctcgagaagatcgactacaagcgactgggcggcatgccgtagtttacaataaaagtgcacatcgcatttatccaacagttatttaatttcttaaatgtaagaaaatatacaaatttacagaaaagaaccgagagggaatgattacactgccagagtaaaaaatatctcaaattcaaccttacacacccacatgacacgacaacaacggactttcccaaagcagtgataaagaagctgcggggcggttaatccttaaaggcctcattaagagccgccagattgcgatcgctcacataactctggagatcgctgcggcccatcagcgaaatgaccatcttcagcgtactccaaatagactcggacatctggttctgtcctctaaaggtagccgccatcgccgcattgggcagctctcgggcggcgttagtgtgagcctgcatggtaagcgctgtgagtaagtgctccacagcttccttgtaggccttaaggttcatgcaacatacgcccacgttgtaacgcacacggatgaagcccggttggagctgcagcgcctgctgataagcctccaccgcctccacggagcgcgagccgttggccaaactggcccccaatcggttccatgtcttcgcattttggggatccacctgcagagcggactggtagcagtccaccgccttgtcgaactccccagatagattgtagagcacgccgagggcatcctggacttcggcatccacctccgaagggtgctgtcgaacggcttccaagtagatctgctgcagatcgcgcagcttactcggaccaatcagcgacgaagccaacgaagtgccctcggcctgcagctccggatgggctgcgaccaggtgctgatacttgggatgcactgtcagccagttgcacagcatgcgcacggcgttgttctgcaggccctcgttggtgtagcacgcggccagggccatcaggacctgttggttgtccggttgcaagtcgtaagcccgcttaagtgccgcaatggcctggggatccatttcgttctctgtct

SEQ ID NO: 36233 - DNA, 746 bp, DROSOPHILA
aattcttccaaggaaatgaaactaaaaacaaaaccaaactactgctcagttaatttaataccatagtacacccaaacttacaaaattagccaatggcgattgtgtcgtcggcccgtgagtcgctctcccatgcgatgaacaaccgcttcttgcccaacctggagtacttgctgcagggatctatcctggattccgccgtggaacacttgatgcacagactaaagggactctgcgacaatgtggacacctcgccggagccgtttcacgatctggaagtgtgtatgagccttcgccagcccaatgccaaccagccgctgcttcttcgcgtgcgccgagcccttggtcgcgatgcaccctttcagatgcgctacctaggaaaccccgaggtggatctgcgccggcctacattggtacgcagctgcatggactgcgcctgcaccaatggcattttggaattcctcacggaaatgggcttccgcctggagttcgagtacatagcaaagggctatatgttccgcaaggggcgcatgaagattaccgtctccaagctcattaagattgtgcccggcaagcagcaggacatggccaacgagccaatctcacaaagctacatagtggaactctctgtggtggcgccaacggggcaggagaatgtcggcgaggaaatgcgcgtgtttgccgagcaactaaagccactcgtgcagctcgagaagatcgactacaagcgactgggcggcatgccgtag

SEQ ID NO: 36234 - protein, 217 aa, DROSOPHILA
MAIVSSARESLSHAMNNRFLPNLEYLLQGSILDSAVEHLMHRLKGLCDNVDTSPEPFHDLEVCMSLRQPNANQPLLLRVRRALGRDAPFQMRYLGNPEVDLRRPTLVRSCMDCACTNGILEFLTEMGFRLEFEYIAKGYMFRKGRMKITVSKLIKIVPGKQQDMANEPISQSYIVELSVVAPTGQENVGEEMRVFAEQLKPLVQLEKIDYKRLGGMP

SEQ ID NO: 36235 - DNA, 5564 bp, DROSOPHILA
catttcgttctctgtctgcgaagtgcccagcaactgccagacctcagcgcgctccggttgctttttggccgccacctcgaaacatagaactgcgctgggtatatcccctttggacaggtactccttacccttttcaaacgggttctccacatcagacatggggttgccctcggcgaactcgtactccttataagcgtccatattgtcgttgtactccgacagccacggatgctcgttctcgtcggccagcttctgccactcgtcttgcagccgctcccagaacttttcgttgaagttggcggcggtttgctctttttgttcggtgctgcgctggtagtcgctgatccagtcgtccagcgattccccctgtggcgcctgtggcagatgatctgtgattatagtttccatggcggagtcaaagaaggggtcctgttgctgtcctgccgcaatgggcatcaaaggctgacgcaatggcggcagggaccgaaagttctggctactgatcaggggctcgtcgaagaactcctgggcatgctgcaggtcctgctgctgtgcctgcatgtggatcatcttgttgggcagggcgggtgccagtccgcgggcaaagtcctgtccccactgctccgcctgctgagagtgcatctgctgctgcggatttccgtgaatatttatgtcccgcatctcctggagcagagtgtccatctgaaatgactgcggtggggcagtgacctgtcccaggaactcgttgatcaactggtcctcgggacgagcagcgcgctcgaagtgtcgctgcacatagccctcatccttgtgggcaacatcgcgggtgaactgtccgcccagttgcatgagaggattaactccaccgcagtcgccctcgaccaatgggcggaaagacatggtgttcgaagtggagatgctacgtaactggggcaaccaacgataagaaaaggggccaaatcaggtccaaaacaaaagtccaaatgtcacaaagattacctgtttatcggccgttatcgaagctatcggctttgtgacagtgttgcacagcgctctaataataataaaatatatcgccgcgcaaaatcttatccgccagagaattggtttcgaacgccaaatccccgactgcaccatggactacgacctttttcagtcggatgacgaggagatcctggctaccttcatacaggcgacacagaagcaggaaaccctgagcgcgcaaatagacgtggacgatagcgaagaggacctagtcgacggtctacacttgcccgagttcaactgcagtggccgagacactctgaagagccaactgtgcgagggaggctttctggggaatggctacgcccaattggatccgccccgctctcgcctggattatctctgttttgactttgctccggctcaattagcggttggcgcggtaagaaactacctgtacggcgaggcctggtgagtttagagctcccctggcagctgccaacaagtacaactcttccattctcagtaagaatgtgcagaagctgttaaccgtcgtgatgggccagcaacacctgcaggccacggccgcctctatgaactctggttggtatagagtgcgccagcaggtcacacacttctaccatctgatgctgctcctacgaggcaatgagctgctgccttcacattttcttgatgggtttcgacaattgctcaacgatcagctggatgcggatacctggaaggttttgtattttgcggagcacaacaagggaaacgactgccaggcgccggcgtatcacctgtatcacggcgtactggagtggcgttttctggacctgcatatactgtacgcctctgggaatgatcaagcgttcctagggcagctggagcgcacactcgacgatctgatcgtttgtgctggacatcactaccgcagcaaacatcgctcggagctcatccattcctcgccgttcatgtgtcgctgcaacaaggagctgtggctgctgctgaaacgtcttattcccaaatggctgggagaacgggagctagacttttggactctattccacaaggccatgcagaggcacaagtcactccacttccagggtgagtgcacaaagaagctagaccgtgcggcttcccctcatcttatagtcgtttttcttctcgaggtgagagcaatgcaatttctctggcataccacgaactctattcctggttgaggctaggactggcccgcttggacgaatacaacagtgagggttggtaccagccggatcactcgccgctcactgcggcaccagaaagcttccaaactgccagtctgcttaagcaatttctggcgagccagccggacgaacagcagcggcgggtctacctaattcaactctctccccttcaactgcagctgggcaagccggatactgatgtcctgtgccagctgtgggagtactttcaccgatccctcaactgcaattttagtgtgggaactgagctagatcagctgccgcttacctgttccaatgggtcggcctacgtcgatcgctacaacaaactgctgtctaagtcgcatatagaagatttgaatctgagcagtttcaccatgtacgcgtggatgctgggcaaaaccttgaagcttttaccatcgcagggcagaagcaaccaacgtcagaaactactcggccgcatattcagcaagtttagtgccgcgaaacttttggctctgaatgagcctggtattcaccatgtgatcgagctgtttctgtgcctgctgctctgccacgaagatctcagcgagttggcgcccaagctgcgcgaaatgttgctctgcctggccctggaaaaactgcctccggtgcgaaggattctcgtggccaagggacacatggccctgctgcttctgcatgcccagcatcgcctatctatggatgactatgtgagcaagctgctcaaccagttggccaccattcgcaatgatgcagaggtgggcgccatttatgtgggcagccttcaagccatctttaatctggcggatgacttcaaccgcggcgagcagcagcttctcgggccatggctggcacattacgtcgaaaagtgtgggcaggcatcgcaggatcgcgtatggcagacgcttcacaatttaatcctccgtctcagcgagcggagagctgtggctggcaatgcgagtggcatcaaggaggcacttcaacagcacataatgccactggtgaggacccaatacgttagtagccatagctcatggcttccaaagctagcggctaacttcatcgccctggagaataatggggacaaactgctactgggcttcctgcagggaccagaacccatcaatatggctgcttctgctcagttgttgctccaggtgttggaagacggagggcgacctgccagctccaccattcttcaggtctgggtgaagtctctggtcctcctaaacgcacaacacgaatctgtattggctttaatgccccatgtcacacagctagaggagttccgacttctggccattgatcccacctctttggagggcgggcgcgagcctctctgcgccttctttggagctctgggaaggcgtgcccagcaagaggaggctgctgcccacgtccgtatgcagttgagccacaaactgcatgcctatgtaaatcatttcgagctatggctacccccggatcgaagccgatcggaactcggttcccggttctacagcttcctagccattgtcatctataattgttccactctagcgtacgtgcgatccaagccgagctgcttcttccacctggccatggtgcggttcctgctcaccacgcagttgcaggcaggagtgccgcccgaaggtcgccttccacaagtggttcacaagattttcccagtgttgctgcaaggcattggtcgactgccttaccgcacggacgcatacgtggccaagactttggagcaactagttcagcactggacgccgcactttagcttctcatccaacgccaagctggtggcccgtccatatgccaccctcctccaggcggatgtagatggagagctggcgcagtttgtgcttcagctcctcgttacccagtttttggtggtccagcggcggagggcaggacagcatgcgggcttggtgatcactataatgcagcaactgatagagagcactggcaaagagcaggaagaacagctgctaaccgttttgcgcggcgtgcacatcccgctgctggaacacgtaatgttcgtggacgaagtggacctcagtcgcaaccaagtgtttggactttataaagtgcttatatcgcacgatgcctacaagcgatcacaggcggtcagggatatgtgctccaatcacttgcgatccctcgccgaaaagcacctggcccactgcacttacttttacttccagatgctgatcaacctggcagagctggcgccggatctagtggctcccatcctatcctttataagggagcaggcagagcaggtggagctaaaacgcggcgctggagaagatgtgggcatacgcaagtgcttgcagcgactccaaaaggtcttgagcagggtttaggctcctcatggcttcttttgtacatataaggattctcaataaaatgttaggcattctataaaatctttattatttcagtcggaagattcaatgattcctccttaagagatatacgttacggtgcggcaaaatgtacatggtggtttacacagtctcgcgatctgtgctcaaggtctcagttaaagtgttggaaataaatacattatgattgcttctcctttgggcagttctataaacagacggctaaaccacgtttttgacgtcgcgcggtatgcgattggtaagcagctcggcgggcataaagccggagtcgcccaggtacttgatggacacgttgccggatggactgatggtcagccaggtgatggaagcgtgattaatgttaatccgtagccaaccctcggcggggaactgcagggctcggcagacaaagtagcggatcacgttgccgtgtcccacgatcagggtatagctctccttctcttggtcgggataggcgcggtggaagtatcggcgaaagccggcctctatgcgcgatccgtcgcgaaggaactgctgcagtgaaatgaaagccgaatatcatgtggaatacgcactgggttgacccttgacttgacttacagatgcctccggcttccagtggccgactggcggctggggcggaataggcgctccttcacgcaggaaggcacagttcaccactttctctttttcgaaatcgatctgcttgagaataatatcggaagtctcctgggcccgcaccattgtggaggctactaccttgtcccacttgatgcccagctcgcagagccgtttcccagtaaactccgcctgcttgcggccgcgctccgtgagatgatgcgtgtcatccgagtcacccacgtccagatactcgccatgccgcactaggataatgtggcgcgccttcttggccttcgccttctcaagctccgcgttgtagcggttctcctcctccggctggctgtttcgcagtggacgc

SEQ ID NO: 36236 - DNA, 3444 bp, DROSOPHILA
tgtttatcggccgttatcgaagctatcggctttgtgacagtgttgcacagcgctctaataataataaaatatatcgccgcgcaaaatcttatccgccagagaattggtttcgaacgccaaatccccgactgcaccatggactacgacctttttcagtcggatgacgaggagatcctggctaccttcatacaggcgacacagaagcaggaaaccctgagcgcgcaaatagacgtggacgatagcgaagaggacctagtcgacggtctacacttgcccgagttcaactgcagtggccgagacactctgaagagccaactgtgcgagggaggctttctggggaatggctacgcccaattggatccgccccgctctcgcctggattatctctgttttgactttgctccggctcaattagcggttggcgcggtaagaaactacctgtacggcgaggcctgtaagaatgtgcagaagctgttaaccgtcgtgatgggccagcaacacctgcaggccacggccgcctctatgaactctggttggtatagagtgcgccagcaggtcacacacttctaccatctgatgctgctcctacgaggcaatgagctgctgccttcacattttcttgatgggtttcgacaattgctcaacgatcagctggatgcggatacctggaaggttttgtattttgcggagcacaacaagggaaacgactgccaggcgccggcgtatcacctgtatcacggcgtactggagtggcgttttctggacctgcatatactgtacgcctctgggaatgatcaagcgttcctagggcagctggagcgcacactcgacgatctgatcgtttgtgctggacatcactaccgcagcaaacatcgctcggagctcatccattcctcgccgttcatgtgtcgctgcaacaaggagctgtggctgctgctgaaacgtcttattcccaaatggctgggagaacgggagctagacttttggactctattccacaaggccatgcagaggcacaagtcactccacttccagggtgagagcaatgcaatttctctggcataccacgaactctattcctggttgaggctaggactggcccgcttggacgaatacaacagtgagggttggtaccagccggatcactcgccgctcactgcggcaccagaaagcttccaaactgccagtctgcttaagcaatttctggcgagccagccggacgaacagcagcggcgggtctacctaattcaactctctccccttcaactgcagctgggcaagccggatactgatgtcctgtgccagctgtgggagtactttcaccgatccctcaactgcaattttagtgtgggaactgagctagatcagctgccgcttacctgttccaatgggtcggcctacgtcgatcgctacaacaaactgctgtctaagtcgcatatagaagatttgaatctgagcagtttcaccatgtacgcgtggatgctgggcaaaaccttgaagcttttaccatcgcagggcagaagcaaccaacgtcagaaactactcggccgcatattcagcaagtttagtgccgcgaaacttttggctctgaatgagcctggtattcaccatgtgatcgagctgtttctgtgcctgctgctctgccacgaagatctcagcgagttggcgcccaagctgcgcgaaatgttgctctgcctggccctggaaaaactgcctccggtgcgaaggattctcgtggccaagggacacatggccctgctgcttctgcatgcccagcatcgcctatctatggatgactatgtgagcaagctgctcaaccagttggccaccattcgcaatgatgcagaggtgggcgccatttatgtgggcagccttcaagccatctttaatctggcggatgacttcaaccgcggcgagcagcagcttctcgggccatggctggcacattacgtcgaaaagtgtgggcaggcatcgcaggatcgcgtatggcagacgcttcacaatttaatcctccgtctcagcgagcggagagctgtggctggcaatgcgagtggcatcaaggaggcacttcaacagcacataatgccactggtgaggacccaatacgttagtagccatagctcatggcttccaaagctagcggctaacttcatcgccctggagaataatggggacaaactgctactgggcttcctgcagggaccagaacccatcaatatggctgcttctgctcagttgttgctccaggtgttggaagacggagggcgacctgccagctccaccattcttcaggtctgggtgaagtctctggtcctcctaaacgcacaacacgaatctgtattggctttaatgccccatgtcacacagctagaggagttccgacttctggccattgatcccacctctttggagggcgggcgcgagcctctctgcgccttctttggagctctgggaaggcgtgcccagcaagaggaggctgctgcccacgtccgtatgcagttgagccacaaactgcatgcctatgtaaatcatttcgagctatggctacccccggatcgaagccgatcggaactcggttcccggttctacagcttcctagccattgtcatctataattgttccactctagcgtacgtgcgatccaagccgagctgcttcttccacctggccatggtgcggttcctgctcaccacgcagttgcaggcaggagtgccgcccgaaggtcgccttccacaagtggttcacaagattttcccagtgttgctgcaaggcattggtcgactgccttaccgcacggacgcatacgtggccaagactttggagcaactagttcagcactggacgccgcactttagcttctcatccaacgccaagctggtggcccgtccatatgccaccctcctccaggcggatgtagatggagagctggcgcagtttgtgcttcagctcctcgttacccagtttttggtggtccagcggcggagggcaggacagcatgcgggcttggtgatcactataatgcagcaactgatagagagcactggcaaagagcaggaagaacagctgctaaccgttttgcgcggcgtgcacatcccgctgctggaacacgtaatgttcgtggacgaagtggacctcagtcgcaaccaagtgtttggactttataaagtgcttatatcgcacgatgcctacaagcgatcacaggcggtcagggatatgtgctccaatcacttgcgatccctcgccgaaaagcacctggcccactgcacttacttttacttccagatgctgatcaacctggcagagctggcgccggatctagtggctcccatcctatcctttataagggagcaggcagagcaggtggagctaaaacgcggcgctggagaagatgtgggcatacgcaagtgcttgcagcgactccaaaaggtcttgagcagggtttag

SEQ ID NO: 36237 - protein, 1102 aa, DROSOPHILA
MDYDLFQSDDEEILATFIQATQKQETLSAQIDVDDSEEDLVDGLHLPEFNCSGRDTLKSQLCEGGFLGNGYAQLDPPRSRLDYLCFDFAPAQLAVGAVRNYLYGEACKNVQKLLTVVMGQQHLQATAASMNSGWYRVRQQVTHFYHLMLLLRGNELLPSHFLDGFRQLLNDQLDADTWKVLYFAEHNKGNDCQAPAYHLYHGVLEWRFLDLHILYASGNDQAFLGQLERTLDDLIVCAGHHYRSKHRSELIHSSPFMCRCNKELWLLLKRLIPKWLGERELDFWTLFHKAMQRHKSLHFQGESNAISLAYHELYSWLRLGLARLDEYNSEGWYQPDHSPLTAAPESFQTASLLKQFLASQPDEQQRRVYLIQLSPLQLQLGKPDTDVLCQLWEYFHRSLNCNFSVGTELDQLPLTCSNGSAYVDRYNKLLSKSHIEDLNLSSFTMYAWMLGKTLKLLPSQGRSNQRQKLLGRIFSKFSAAKLLALNEPGIHHVIELFLCLLLCHEDLSELAPKLREMLLCLALEKLPPVRRILVAKGHMALLLLHAQHRLSMDDYVSKLLNQLATIRNDAEVGAIYVGSLQAIFNLADDFNRGEQQLLGPWLAHYVEKCGQASQDRVWQTLHNLILRLSERRAVAGNASGIKEALQQHIMPLVRTQYVSSHSSWLPKLAANFIALENNGDKLLLGFLQGPEPINMAASAQLLLQVLEDGGRPASSTILQVWVKSLVLLNAQHESVLALMPHVTQLEEFRLLAIDPTSLEGGREPLCAFFGALGRRAQQEEAAAHVRMQLSHKLHAYVNHFELWLPPDRSRSELGSRFYSFLAIVIYNCSTLAYVRSKPSCFFHLAMVRFLLTTQLQAGVPPEGRLPQVVHKIFPVLLQGIGRLPYRTDAYVAKTLEQLVQHWTPHFSFSSNAKLVARPYATLLQADVDGELAQFVLQLLVTQFLVVQRRRAGQHAGLVITIMQQLIESTGKEQEEQLLTVLRGVHIPLLEHVMFVDEVDLSRNQVFGLYKVLISHDAYKRSQAVRDMCSNHLRSLAEKHLAHCTYFYFQMLINLAELAPDLVAPILSFIREQAEQVELKRGAGEDVGIRKCLQRLQKVLSRV

SEQ ID NO: 36238 - DNA, 4619 bp, DROSOPHILA
cggcgaaagccggcctctatgcgcgatccgtcgcgaaggaactgctgcagtgaaatgaaagccgaatatcatgtggaatacgcactgggttgacccttgacttgacttacagatgcctccggcttccagtggccgactggcggctggggcggaataggcgctccttcacgcaggaaggcacagttcaccactttctctttttcgaaatcgatctgcttgagaataatatcggaagtctcctgggcccgcaccattgtggaggctactaccttgtcccacttgatgcccagctcgcagagccgtttcccagtaaactccgcctgcttgcggccgcgctccgtgagatgatgcgtgtcatccgagtcacccacgtccagatactcgccatgccgcactaggataatgtggcgcgccttcttggccttcgccttctcaagctccgcgttgtagcggttctcctcctccggctggctgtttcgcagtggacgcacgagggcccgtggctcccggcaatcccagttggtgtcccaaagggcccacggatccaccggcttatcactgtgcgtccacgagttctgcacgaccgtctgcgggtcccgcagccgctgtaggtagtaagccgccagtccggctcctgtgccgcacacgaagctagtcaactttcgcatcgttagggcttttaggtattttctttaattttagttttgttccgctgaataagtgcggtatttaaatactgcgatttggtatttgacatactaggttagcgggtatataaataccgcgcaagaccatttagaattcaactatcgaaaagttaccaagatgaatcaaaaatacgaaatatatttacacaattattgtataccaagaaaattaaggatccacaatcaattgtttcgttaattattccgtatgtgtttcttaaagaaataccatgcaaatactgaatactgaaaagtaccagcgctggcactccttaataacaatcaggttgacgcgatatggcaacgccgtagtgtgaaaaattgcaatttttttcatttcacacacacagacgcgacagatacgccagcatcggaacgaaggacgtaaaaaggccgcagaaaaacgcctatcaaagctgaggtttattgaaggggttatcagaaagatatctctaggaaaagccgccaacaggagtcacagcgtcgacattccatcggagcagcaagaagcagaggcgggggcaataagaaacggaagaagaagaagccgattcgacgtttatcaattatgaatttcctgggattcggccagtcagcggacattgagatagtctttgatggagctgagcacaagacggcagaggttaaaggggaggacggcaaagtggagaagatgctgctattctacgacggggagacggtatccggcaaggtgcgtcgtggtcagcatcggggggagttcccccaagcataaccagagataaacccatatccacccccttttcatccaggtgaacgtgaccctcaagaagccgggcagcaagctggagcaccagggcattaagatcgaattcattggccagatcgaactgtactacgaccggggtaaccaccacgaattcaagtgtctagcgaaggccctggcccgcccgggcgatctcatccagaacaacagctatccattcgatttccccaaagtggagaagcaattcgaggtgtacgccggctcgaacgtgcggttgcggtacttcctgcgcgcaaccatcgtcaggcggatcagcgacataacgaaggaggtcgacatcgccgtgcacacactgtgcagctacccggagatgaacaaccccatcaagatggaggtaggcatcgaagactgcctgcacatcgaattcgagtataacaaaagcaagtaccacctgcgggacacgattatcggcaagatctacttcctgttggtgcgcattaagatcaagcacatggagattgcgatcatcaagaaggagagcacgggcacgggccccaccatgtttaacgaaaacgaaacgattgccaagtacgagatcatggacggagcgcccgtcaaaggcgagagcatacccatccgggtctttcttgctggctacaatctcacgccgaccatgcgggacattaacaagaagttctcagtcaagtatttcctcaaccttgtgctgatggacaccgaggaccggcgctacttcaaacaacaggagatcacgctgtggcgcaaggcagacaaaccgcgttaccatggcgctcagcagcaccagcaacagcagcaccaacacgttcccctgcacgctccgccgcacctggtcagcggtcctgctgcgcccacagtggctcactcgctgatcagctcgagcacggacagcggagaggtgggaggagcaccgacagcgccgggcactgcaggatctgagtccaagatgggtctgtttaccagggagagccccaaccaggagttcagccaacagcaaatggattctccgccgctgacgcccacgccgtcgaccgcatccgttgcagttgcagtccccacagcggcgtcatctgtttcagaaccagctcccgagcggggcataggcgatggagccgcagcggccaccacaagcgcctcgcccgtagctatgctctccagttcgccaccgccattgctgccagtatcgccgctctcccgatcggaaactgaagcgtcggagcaagtacaaccggaggatgaggacctcgatgcaattacgcccaatacgaaaaagaccggtgcaacgccgttggccaccgattgagtgggaagctggagaggatttccatcttcagggggataagtagtaacagccagagctagggcaacaacagaaggcggaactattacgcatatattcgtattcgtatacagcagcaggaaggcagttcagcagcagcaacaaatatgcatatatctatttttttaaagttaatttaaaattgttacaaatgttttattgaggttatgcgcatcattaaccaaaagcaggcaaatcgcaaatgatagtaacaaaaaaacaaaacgaaacttaggacaaatgagaagaggcaacctcgtagctacaaccaatctcttggcgtttccattggtattattgctataacaagtcgagaagctgtcgagaggcgcgcgactcggacacgaaagcaaaccctaatcccctgcgccccaaaactagttaaactccctagtattccgatgaccattccctatccttgtggcgtttggaaaatatgatttttcaatttgaaaaatgttgaaattgctttctaaaagtgagacccctgaattgaaatttaagtgtgcattaaactaaaccaactccaatacaaatgaagatgaagcagcaaacagcagacaaaacatccattaaataataaagttttagtctatagcgtactaacgaattgatgctgggagcgttctgataatggcgatttgtccgagcgatcggaagtggaaacgacgaaacgtgttacatgccttgcatatgtacataacagttcatatacataacatacaagaattattgatatatacacttagacacgcaatttaacaaataaaagcgatatgagcgccaaacacgaagacaacgttaagtgaatcaagtggaaactttgccaagtgcactgcctttcaaatcgattggtgtgagtgcctagtccaccatttctgtccactgggataatgcctttgaggtgacacaccaatagcaagctggtagtcagtcctcgcggagtaacttgtatgttaatataactaatcgggtgatgaaacgactactcttatccagcaggtattatataatttccataacatctagatttatttaacaaataacgccggtttagcagctgcgacgacggctagtcccaggcctccttgatcttcagctggttcagccgctcctcgatggtaacgtgtggcttcatcttgcgcagtgtctgctcgtccgtccatctggcaacgagcttctcgcgcttctgcagctccttggcatgaccgaatgactgctcctgcaggcgggaagtgtggcattaggtgaggcaatccgtacagagagcaggacttaccatggtgagatacgggtgtcggaggagtaacattacctgctcctggcgctcgtactcgtgggtcagggtgtccattgctcgctgactgaccggtttcaccaggcgccgcttgccccggaatatgtggccgggcacagtcttcttgaacaaattgatcagcgtcaggtgcattttgttgctcaagtgccaagtaaaaactacttcaatccgctaactttttattttataataaattattattatttctactttgtcccgaatttggatgtgaccaagtttcgcgaagggaaaaaccacatcgattattttagtaactggtcgatacgccaagacaaatcatggtttcgcttatcgataggaaactaccgcttatttccggttgaactttagaagtcgtaatgcaataacaatattggtacgtattgtaacaacgtcgcgcatttcaacccgatcacaacatggaagacgccgtggaggcccttttcatcagcacgagcagcgaggacaacacga

SEQ ID NO: 36239 - DNA, 2540 bp, DROSOPHILA
cgatatggcaacgccgtagtgtgaaaaattgcaatttttttcatttcacacacacagacgcgacagatacgccagcatcggaacgaaggacgtaaaaaggccgcagaaaaacgcctatcaaagctgaggtttattgaaggggttatcagaaagatatctctaggaaaagccgccaacaggagtcacagcgtcgacattccatcggagcagcaagaagcagaggcgggggcaataagaaacggaagaagaagaagccgattcgacgtttatcaattatgaatttcctgggattcggccagtcagcggacattgagatagtctttgatggagctgagcacaagacggcagaggttaaaggggaggacggcaaagtggagaagatgctgctattctacgacggggagacggtatccggcaaggtgaacgtgaccctcaagaagccgggcagcaagctggagcaccagggcattaagatcgaattcattggccagatcgaactgtactacgaccggggtaaccaccacgaattcaagtgtctagcgaaggccctggcccgcccgggcgatctcatccagaacaacagctatccattcgatttccccaaagtggagaagcaattcgaggtgtacgccggctcgaacgtgcggttgcggtacttcctgcgcgcaaccatcgtcaggcggatcagcgacataacgaaggaggtcgacatcgccgtgcacacactgtgcagctacccggagatgaacaaccccatcaagatggaggtaggcatcgaagactgcctgcacatcgaattcgagtataacaaaagcaagtaccacctgcgggacacgattatcggcaagatctacttcctgttggtgcgcattaagatcaagcacatggagattgcgatcatcaagaaggagagcacgggcacgggccccaccatgtttaacgaaaacgaaacgattgccaagtacgagatcatggacggagcgcccgtcaaaggcgagagcatacccatccgggtctttcttgctggctacaatctcacgccgaccatgcgggacattaacaagaagttctcagtcaagtatttcctcaaccttgtgctgatggacaccgaggaccggcgctacttcaaacaacaggagatcacgctgtggcgcaaggcagacaaaccgcgttaccatggcgctcagcagcaccagcaacagcagcaccaacacgttcccctgcacgctccgccgcacctggtcagcggtcctgctgcgcccacagtggctcactcgctgatcagctcgagcacggacagcggagaggtgggaggagcaccgacagcgccgggcactgcaggatctgagtccaagatgggtctgtttaccagggagagccccaaccaggagttcagccaacagcaaatggattctccgccgctgacgcccacgccgtcgaccgcatccgttgcagttgcagtccccacagcggcgtcatctgtttcagaaccagctcccgagcggggcataggcgatggagccgcagcggccaccacaagcgcctcgcccgtagctatgctctccagttcgccaccgccattgctgccagtatcgccgctctcccgatcggaaactgaagcgtcggagcaagtacaaccggaggatgaggacctcgatgcaattacgcccaatacgaaaaagaccggtgcaacgccgttggccaccgattgagtgggaagctggagaggatttccatcttcagggggataagtagtaacagccagagctagggcaacaacagaaggcggaactattacgcatatattcgtattcgtatacagcagcaggaaggcagttcagcagcagcaacaaatatgcatatatctatttttttaaagttaatttaaaattgttacaaatgttttattgaggttatgcgcatcattaaccaaaagcaggcaaatcgcaaatgatagtaacaaaaaaacaaaacgaaacttaggacaaatgagaagaggcaacctcgtagctacaaccaatctcttggcgtttccattggtattattgctataacaagtcgagaagctgtcgagaggcgcgcgactcggacacgaaagcaaaccctaatcccctgcgccccaaaactagttaaactccctagtattccgatgaccattccctatccttgtggcgtttggaaaatatgatttttcaatttgaaaaatgttgaaattgctttctaaaagtgagacccctgaattgaaatttaagtgtgcattaaactaaaccaactccaatacaaatgaagatgaagcagcaaacagcagacaaaacatccattaaataataaagttttagtctatagcgtactaacgaattgatgctgggagcgttctgataatggcgatttgtccgagcgatcggaagtggaaacgacgaaacgtgttacatgccttgcatatgtacataacagttcatatacataacatacaagaattattgatatatacacttagacacgcaatttaacaaataaaagcgatatgagcgccaaacacg

SEQ ID NO: 36240 - protein, 478 aa, DROSOPHILA
MNFLGFGQSADIEIVFDGAEHKTAEVKGEDGKVEKMLLFYDGETVSGKVNVTLKKPGSKLEHQGIKIEFIGQIELYYDRGNHHEFKCLAKALARPGDLIQNNSYPFDFPKVEKQFEVYAGSNVRLRYFLRATIVRRISDITKEVDIAVHTLCSYPEMNNPIKMEVGIEDCLHIEFEYNKSKYHLRDTIIGKIYFLLVRIKIKHMEIAIIKKESTGTGPTMFNENETIAKYEIMDGAPVKGESIPIRVFLAGYNLTPTMRDINKKFSVKYFLNLVLMDTEDRRYFKQQEITLWRKADKPRYHGAQQHQQQQHQHVPLHAPPHLVSGPAAPTVAHSLISSSTDSGEVGGAPTAPGTAGSESKMGLFTRESPNQEFSQQQMDSPPLTPTPSTASVAVAVPTAASSVSEPAPERGIGDGAAAATTSASPVAMLSSSPPPLLPVSPLSRSETEASEQVQPEDEDLDAITPNTKKTGATPLATD

SEQ ID NO: 36241 - DNA, 3662 bp, DROSOPHILA
tcggaagtggaaacgacgaaacgtgttacatgccttgcatatgtacataacagttcatatacataacatacaagaattattgatatatacacttagacacgcaatttaacaaataaaagcgatatgagcgccaaacacgaagacaacgttaagtgaatcaagtggaaactttgccaagtgcactgcctttcaaatcgattggtgtgagtgcctagtccaccatttctgtccactgggataatgcctttgaggtgacacaccaatagcaagctggtagtcagtcctcgcggagtaacttgtatgttaatataactaatcgggtgatgaaacgactactcttatccagcaggtattatataatttccataacatctagatttatttaacaaataacgccggtttagcagctgcgacgacggctagtcccaggcctccttgatcttcagctggttcagccgctcctcgatggtaacgtgtggcttcatcttgcgcagtgtctgctcgtccgtccatctggcaacgagcttctcgcgcttctgcagctccttggcatgaccgaatgactgctcctgcaggcgggaagtgtggcattaggtgaggcaatccgtacagagagcaggacttaccatggtgagatacgggtgtcggaggagtaacattacctgctcctggcgctcgtactcgtgggtcagggtgtccattgctcgctgactgaccggtttcaccaggcgccgcttgccccggaatatgtggccgggcacagtcttcttgaacaaattgatcagcgtcaggtgcattttgttgctcaagtgccaagtaaaaactacttcaatccgctaactttttattttataataaattattattatttctactttgtcccgaatttggatgtgaccaagtttcgcgaagggaaaaaccacatcgattattttagtaactggtcgatacgccaagacaaatcatggtttcgcttatcgataggaaactaccgcttatttccggttgaactttagaagtcgtaatgcaataacaatattggtacgtattgtaacaacgtcgcgcatttcaacccgatcacaacatggaagacgccgtggaggcccttttcatcagcacgagcagcgaggacaacacgacatgcagcgtgcaggatttgcggacaggcacagacctgatgcgctacaagggcggtggatgcgcccagcaccacagcctgaacatgatccacctgaactacgtgatggcggcgaactccgccaagccactgctccacgtgtggcccatcaacaagcaagagcagatggccggactgcggttcgtggtgcccggcaaggtcaacgccttggccctgacgcctgatgggaacttcttggtggccggcatccaggagaacatctatctatggcacatgagctccggccgtatgcttaacaccctgtccaagcactaccaggcgatcacttgcctgcgcttcacggacaacggtgagcacttcatcagcggcggcaaagacggagctgtgcttgtctgggatctcaccttctccgccgccccactggacacgggcgggggcaaggatagcacggagccgttgtacagctttaacgatcacggtctggcggtcactgatctatactccggcatcggaggcatccgttcctatctgtacaccgtatcgttggatcgctgctgcaaggtatatgacctgtgcgggggcgtcctgctgctgagtgtggtgttcccagtggccctgcatagcgtgattgtcagcaagatggaaactagggtgtatgttggctccagtgacggcaaggtgtttgtctttaatatggaaaacgcgccgcgcatgaaggtgagtccagatttcgtttatccactgctttgccaactaattcctttacttacccaggaatatcacctagagggggaggaaatccaggcctttgtgggccacacatacggcaaggccatcacctgcctggctctgaatataagcgctacaactctggtctccgggggcgaggacaatcaggtctgcgtctgggacgtgggcagcaggcaacttattaagagcctgtcccaaaaaggctcggtaaccaatctgcatatccgcctgctcagcccagccatctttctgccggaacacaagcagccgcagatgttcgccgacagtctaaagcgaatgattagtccgtgggatgagaatgactgtatcgagctcttcgatccggactactccgggggacgcaagacaccggagctggactacacccaaagtcatccgggtacggatgaggagataatactcaaacttatagcgtccatgagttcgggaaagaacgaggacgacgaaggaattgaggcggaaaccaaagctacagatgtcgaggattccgaggtcgaagaagaagaacctgaatccgagccaatggaaaccgcctccaaggaagctgagtccgaaaaatcgtatgcagaatatcagccagactcagcacagacaagcgacgaaagagtgcaagagctgcaggccgagaatgcgcgcctcaaagcgcagtcaatgcgcttgttccagatagctttcaagtatattactagcgataccaatggccaggctgaaatcacagagaagacaaagcgcaagaaagcgcggaagacatagtgaaccttaagcttgctttcaattacgtttacttaggacttaggacaaaaatacatgataatagaaaaaaaacagcactgattgtgcctaaaaacgatttggatgaacaaaacaataacttctcgtagagggatctacttgggtgccgcttcgctgcccgcctgcccgtccatgttgtcatctcccgattcgggagcgttgtcattttcctcggcaatcaggcgacggatctctcggttggagttcagcagctcccgtagttgggacataatgtcgtctgtgcgctgctccacggcgtccagggcacagctgagagcgtccagactgttgttcacgtcctccatctctgtaggggtcattccattagagccaatcccgagcagaaacggggcgctgtcaaaactcaccttggaggtccgcctcctggacattggtgttgccagagtcgccggacgacgagggatcatgattgtttttgggtgacattttccctggaattttccccggagtttttccgtttgttttttccagttggatttattgtcacgggatagctataaacgatagaggtggttagaagagaacgataggtctcagttcaaatacgatataaaaaaaaaaacttaataggggaattcagtacatacgtacgtttttgtaattacgaaaacactttttagctcaaaacactaggcgaacataatccactgcaaaagtccaaagctaagtttccacttagtttttagggatgtgcccgtgcctcgttttatttttacgtaccaatggaatagcatgggaaattttggcttattcgcatatgtcgtgcctaattcgtgacacgaacaatgaaacaaatggtttacgtatctctaggcgttgactggacttaatcgaacggttctttcccatagtgcttaatgttgattggccagagttgaccccttctgacaatgaacggctgtttaatttctcagagcgatcagcggtcgtactccaacgt

SEQ ID NO: 36242 - DNA, 1605 bp, DROSOPHILA
tccggttgaactttagaagtcgtaatgcaataacaatattggtacgtattgtaacaacgtcgcgcatttcaacccgatcacaacatggaagacgccgtggaggcccttttcatcagcacgagcagcgaggacaacacgacatgcagcgtgcaggatttgcggacaggcacagacctgatgcgctacaagggcggtggatgcgcccagcaccacagcctgaacatgatccacctgaactacgtgatggcggcgaactccgccaagccactgctccacgtgtggcccatcaacaagcaagagcagatggccggactgcggttcgtggtgcccggcaaggtcaacgccttggccctgacgcctgatgggaacttcttggtggccggcatccaggagaacatctatctatggcacatgagctccggccgtatgcttaacaccctgtccaagcactaccaggcgatcacttgcctgcgcttcacggacaacggtgagcacttcatcagcggcggcaaagacggagctgtgcttgtctgggatctcaccttctccgccgccccactggacacgggcgggggcaaggatagcacggagccgttgtacagctttaacgatcacggtctggcggtcactgatctatactccggcatcggaggcatccgttcctatctgtacaccgtatcgttggatcgctgctgcaaggtatatgacctgtgcgggggcgtcctgctgctgagtgtggtgttcccagtggccctgcatagcgtgattgtcagcaagatggaaactagggtgtatgttggctccagtgacggcaaggtgtttgtctttaatatggaaaacgcgccgcgcatgaaggaatatcacctagagggggaggaaatccaggcctttgtgggccacacatacggcaaggccatcacctgcctggctctgaatataagcgctacaactctggtctccgggggcgaggacaatcaggtctgcgtctgggacgtgggcagcaggcaacttattaagagcctgtcccaaaaaggctcggtaaccaatctgcatatccgcctgctcagcccagccatctttctgccggaacacaagcagccgcagatgttcgccgacagtctaaagcgaatgattagtccgtgggatgagaatgactgtatcgagctcttcgatccggactactccgggggacgcaagacaccggagctggactacacccaaagtcatccgggtacggatgaggagataatactcaaacttatagcgtccatgagttcgggaaagaacgaggacgacgaaggaattgaggcggaaaccaaagctacagatgtcgaggattccgaggtcgaagaagaagaacctgaatccgagccaatggaaaccgcctccaaggaagctgagtccgaaaaatcgtatgcagaatatcagccagactcagcacagacaagcgacgaaagagtgcaagagctgcaggccgagaatgcgcgcctcaaagcgcagtcaatgcgcttgttccagatagctttcaagtatattactagcgataccaatggccaggctgaaatcacagagaagacaaagcgcaagaaagcgcggaagacatag

SEQ ID NO: 36243 - protein, 506 aa, DROSOPHILA
MEDAVEALFISTSSEDNTTCSVQDLRTGTDLMRYKGGGCAQHHSLNMIHLNYVMAANSAKPLLHVWPINKQEQMAGLRFVVPGKVNALALTPDGNFLVAGIQENIYLWHMSSGRMLNTLSKHYQAITCLRFTDNGEHFISGGKDGAVLVWDLTFSAAPLDTGGGKDSTEPLYSFNDHGLAVTDLYSGIGGIRSYLYTVSLDRCCKVYDLCGGVLLLSVVFPVALHSVIVSKMETRVYVGSSDGKVFVFNMENAPRMKEYHLEGEEIQAFVGHTYGKAITCLALNISATTLVSGGEDNQVCVWDVGSRQLIKSLSQKGSVTNLHIRLLSPAIFLPEHKQPQMFADSLKRMISPWDENDCIELFDPDYSGGRKTPELDYTQSHPGTDEEIILKLIASMSSGKNEDDEGIEAETKATDVEDSEVEEEEPESEPMETASKEAESEKSYAEYQPDSAQTSDERVQELQAENARLKAQSMRLFQIAFKYITSDTNGQAEITEKTKRKKARKT

SEQ ID NO: 36244 - DNA, 2663 bp, DROSOPHILA
ggtggttagaagagaacgataggtctcagttcaaatacgatataaaaaaaaaaacttaataggggaattcagtacatacgtacgtttttgtaattacgaaaacactttttagctcaaaacactaggcgaacataatccactgcaaaagtccaaagctaagtttccacttagtttttagggatgtgcccgtgcctcgttttatttttacgtaccaatggaatagcatgggaaattttggcttattcgcatatgtcgtgcctaattcgtgacacgaacaatgaaacaaatggtttacgtatctctaggcgttgactggacttaatcgaacggttctttcccatagtgcttaatgttgattggccagagttgaccccttctgacaatgaacggctgtttaatttctcagagcgatcagcggtcgtactccaacgttttctgttcgcctggtgtctacagtcgataatcttgcccattttgaccgaaataattttgaagcatcgaattgcgacagtagatttcttgttgcaatcatgaggcgagcataataaacagaaagtgtactagcctctgtttctacgttgtttttagagatgtgcatgtatatcgttttattttcacaacgcaagcaaattactagggattttggtatttgctcgagcatgacgtgccgattgcgtgtcacgaacagggaaacaagaggggttcacatctcttctgatactcttgcttaagctttggtctaactgttcacaaggctgcattcctattggttcaattgcgactggaaacatgcaatatgcgaccattttggaaaaagaaactgtttcttgattttgtcgacatgtatcagctggctggctactggctactggtttctgaactccagatattcagtcgagaatcgcatgcgaatgcccgtaatatttgctggcatcaatatttaatctgttgcctagcgtgacagtcggccacactgcacctcacataacataaccgaaaaatgaacaaatgttttaggtgccagccccggatatcgcttttccagttcagcgtgagtccatgagtgtgttgccttataggattcggattttcaatttcttgtttacacagctaccgcggtgctatgccgcagtgcagccgggatgtccaccgccacaagaaaaacccgtcgtcggtttgccacacaagcccgatcccaagacggtgaagtgcgactatataggaccgccagacgcgcaatcaaacctacgtccgtacgtacggcactacggcgatgaggagacgcggctggcaagaagcctgcgtcttaagcggatcgaggtggaggcatggaacacggacttctggacaaaacacaataagcgcttctacgaggtacaaccacgaccactgtgccatctctttctagtccgctaatgtcgtctctttcgaattggttcgtttacaggaaaaggaagacttcatccgcctgcacaaggaaagcggaaccagcgaagtgtccgcggaccagatgagccacttctacaaagcgttcctcgacaagaactggcgcatccacatcatgtacaacatctcctggtacctgaagaacttcgacatactcaccctggctgccgcagtccagctccagaggcttctggcgctggccaagcgaagatcttaggtgcaatatctgtcgtccccatttcgtaatttccagtttgccgtttgcaataagttggaataaaagatcacgtgcgtaaaatggtggcataaaatttacttagctactatttaaggggatgaaaaatacacgttgttcggagttagttaatgtacttaaaagtaatcgcaaactatttaaataaaataaaatagaagtaggtgttcatatccttatcagtgtatatattcaaagaaggttgcgcacgatacacgcagcgaaagaaggatcgctccccatgtaaagtggccgaatattgaaagataaccgctacaattatgataataataataatggtaaacagaggggaaggcacacacgcataaagtcaagttttgggttggccatcggggcggtcagtttcctcgcgataattgcaatggtggtagtgatgaatgtggagatggtgctaaaacaaataaaattaggtgctccagcgactgtgtgaggagagggggtccgaaatacattacaggggtggtcgtgtcctagcagtaacatttatattctttctatgtagaaacgatagcaattattcaatttaaactatgaagacactctccacttttgcacttaagagcgatataaaggatacgaattggctacagtgggcacatatacaaaacttacaaggtcatatgctctccacgagcatatctgcatatagcatataaactatatatatataaatatatatatatatatatctatatatataaatgtacacgaactataatgcttagcgaatctagctacttgatcagatacaagtcctgttcctgttcctgtctctactcctgttcatgttcactgggagcgacgtgctcgccgccgcttcttgcgcttcctttggtcctccgctagaggctcctcccgactctagttcatccacttgcgacagttgggcgctccacaggcgcacggtatcttgtgcgactcgtcctcaatgtcgaacttgtag

SEQ ID NO: 36245 - DNA, 531 bp, DROSOPHILA
atgaacaaatgttttaggtgccagccccggatatcgcttttccagttcagcctaccgcggtgctatgccgcagtgcagccgggatgtccaccgccacaagaaaaacccgtcgtcggtttgccacacaagcccgatcccaagacggtgaagtgcgactatataggaccgccagacgcgcaatcaaacctacgtccgtacgtacggcactacggcgatgaggagacgcggctggcaagaagcctgcgtcttaagcggatcgaggtggaggcatggaacacggacttctggacaaaacacaataagcgcttctacgaggaaaaggaagacttcatccgcctgcacaaggaaagcggaaccagcgaagtgtccgcggaccagatgagccacttctacaaagcgttcctcgacaagaactggcgcatccacatcatgtacaacatctcctggtacctgaagaacttcgacatactcaccctggctgccgcagtccagctccagaggcttctggcgctggccaagcgaagatcttag

SEQ ID NO: 36246 - protein, 176 aa, DROSOPHILA
MNKCFRCQPRISLFQFSLPRCYAAVQPGCPPPQEKPVVGLPHKPDPKTVKCDYIGPPDAQSNLRPYVRHYGDEETRLARSLRLKRIEVEAWNTDFWTKHNKRFYEEKEDFIRLHKESGTSEVSADQMSHFYKAFLDKNWRIHIMYNISWYLKNFDILTLAAAVQLQRLLALAKRRS

SEQ ID NO: 36247 - DNA, 9649 bp, DROSOPHILA
tgatttaatgctattagagcatttataaggcacctgttttcaggcactttttatttaatttatgctcttatggcatatacacctgcactctatttatgagcctgatttaatgctattagagcatttataagggcacttttgttatgcactttttaatttcacaattgctgatgtatggcctcaagcacgccttaccacaatttataatgggtacacaaagcaaacctttagctatagactataaggtgcttgttttaaaacataaaagattcttttgtatctttttgctttttatatttatactctgttccttacctttggtagggggaaacaagagtcacttatttttgctacctttagctgtaagatgcttaaaggagctggcctttctctgagttccttacctttggtagggggaaactgcagagtcgattaaaggctcgattgaccaaatgtaaaatcccaaataagaagactttactcgttgagtttttgtaagaaactgattttatttggaaatatcttcggtttaaataggtgacatgagaatcgcatcttaaagtaaatggcctacgcagaggcctaagtaaatagtccccgccttatcgaggtcccacgctcgggcacatctgcctatcttgagcggcgaggaccttatctgtggtctcccactaagggactattttaggaggcggggaacgatctcaagtgactgactcatgtagtgtgcacttaaattacatgtttttgagcaatgcacccatgtcgccttagataacaaaatcctaaatataatttatcgctctcgattcatttacataagatatgaacggagcccaaaattgtaagtctttaaatatatttcgtgttcatgtgtgaacacagctccttaatgagtgtccgtattcgtatccgtatcggatcggaatcggattcgggatcgggatctatcggatgtggacgatgtagatgttgactgccagcgcgccgaatcgtgcaatcatctgcagaccgtggaatcatcgccggcacatatggagtggggtgcagcgaggaaaagcttgccattggaacaggcgcagagttggaagacgcggtgcatgtgatccctgctttgggcagtgcccagaatgggcggctgggccgtccgcaggttgggcataagtatcttggaggactccaggcgcagctgcatcgagaagagcacacggaggacaagtgattacgctactactacccactcaccccacgccatgtggctttcagtctacgctgctagcgttcaatcatacttacgctcccatcgagggctcggaacttgacgtcttccagggccacgacttctatgcctcctgcccgcgattgcaaattgatgtccttggccgccgtcatctccaattggcgtgtgggcgattcgagtctgtaattaaatcaggaggaaagtgttgtgccgccacctcggctcgtgagtgcagaatgctgaatcctgaatgctgaatgcaggatgcagaattcggtatttgggattcgggactgggtgtcccctcaccagaatgccctggcctaatgaaacggaaagtcgctcaattggtgcagtgccttgaaaacattgcaatttcaatttgaatggctgatatgactttgcgctgacatcgatgtcgccgcgtcaactgaaatgtttgcctgtgtatctggcggcagacaatttgtaattttcatgaaccaacaggcagctatcatcaaatttgtcaatgaaaatgttattacaagccgccgatcccgttaatggtccatgtgtacacatactcgcccacgcggacagatgggctgatggatgggcataatgcaagagactgccatcccaatcccaatcccagtgtcatccagtgccatccagtgccgtccagtgccgtccactgccacccatagccacccattgccacccagtgccaatcccaatcgcagtccgattctggcgttagccgtacaggaaaaaaaaggttctgccccctgtagcgctttttaattcactgccaccgtttgtgtacattctgacaaatgtgtataaatattttcgctgcccgcgtgagctcactgagctgaataccgacacctatacaggtggcatcggtgcggtgtggtgtggtgccactggatgcagtggagatgcagctgcagtgcaccccgaacaccacgacaccagctgggaatgggcgggggcgtggacgtgggcctggcgttgtttttgttaccgcaaaggtgacgttgacagagacccacgagggcgagaacgagcgtagccgagtgtttggtttgcttttaattttttatttctcagatttccccaacgaactccatccaagaacgactaatatgccacaacatggcgtgccgtggatgctgcccgttgctggcaacgaattcctgcaaaatttattacagtcattgaatttcaacaccggactgcagtagattggctttcgatttcatttactttaattggccatggcttcggcactccgttggcagatcgttcgctagccattcccttctccccattgtaccatcctcctgcctcctgttggcaatcaccagagtctcccggactcaacatccactcacatccacattcagtacttacctcagctcccggccgggctcggcccgcacatggggcgtctgcacggattcccggaagacggcgccaccttcgccgtcgatccgcagggcatgtgctccgatggtgacttcatctcggttcacggagaacaggctgcgtccgttggtgtcgtttatgcgaaatcccgccgacaggcactcgaacttatcgtgtcccaggaataaatgattctcaatcatgccattcggatcacgtgtattgattgaaaagttacgtgatgactctgttgaaagcaagaaataggtatagatacacggaaaatacatatgcgccggatgaggattgcagtgagtgtttgtatgacaaatgcgggtaatttaagcagtaattgcaatataaatgagtgaacacacaacgccaaacagccgcagaggcgttgaaagtgggcatccgtgctcatctggctaagatagcacgttacaagtcgccggaaacggaaatcaaaactcagtccccgctctcctccattgtctcagccgggtcgagcatggccatcgctcttggctatcaactatcagctatcagccctcgctgacaggcccgccaggtggctgtgctccgccgtgacccgtcacccgtcacccatcgaccatccctcagtcctagtcgggattcgtatccgtatccgtccatctggaccacccagcacccagtacccaccgcccacttccgcgcacgtatctgcggttgtcgcttatcgctgcgggaaatgctctgctgctttttggtaacattttgctgtcgacacatggacgaaggtccctgggaaatggcatcagtcttctcagctcgtgccttcatatggcttatctgtaattgtacatcttggctgctgctcaaggcagagcaagtggagcaagctgggcaagtggggcaagcggagcaacagccccgatctcatttaccgacgcttagcgctcctgatttctggctcctggtcgtgccttcgtgctgagcacgcttgatatctgttgatttatgtcttcactggcaccggcacccatttgtcctcgaccatccccaaccgtacgcctgcccacttctacacccatctacctaaccacctaacctcctgtccacctgtgccatgaatgtttaagcccgatgcacttgccctcaagcacgggaaaacaaatgggcctgcctatgctcctcggaggctgcataatagcggccggcagcgcagttcattaaacatgcactggatgatgccattcagtcattcagccatccagccacccagccatccagtcgtccagttgtccgccattcggccactcggccgagtcagtcatcggaggcagcatgtggctggtggtccccatgactttgacatttgcggaggaagttcatcagcggccgtcccatgtgcccctgaaccctcacccccgaatcctaggcgatggctcatcaaggcgtgaccacgatctaaccagccgcgtggggtgcgaattgtgtgaaatgtgtgaagtgtgcgaaagaagcgtgaaggttgcaaatttatgaaatgaatattaataggaatccgaacgggggatgtccgcacaactgcgacgccgtttggaggtgccacctaatcgctcgataatgccggaggtgttccacggaaaagcgactcgcactcacctatggaaatgggttgaccgtgccgcgaacggattgtggaggcgcgcagcatgtccataattatcgcttgtccggacagctgtatgccaccgggtacgattttaagctgccccatgccctcctgaaagcgataagcgaagtggtgagtgtttggggctcgggttgggattgggggcccagtggctgagtggcaattaccgttgagaactccatcaccttgagtatccagagggtgagcaccaggttcgtgatgatgagcagcatcagcagtagcagcagggtatacaggcacttttttcgccacccgatgaggcccaagtacgtctcgattccgccaacgaatccgtccacattggagcgtccagctgctgcgctccgaccgctcctcgtctcgctgcgccccagagcgtggccatgactatggccatggcttacagtagctttccccgtcgtcgcagtcaccgttgtggcggacatggcgcctccgccgcctcctccgctcccgaccttcgtcgtgggaatggcgttcagagccccaccgctgtttccgttaccgctcgctgagctggtgccaccagttgtcattgggccaggaccagaaccagaaccaggacggtggctgctggccttgttgggtcgcttgggcgtgttgccagccgttagttggcgcgagtgtggcccaaagtcagtgatctcactgctgccagcggccaacattccggcgctgctgcactgcagctagtggatgcatgggaagtgcatgactctccggttgcgtatcctgtatcctgcaaggagtgcaagcaaacaatgaacggcggtgcatggtagagtcaaaaaaaaaaaaggaactttcgacataagaggcagcaggctccacatgcgttgttccatgcatttggacaactttgtgagtgatttccaaaggagtcgagccctcgttcgcaaatccatagtgctaagacaacggtggatgccatgggtttgcacggtaatcgcggggagctgtccatgataaagcgcagaagtctgcgtctggacctggaagccatcgagtccataaatctgctctgctactccggagctacggagttacatgggtggcaaagcaccaaagcactaaagtatgcagctggctgatgcagttagccgcccatgcagtgggagctgcagatgccactggaagtgcatctacaaatgcgccagttgatgactttggcggcgccagctgttggcgacttcacacgtgcatctcttcaattatgcatgcctgcagcaactgcaactgcagctacctgcatttgcgaactgcgagttgcaagttgcgaactgggaactgggaactgaaaactgaaaactgcaaactgcggactgctggtgagtgagtgcgaatatatattctgactgcatttacatgcatgagctgcggaaatgacggcggggggtgggcggagtatttattaaaccattctgtcaaaagaaatcataataaataaaataaaaagtcataaatgaataaattatagactttttgctcgtgaggctcgtgaataaataaataagcaattctagaacagcaagtaaattattttccggccaatctgatgtcaaaggtaattagttgaatgcggctgttctgtttcgcgttgcctttggcgctttaaaggtcgaaaggtgtggcacgcatcattgccacagacagctcagttcatcttagtttatctcagttcagttcagatcaacagttctatactttggtggtggtgtctataattatcatcatcggcatcttaataaccaatccgcgtgagttatgaaatacattctgtgcgcgctcaataaagatgaaatatataaataaatatatagataatctctatttcggcaacttatttatatctctactcattttagctcttcggcgaggcctgctcgagatacaaagtgaaatactatttccacatgtctactgaccgatcggccgtaaatgctttaacaacctattctcttctggtcacctcatctccgaccaaaagtactccgccctccttccgtcgtcccttccatggccatggaccgattttgtttatgtttatcactatgtttatacagtccgcgtcggcaattacttcgattgtttacggcccattttagtgcattctgagtggcgaggagcatggagcgtggagcacggagggctcttaagtcaacgatttgtgatccgtctggatcgttggcaaggtgtgcggtatctgggatgtggcgcacctgccgaccgatttgaaaaagtattacacttaacgtacaaactacggatgaacaaaaaagagaaagggttcgatttacccccattgggtggggtaagtggcatagtcccatctggcgagcaattaacaggccaacttccacagtcggcaattgtgttatttattttgaaatgcttgtagtgcagacacaatatgggcagccccaagtagacagtgtgcacccagaaaataaaatagtatatgtttcacaggtttgtgggcctttcaacgcctttctcattataattttccaagttcgtacacttttgtgaccctgtattcttttgggtgcgctggcagttgcatcctgccacagtaatctgaaaactcgaccagattccaggccggatgaaggccacggatcgtgctccgagaattgttcaagggagctgaaggtgatttagtatctgcagacaggcatgcaaatgaaatcggattcggattcggattcggagtggtgtcgggatcgggaagtgggaagtggaaagcttgggaaacagtgcaatatgaactccgctgggcacaagcatcacgtgccgcacggcttggtaaagttgccccagcagttggtgctctcttaattttgttactgttgctgctgccacttcttgtgcttgtgctggtgccacacgtttttgctgcgacttatgtcacatccatgcggattccgtttacattgtgatattcatgggaaattactgaatggccatgagagcttactctaactggccatatgccacggagatcatggccgatattgacggactgcaaactggcattcacgatgaaggagccacttgtgcacgagaaacggctaaaaagtccttggcagtgggcaatttagagcgaagcacagtcgtacggattgcctgtccagaatggagtcaggtgccggaccagcaaacttgggtttggccgtttatagaaatgaactcgtaaatgaaaaatattgcattgtccagctattaagttatcaacggcaagggacggaaggaagggaaagaagggacgaaacgggacgggacgggttggacacagacacggtcgcagacatgaccgggaacctttatgcatatgtggctggggcaggaaagggttacgccagcaacgagcaactatcaactagtggggttaagcagcctgtgccacggcacgtctctgacaagggaccagcaccctaatatccgcacagagccgtagtcccagtcggcgtcgtggttttggacataatactccgtattccgactgcgactgcgactacgaccacgactccagctccgcacagcagtttcatattttgtaaccatttcgtgttgtgtcttgtgcgaaaggtgcttgtatgtagttgccgcacttaatggcgctcgtacgttttggcagcaggagcagcaggactacacttgtgtcattcttgtactcgcatgtatattgttatgtccttgttgccgcctgcaggacatttttattccaatcgtgcgtaagtggcgtagcagccataaaccttaacttttccacaaccatgtgggcaagggaagaaccctgctgtctttttggccaactaaatgggcaaatgactagttagattgggccaaacccacttgatcaccatgttcccgtgcgttttgcgtagattgagggaactagtgtggatcgaattgtttccttactaactaaagtctaagggacttggatcactgtcatatacatacgtactcttacactatgtcttgagcaaacagatttcgtatcttttacaaacgcgatctcttggccggattacgacacacactgaaatgggagtccgatcgcgacgacgcgctgaccttcacaattccaaacgccagccatgaacgggaggcgcgctagtcagatggctcagcaggcagcgaaaaccagaaagcacagacaaaaaaaaaacactcgaaaacgatttttcgaaactattgaattgggaaatcttggaacactctctctctcgtctctcgaatccaacgccagcggcaccaatgtgctccgtatgcgcgcacggctaccgtcctccttcacggcggcacaacaactgaaggcgtaaggccacaatcgccagccggaataccagacacttcacgtttggttcggttcggtacggttcgcagctgaagctgaagctgattgcggattcgggtgcgggttcggattgagattcggactcgggcacggaaagctttcggccgaccgggtttcactcaaacatcggttggctgaggacggccgacgctagtgcccccatgccccaacgcggcgtcgtcctcgctcgttgtcactcgagtggccaccgagccggaggcttcgtagcagccggcttgtttacgtttttagcccggctaacagccgagcaacacgtggtcggtcagcagcagccacgtgttgctgccgcgcctggtgaccagtggacatcctagcggagagcgaagtgtgtggtttgcccacggaactggctctcctcctcccgctcccacttgacagatcactccgctgaggagagggcttgattagagttccggcacaattaattattcagtaatatgtgtgcatttggcttcctgcatacggaactatagacatttgcatctagaaatgcgagaagcagtgaatatcgtagatatatgtatatgctctcaaagaataattcttactagtaatgaaagatatataagtactgatatgaaaatcatatacatatatatccatctgattttgtcttccataaccactttgttcctagtgtgcgagtggattgcctgcgctacaagtcggccagccccatccgcaatctggagcccgttcatccgctttcaaacccttttatcccttgctctctccccgcacccctgcctatttataaattaaaagcgtgttcatctttggccaaagttcataatttttgcgcctttattggaagcacgctggcaggggcggcgacggtaaatgccgtctgccagccacatacttgcgccctcctttgtttcagccagcaaaagcatatatattgggtcct

SEQ ID NO: 36248 - DNA, 1610 bp, DROSOPHILA
gacggtagccgtgcgcgcatacggagcacattggtgccgctggcgttggattcgagagacgagagagagagtgttccaagatttcccaattcaatagtttcgaaaaatcgttttcgagtgttttttttttgtctgtgctttctggttttcgctgcctgctgagccatctgactagcgcgcctcccgttcatggctggcgtttggaattgtgaaggtcagcgcgtcgtcgcgatcggactcccatttcagtgtgtgtcgtaatccggccaagagatcgcgtttgtaaaagatacgaaatctgtttgctcaagacatagtgtaagagatacaggatacgcaaccggagagtcatgcacttcccatgcatccactagctgcagtgcagcagcgccggaatgttggccgctggcagcagtgagatcactgactttgggccacactcgcgccaactaacggctggcaacacgcccaagcgacccaacaaggccagcagccaccgtcctggttctggttctggtcctggcccaatgacaactggtggcaccagctcagcgagcggtaacggaaacagcggtggggctctgaacgccattcccacgacgaaggtcgggagcggaggaggcggcggaggcgccatgtccgccacaacggtgactgcgacgacggggaaagctactgtaagccatggccatagtcatggccacgctctggggcgcagcgagacgaggagcggtcggagcgcagcagctggacgctccaatgtggacggattcgttggcggaatcgagacgtacttgggcctcatcgggtggcgaaaaaagtgcctgtataccctgctgctactgctgatgctgctcatcatcacgaacctggtgctcaccctctggatactcaaggtgatggagttctcaacggagggcatggggcagcttaaaatcgtacccggtggcatacagctgtccggacaagcgataattatggacatgctgcgcgcctccacaatccgttcgcggcacggtcaacccatttccatagagtcatcacgtaacttttcaatcaatacacgtgatccgaatggcatgattgagaatcatttattcctgggacacgataagttcgagtgcctgtcggcgggatttcgcataaacgacaccaacggacgcagcctgttctccgtgaaccgagatgaagtcaccatcggagcacatgccctgcggatcgacggcgaaggtggcgccgtcttccgggaatccgtgcagacgccccatgtgcgggccgagcccggccgggagctgagactcgaatcgcccacacgccaattggagatgacggcggccaaggacatcaatttgcaatcgcgggcaggaggcatagaagtcgtggccctggaagacgtcaagttccgagccctcgatgggagcctgcgcctggagtcctccaagatacttatgcccaacctgcggacggcccagccgcccattctgggcactgcccaaagcagggatcacatgcaccgcgtcttccaactctgcgcctgttccaatggcaagcttttcctcgctgcaccccactccatatgtgccggcgatgattccacggtctgcagatga

SEQ ID NO: 36249 - protein, 404 aa, DROSOPHILA
MLAAGSSEITDFGPHSRQLTAGNTPKRPNKASSHRPGSGSGPGPMTTGGTSSASGNGNSGGALNAIPTTKVGSGGGGGGAMSATTVTATTGKATVSHGHSHGHALGRSETRSGRSAAAGRSNVDGFVGGIETYLGLIGWRKKCLYTLLLLLMLLIITNLVLTLWILKVMEFSTEGMGQLKIVPGGIQLSGQAIIMDMLRASTIRSRHGQPISIESSRNFSINTRDPNGMIENHLFLGHDKFECLSAGFRINDTNGRSLFSVNRDEVTIGAHALRIDGEGGAVFRESVQTPHVRAEPGRELRLESPTRQLEMTAAKDINLQSRAGGIEVVALEDVKFRALDGSLRLESSKILMPNLRTAQPPILGTAQSRDHMHRVFQLCACSNGKLFLAAPHSICAGDDSTVCR

SEQ ID NO: 36250 - DNA, 2273 bp, DROSOPHILA
tcatgtcaatgacaatttatacaaatgccgagcaaacagtcgggcctcacaggtgggttagcaggtgggttgccaggtgggttgcctatgggtggtacggtggtgtgtgtttacctggtgagcagactatggactatggactaccaactggggagtgcgtccacaggacacacgaggttgcggccggcttggctctcctctgctctcctcggctcggctctgatccaagttgtgcaaacaatcataaataaagcaagcaatcaaacatgctgttgtagtctgattaccctaatttgtatgccacaatttgacacatgacaattgacacttagttacaatgggtgccaacatcaagcactccagccacaccacacacacacaccaaactgcaccacatagcacaacgcagcgcacatatttggcaatcatttattttagagccaattgaattttaagtagtcaaacatgcatatgacataagtacgcagccacacgcatgacaatgcacccagacagatacacggccatttctctgtgtgcgtgtgtgggtgtgtgtgtgcgtggttatgcaaacacttgcatcccgatgcatgcgtcctgtcgataaagggctccaggacaccaacgcccactcccgccccgaaatggcagactgatcgccctttcaaatcgtggccataaatatgacaagttgaattcattgaatggtttcatttcattgttccctccccattggcggcaaaaactaattggccaaactatttggctttaacagccactaagcgcgagcttcagagcccttcactccccatacccatcctcgttggatgtgtcgtgcgagtgtcatcgcagattaaagcccagaattgatggggcaatgttgtcagttttattgtcatggccgctggacacgcaagcaggagccctaattcgctagaacccaaaaaatgcagctccgacggccaggcgtctttttgaagtcgcctccaggggattggatctagtcgatgggctcctgctccatcggatgagtccatcggctcgcactcgcaatgtcattgttgtcgctctgacaaaggatgctggactcgatgctggatgatcccatcatcacgtggcgcgttggtccctccttccgcttcctgttgctcttcctgccgcacagccggcttgccacatgccacatggcacttgccacttgccacttgccgtggggcacaaaaatcaaacagcttacaatcggtggcggcaatccgaagtagaaatatagcatcaaggtgcgggaatggtggcgcagccaaagcgagagcccatgaataattccacttcaattccactttgtatatttcatttttgcagccagtgcaacatcatacatcacggcaacagcgtcagcgccagacgacgatgggcccaggacgaaaaggacacagggaatgagcctggcaattggctctcctcatcgctgaatgactgcctgactgaatgactggttgactgaatgactggctgactgacagccgagattcgaacgaaacatttcgagtccgcattatcctcatattaattaataacaattcatagaccaatcccatttggccgttggagttaatctgcccacatgtgcaccatttggtgagcggcgattttgtgatctgatcggcagatgcaatggcattccagcccgccggttgagcaagtgcatcagacccccaccccacccaccacacaaaaaaacaaaaaagtcaacgggtatccgctagtcggatcatcgagacagcacatcgttgctttggttttggtctgtttatgccatcgctctgcacttaaataaacttttgtgtcaaaattttatcaattattcagttaaaatgcatggcaaatcctgttaaaactgcagcagcagcggcaacaaaaacaataacaccatcgatgacaatggcatcgagtgcaaaaaccaaaaatcccgagagggaggcactgcctccacttatgggcgggggtgatggcggagaaaccatgtcactggccacatatggccatttgtcaattgaatgatgggaatatgaatttatggcattaaaatcttttggtttttcggccgtttgcacgaagtgaaagcgaaaatgcagcaaaaaatgcagaaaagaaaaaaggtcgagcggaaaacaaagagttggtgtgaaagcggacaaaagctgactaggatcaggaggcccggcaaaagcggattattcgtaaaaacaaactccggcgcagagcggcaaaaagat

SEQ ID NO: 36251 - DNA, 273 bp, DROSOPHILA
atgctatatttctacttcggattgccgccaccgattgtaagctgtttgatttttgtgccccacggcaagtggcaagtggcaagtgccatgtggcatgtggcaagccggctgtgcggcaggaagagcaacaggaagcggaaggagggaccaacgcgccacgtgatgatgggatcatccagcatcgagtccagcatcctttgtcagagcgacaacaatgacattgcgagtgcgagccgatggactcatccgatggagcaggagcccatcgactag

SEQ ID NO: 36252 - protein, 90 aa, DROSOPHILA
MLYFYFGLPPPIVSCLIFVPHGKWQVASAMWHVASRLCGRKSNRKRKEGPTRHVMMGSSSIESSILCQSDNNDIASASRWTHPMEQEPID

SEQ ID NO: 36253 - DNA, 2556 bp, DROSOPHILA
atattatatatatatattatataatatattatataacataatagttataataatataatagttacacctctagttttaaaaattgtagttaaaacgcgaaatttcattcaatcaatttcaatcaatagattctggggaataaaatgagaaacaaattaaaaagttttcgaaggtgtgggcgtgaccggtttggcggctttagggcgttagagtgggcgtggcagttttgtgcagtttgtaggcattagagagggcgtggcaacataggtcaacaaactagcctctagaatttgtatgctgaatcttaaccttctagcttttatagtttttaagatctctacgtttatagggacagacagacatggctagatcgactcggctattgatcctgatcaagaatatatatactttatatagtcggaaatacttccttctgcctgttacatacttatcaacgaatctagtatacgcgtcttttgtttttcttgtttttttttattctattcatggtatagacctaactaagctaagcacaacaaactagtttaaacaacgtgagctttaaatgcccattaagaaagaagcaaatactcaaccctggtgcggaaccttgctaaaagctacaccatacttttgtgccagactatgaggccctaaaattgcgttgattggaaatttttgtaatcgaaacaagcgagcagtgaaacccttattaaaaattacatgacaatttcacagaatataaagccaatagataaattaattgcaaacagccatccatgtggataattgcgtcatgttcgaggttcgtgctataagaccgcattttccgatattggttcaacctgaacagaagcacctctacgtgatcatgagtcatacgagccgatccgagttgtagataaccatatacccaattgcataagtcgccccaatgagtcaatgaatagttataatagtcgtagcgctcagctagcttgatttattagtccttgcatttctagaaggtaaagccgaaatttttgggcggcttcgggatggcgcctttcgaggtcgatgtagctgggttgatggagccactggtcatatttagatcctgtacttcatcctcctcctccttcgccatcatcatctcatcatcctcctccttcgccatcatcatctcatcatcctcctcctcctcatcatcatcatccatcagcacggacatatcaaaattggactcaattgggaggttaattgagttgcggcggacaagcgagcagcgacggttgggagctggctttggtggatcatccgggaactcattggtgaaagaataacgacgacgcggttgcacagcctgttttttcaacgacatgccggccaattcacgggtcaggtcctctgcgacacgatggacgcggctgaatcgcgaaacggatacagtcttctttttcaccccattggtcaagccccctgcggcacgatcgggtgcggatgaatcgtgaaaaggtcgtagtcttctttttcatcccattggacttggcaaaacttggcacgggagaactcatcatcgtcgattcgaatctcttgttcttcttcaagggaatacaattataggcaaaacgcgaaataccaatattacactcttgaacataccgaaatggatgccggtagattcttttccatctttggcttaattatgacttagcgcagtcttgattatttaagtaacgaacaaaaacaattagtcgaatatagagctatatagtatagaactcactggtcgtcgtcctcaatcgtaatgacctatccttttggctcagaaaaacaagttgactatcacgttgaagtttctggagcagagttcttagaatttaaatttgccctttactaatggctccactgttatcgatagggtggcaaccctacttgatagattattagagatgtgcttcttattgtttcctagtcagaagttcaagattttaagatcatttcatatcgtttatattgtttcgtgttttcaaggctttgtcactttgtattgtaattcatcagggactcttctctaaccaattgaacgaacgcctttgccagcgaatcgcgaacagttgagatctcaagctaaaaggttgagattcagcatacaaattctagagacaaggacgcagcacaagtttgttgactttacttgccacgtccactctaattttgaaccaattatcgaaaattttcattttcttaaaaatttctattgatttgccaaaaaactttttgctacgcccactataacgccctaaagctgccaaatcggtcacgcccacactttggaacaattttcaaatttttcctgattttattacccaatatctatcccagaaaaatgattaaatttcgcaatcgcattcacactagctaagtaacgggctttcttgttttgaattggctttcttaaaaatagaaattcaaaatgtaacaacaaggcaaaccttgccttcattcatacaaaagtcttaactaattgaatagctatagaccaatgtgggggtaatatcaattctgaaagctttg

SEQ ID NO: 36254 - DNA, 556 bp, DROSOPHILA
atgatgagttctcccgtgccaagttttgccaagtccaatgggatgaaaaagaagactacgaccttttcacgattcatccgcacccgatcgtgccgcagggggcttgaccaatggggtgaaaaagaagactgtatccgtttcgcgattcagccgcgtccatcgtgtcgcagaggacctgacccgtgaattggccggcatgtcgttgaaaaaacaggctgtgcaaccgcgtcgtcgttattctttcaccaatgagttcccggatgatccaccaaagccagctcccaaccgtcgctgctcgcttgtccgccgcaactcaattaacctcccaattgagtccaattttgatatgtccgtgctgatggatgatgatgatgaggaggaggaggatgatgagatgatgatggcgaaggaggaggatgatgagatgatgatggcgaaggaggaggaggatgaagtacaggatctaaatatgaccagtggctccatcaacccagctacatcgacctcgaaaggcgccatcccgaagccgcccaaaaatttcggctttaccttctag

SEQ ID NO: 36255 - protein, 61 aa, DROSOPHILA
MMSSPVPSFAKSNGMKKKTTTFSRFIRTRSCRRGLDQWGEKEDCIRFAIQPRPSCRRGPDP

SEQ ID NO: 36256 - DNA, 2651 bp, DROSOPHILA
aagttcaagattttaagatcatttcatatcgtttatattgtttcgtgttttcaaggctttgtcactttgtattgtaattcatcagggactcttctctaaccaattgaacgaacgcctttgccagcgaatcgcgaacagttgagatctcaagctaaaaggttgagattcagcatacaaattctagagacaaggacgcagcacaagtttgttgactttacttgccacgtccactctaattttgaaccaattatcgaaaattttcattttcttaaaaatttctattgatttgccaaaaaactttttgctacgcccactataacgccctaaagctgccaaatcggtcacgcccacactttggaacaattttcaaatttttcctgattttattacccaatatctatcccagaaaaatgattaaatttcgcaatcgcattcacactagctaagtaacgggctttcttgttttgaattggctttcttaaaaatagaaattcaaaatgtaacaacaaggcaaaccttgccttcattcatacaaaagtcttaactaattgaatagctatagaccaatgtgggggtaatatcaattctgaaagctttggtgaaatcctcagcgcgtgttcaaccagtgaaggcaacctctgcgggctttaatgcctcaattgttttattcatggtatagtcttaactaagctaagcacagaaaactagtttaaacaacgtaagctttaaatgcccatcaagaatggagcaaaccgtgaagcgtggtacagaaccctgtaaaagctacaccatactttcgtgccacactatgaagcgctaaaattgcgttgatttgaaatttctgcaatcgaagcaagcgagcagtgaaacccttattaaaaatgacatgacaattgcgacataagttgccccactgcgtcaatgaatccctaagcccgatcccgaccaagttataatagtcgttgcgcccagttaggtagatttattagtcacagcatttctagaaggttaaggcgaacttcttgggctgcttcgggattgcgcctttcgaggtcgatgtagctggcttggtggagccgctgttctcatttagatccttcacttcatcctcctccttctcctcctccatcagcacgggcatagcaaaattggacccaattgggaggttaatcgagttgcggcggacaagcgagtagcggcgtttgggagctggcttcggttgatcatccgggaactcgttggtgatagaaatacgacgaggcggttgcatcgaccgcgaggtggggttacaagcttgggagaaatgacccttcaaccagaggctcttgatttcggcataggtctggtagtggcccaccgcagttggctggggcagatggggatagtaatgcaggttgctggcaaaaaactgctcattcgaggtggaagccacaggctgttttggttttaaggacacgctggccaattgacgggttaggtcctcttcggcgcgagcggtgcggtcgaatcgcgaaaagaacacagtcttcttttgcaccgcattggtcggtccgtctgcgacacgttcggtgcggatgaaacgtgaataggtcacagtcttctttttagtcccattggacttggcaaaactttgctcggaagaactcatcatcgtcgattcgaatctcttgttcttgttcaagggaatacaattttaagcaagacgcaacataccaatattacactcttgaacatacccaaatggatgcctgtatattcgtttccattattggcttcattatgacttggcgcagtcttgattatttaagtaacgaaaaacacaatttgccgattatagagctatatggtatagaactaactggtcgtcgtcctcaatcgtaatgacttatccttttggctcagaaaaacaagttgactatcacgttgaagtttctggagcagagttcttaacagaagtggccatcactactggctcctctgttgtcgataggatggcaaccctagctgatagattattagagatgtgcttcttattgtttcctagtcagaagatcaagattttaagatattgaagacaatgcatagcagaagaatacaaatctcgaattagtaatatcagatcatttcatatcgtttatattgtttcgctttccaaggctttgccactttgtactgtagttcatcagtgactcttctctatcaaattgaacaaacgcctttgcaagcgaaacgcgaacagttgagttctcaagcactcagttctgtcgtttggttaattccctctggattagcaaatcccaaaatgttggtcagtgcaggatttgtggaacagagcataaagaagttttgcagtctcgtattggttaaactaaaaaatctgacaccaatccctttatttacatacattgtttgcatctcttgagtatttttgcgttttattattattggtgtatttatttacatttgtgattttgtattaaaaatggggtaaataactatgatatttggcttttttatatcaatacggtaaaaatcaattaaaacccgaaattgttcgaaccactcctttcgggcgccaaacagtcaagttctcaactctaaaggctactactaaagctcactagccaagatacacggccactgtccactgt

SEQ ID NO: 36257 - DNA, 651 bp, DROSOPHILA
atgatgagttcttccgagcaaagttttgccaagtccaatgggactaaaaagaagactgtgacctattcacgtttcatccgcaccgaacgtgtcgcagacggaccgaccaatgcggtgcaaaagaagactgtgttcttttcgcgattcgaccgcaccgctcgcgccgaagaggacctaacccgtcaattggccagcgtgtccttaaaaccaaaacagcctgtggcttccacctcgaatgagcagttttttgccagcaacctgcattactatccccatctgccccagccaactgcggtgggccactaccagacctatgccgaaatcaagagcctctggttgaagggtcatttctcccaagcttgtaaccccacctcgcggtcgatgcaaccgcctcgtcgtatttctatcaccaacgagttcccggatgatcaaccgaagccagctcccaaacgccgctactcgcttgtccgccgcaactcgattaacctcccaattgggtccaattttgctatgcccgtgctgatggaggaggagaaggaggaggatgaagtgaaggatctaaatgagaacagcggctccaccaagccagctacatcgacctcgaaaggcgcaatcccgaagcagcccaagaagttcgccttaaccttctag

SEQ ID NO: 36258 - protein, 216 aa, DROSOPHILA
MMSSSEQSFAKSNGTKKKTVTYSRFIRTERVADGPTNAVQKKTVFFSRFDRTARAEEDLTRQLASVSLKPKQPVASTSNEQFFASNLHYYPHLPQPTAVGHYQTYAEIKSLWLKGHFSQACNPTSRSMQPPRRISITNEFPDDQPKPAPKRRYSLVRRNSINLPIGSNFAMPVLMEEEKEEDEVKDLNENSGSTKPATSTSKGAIPKQPKKFALTF

SEQ ID NO: 36259 - DNA, 2965 bp, DROSOPHILA
ggaatacttctgtaatgccctgtgtttcttatgtcaatgctgcgtatgagttataagggtcatgaagcgcgaacaatttgagtggggctctccatgtccgatggtacgcaaacaccgagataggtcatcactggtcacatggggatccatccaactgaacgcttaattcgagttgaaggctttattgcgctggctaaacaaacgcaccttggtgccaatttcggtgctcattttttgtttttgtcatgttttatcaactttattgtctctgcggtgtttaccttgcacagccgcagcttttcgacacccacagaaacgcagggaaaaaacgaaaaagaggcaacgacggaggcctagacgccacacgtgggtcgccagtgcccctggtgaaagttcaaggctgcaacaggtagacacaagccgcaaacagagtgggtttacctagcagatgtgcttgcatatccgaggcgcaaaaccaaccaaacaagctccacatcgcggcggtgccacaaggatcatggaaccagggatcgcagatctgcagtagtttaaggcgccacacctctcttgccaggaaggataccttccaattagagcgaacgccttctaaagcgaattccaatcagcaaggacttcgcatgtaaacgaactaatatggcgattagctatttgaaacaatctcttccattgagtgtgtattgtggatagcatggctcgtgggctccggaatgcgctgcaatttgtctgctggcactactgataccgctgcattgttaccgccttgttgcatgcatcatgccatgcccacgtccacgtccacgtttgtgtacaacttcttacatgacgtgggcgccggcatttcctcgatgcggtgcacccaacccgaaatgcaaacccggaaaatgtgcaagatactgctgcacgaagcacaccaggccgttatgattcagtaattacgtttgaaaatcgagtaaatggccaagttcaaaagctcttagctggcttgcttcatcgctataaatttaattggtgtacattgtgtttactttctggggcttaatcgtacaaagtctttatgtacatgttgatgacgctagactggttaagacaaacaagatcaagtaacagcagtgcttaatgcgtaatccgtaatgcttatgctatgcgagtcgtacaaaacaatgcttatggtaatggctatcggttagaatgagcgacaaatgtaacaggcgctaccatcgggcgaatcgagcgaagcgggcgcgacttggaagatataagtatctgtatctggctttgtatccgtatccgtattttgacttgcgtatttggcctgagagttgcgattgaggccccaactttcgttagttgctgggggcggtcgccgatgtacccgtcggctgcttgaagataacgcctgtgatctcgccgtccttctggatgacacagcgtctgcggggaaagaaacgggtgtcaattaatacgcagcagaaatataattcataaatagtttaaggtacattctttaaactattccgactattccaagagtagtccgtatctagtccacctagatacagcccctcatatccctcctcccacttacttgtttccgctgtaaaggcaaatcgttgcaggagccgtggcattcagctccagtttggccacctgctcggaaatggccattccgatgccggacacgttcggatcaatgtctcctttggctgcaaaaatgtattgtggcattacggcacggccactgactaatcatcgatactcactgcccaaacacaatccctggcgattggccagcagagctcccactgtgtcctgccgtgcggcgctgaaaatacgttatggatttgtggtttatttggagtactatctggaatcgacggatcgagtgtgcctacatttccgctaggactttctccagttgctgctccatggacgacgtcgttatttccgcagtgaaaaaacaaagcaagaacagaaccaaaacaatgaccagtgtgaccgctcgccgagaagacggcaataccaataagccgggcgttaagaatccatgcacagtgggtactacttgcaaaaaaaagtgactcaaatttaatatttagtttttagtttaaaaaaaagggataaccttcgcttatagttaagaatccagaaacaatccactttggtgtatattgtatatggtttattcatagcaatctacatacaaattactcaaatcgaaggggtgcgacgaagcacacaaaacaaaacactgcaatcgccagttacaactaattgcaattaatttatttgataccgttatatgcagcgcagcggagtgcacaaaattagtttaattaattggctttgatggtgtttttttttttttttttggaatcaattactcgctctgagaagctgtctgcgccataaatatgtaaagttcgcacatggaaaaataattctcaacatgctgcagcagttgaattaattgcatcgcatcggatgaccccgggaaattatgtatatttatgtactacttaggtgggcgtggccagcggcgcggcctacacgatctcgtacttttccacgaacagaatggactcgcttgaatacttgaccgccgcctcgctgtccacctgcaccacatcctgggccacgacgcccgcatacggcgttttcgagacgaaggacacctgcaaggggaagaagtcaccgggaatggaggcactgcagctgaactccatagaaccggacttgttggcggcatcgattattggaatgtgccactggagcacatgcttgcgtgaatcgtagttgtaggtgccgtcgtactccgccaccgaaggctgcacattcattctaagggtgaaatggaataagtaatcgcctgcacatctacgccattactacacttacggcaagggaatgacaatggccacgtcctgcagctctagctgctgcgcct

SEQ ID NO: 36260 - DNA, 684 bp, DROSOPHILA
aaataacgacgtcgtccatggagcagcaactggagaaagtcctagcggaaatcgccgcacggcaggacacagtgggagctctgctggccaatcgccagggattgtgtttgggcaccaaaggagacattgatccgaacgtgtccggcatcggaatggccatttccgagcaggtggccaaactggagctgaatgccacggctcctgcaacgatttgcctttacagcggaaacaaacgctgtgtcatccagaaggacggcgagatcacaggcgttatcttcaagcagccgacgggtacatcggcgaccgcccccagcaactaacgaaagttggggcctcaatcgcaactctcaggccaaatacgcaagtcaaaatacggatacggatacaaagccagatacagatacttatatcttccaagtcgcgcccgcttcgctcgattcgcccgatggtagcgcctgttacatttgtcgctcattctaaccgatagccattaccataagcattgttttgtacgactcgcatagcataagcattacggattacgcattaagcactgctgttacttgatcttgtttgtcttaaccagtctagcgtcatcaacatgtacataaagactttgtacgattaagccccagaaagtaaacacaatgtacaccaattaaatttatagcgatgaagcaagcc

SEQ ID NO: 36261 - protein, 100 aa, DROSOPHILA
MEQQLEKVLAEIAARQDTVGALLANRQGLCLGTKGDIDPNVSGIGMAISEQVAKLELNATAPATICLYSGNKRCVIQKDGEITGVIFKQPTGTSATAPSN

SEQ ID NO: 36262 - DNA, 4427 bp, DROSOPHILA
tacccgtcggctgcttgaagataacgcctgtgatctcgccgtccttctggatgacacagcgtctgcggggaaagaaacgggtgtcaattaatacgcagcagaaatataattcataaatagtttaaggtacattctttaaactattccgactattccaagagtagtccgtatctagtccacctagatacagcccctcatatccctcctcccacttacttgtttccgctgtaaaggcaaatcgttgcaggagccgtggcattcagctccagtttggccacctgctcggaaatggccattccgatgccggacacgttcggatcaatgtctcctttggctgcaaaaatgtattgtggcattacggcacggccactgactaatcatcgatactcactgcccaaacacaatccctggcgattggccagcagagctcccactgtgtcctgccgtgcggcgctgaaaatacgttatggatttgtggtttatttggagtactatctggaatcgacggatcgagtgtgcctacatttccgctaggactttctccagttgctgctccatggacgacgtcgttatttccgcagtgaaaaaacaaagcaagaacagaaccaaaacaatgaccagtgtgaccgctcgccgagaagacggcaataccaataagccgggcgttaagaatccatgcacagtgggtactacttgcaaaaaaaagtgactcaaatttaatatttagtttttagtttaaaaaaaagggataaccttcgcttatagttaagaatccagaaacaatccactttggtgtatattgtatatggtttattcatagcaatctacatacaaattactcaaatcgaaggggtgcgacgaagcacacaaaacaaaacactgcaatcgccagttacaactaattgcaattaatttatttgataccgttatatgcagcgcagcggagtgcacaaaattagtttaattaattggctttgatggtgtttttttttttttttttggaatcaattactcgctctgagaagctgtctgcgccataaatatgtaaagttcgcacatggaaaaataattctcaacatgctgcagcagttgaattaattgcatcgcatcggatgaccccgggaaattatgtatatttatgtactacttaggtgggcgtggccagcggcgcggcctacacgatctcgtacttttccacgaacagaatggactcgcttgaatacttgaccgccgcctcgctgtccacctgcaccacatcctgggccacgacgcccgcatacggcgttttcgagacgaaggacacctgcaaggggaagaagtcaccgggaatggaggcactgcagctgaactccatagaaccggacttgttggcggcatcgattattggaatgtgccactggagcacatgcttgcgtgaatcgtagttgtaggtgccgtcgtactccgccaccgaaggctgcacattcattctaagggtgaaatggaataagtaatcgcctgcacatctacgccattactacacttacggcaagggaatgacaatggccacgtcctgcagctctagctgctgcgcctccagttcatactcaatgttaacatcgcatccaccctctccattatccgatggccagcagttaactgggaaaaagggagaaacacaagcacgtggctgagcgagagggaagaagttgtttgggtttggatgaacttactggtcagcgggactgccgactcgtcctgcgagacgaagcgccacttgagcacacccacatcggtgttaaggggaaacggcttgcccaagttctttagtccgatggtagtgcgcgacttgaacagctccttgtccacgttggggtgggtctgcaactgcaggccctgtgtgtggttgggagacagcttcagcaaaatgcgtccgtaggcctcgtccgtaatgcgcaacgtcaggaggcccgagttctcgaactgctgcacgccaccatcgcgtcccagacgcactactagcttgtcctcaatcttcagatgtacgctgaaaatagatgttatgcatttaataactaactatacaatcgagctgaaacccacctctctttgtgaatgtccgacgcgatagctgccttggccgctgcactggcgctagctgcagcactggaacctccagcgggcgccgccggtgccagattggcaatcttctcgccctcgttcttcagctgatccacgaaactatcgacgtccttggacttgccacctagcttgagggcattgcgggaagctggtttactgctgatgaaatcagagcaatgagtcaggagcctagatttaatagagcagagaaagaacttacgcagccgccttggatttggtgtccacatcgatggaggtgatgccggtgttggcgctggaggcaccggaactgctgctcacgccgctactgccaattccgtcggcgctaaagccgccgctgcggctgccaatgccacccagggagggaccaccccgtttgctggcctccatgcgctgccgctgcagttccttggccttctcgcgcatcttctggcgcgcatcacgctcctgcgtctgacgcactgcctggtagaccttctcctcatgtgagtccatctccacgaaggtcttgatctgggccaagttgacgctctccctgtagccgagtgccacgatctcgtcaaatgcgaagatcagattgaaggcattctccacaatctccttctcgtcgagcgagtggctgtactcgggaatctgcaagcgatgggcctgattaacactgcggcttgagtacatccgtgtgcaactcaccactttcgagaagaggcgcagggtctccagatcctccagaatgttgctggccttagtggtgatgagcagcatatatagtttctccatcggctggtagacgtagcgcacggagtccgtctccacgtaagtgtgctgcttgccagcagtcatcagcttgggaaaggcagccagcagtccctcgatgcgtgccttcgtcatctcgacgaactgacgtgacagaatcactgcgtgtacaaacgttacgggttagctaaagtgattatttcttgcggtgcatgcaagccacttacctttgccattcttcgtgcagacagccgcagcaattaatacctgcaagtcggataggtttagtgataataccggaatgcaataacccccgccgatgagacccaaaatcgccgacgtgtaggtgtgtgcgtgcgtaggtcggggctcttaccattttgctgctgcgtttgacgtttttgccctggaaaatacttcgcggatcggatgcggacggcgcaggatggactgctgctacggatcggatttgcggggcgatagaaacgttgtttaacaatcaatccccgtagctgacgtgttcggttctgcgacaaatgtttaccgtggctttgtgtgagttcgggtagtgtgaccagcgccactgcggaaacacagtgttaatacgccttgggccaaggtaggaggtaggcccgtggataccctgccattttttttttttttttttgctactccatctagaaaattgttgtgtctagccttagcaagtacaccgcactactcacttttcaccagtgtagaatttaacatttcaagattgtgcaaagcaattatttaataggttgtattaggcatatattaacatacataaacagacatactctttcactgtaagtaatgagtccaagcatcgcctttaccaacaccgccggccgacaccggctatgcaaaatcgagctttacagcactagcttttaaatgtccgtttaattttaatggaaaccatgtttctggttaagaaaatatataatacattaaacaaaatatactacttctactacttcgcacgaactgagatctcagttaagtttttcaaattgtctatgatataccaaaaatggtttagggcttggagcacataatttaacaaaactcaaaagagaacccagctagttggacgactcgtccagtgtcagcgtttccactcggctggcgatcgacgccgctgtctcctccgccggctgacccttctgcttggcgtactccacgctcaggatgcgcatcacctgtgcggcagtcatgttgtcgcgcttgtgtctctggaagttgtccttaacgaacttagcaaatcccttcgcctcgcccgccggcgtggatacggtgtttccttgcttgtcctttttgttcaggaagagggtgatgggtccccggcagatcctgcagcgcaaatcttccaccttgcgggatcgggaatgggcatgtgacctgtgatgcgtaaaaactgcatgacaataatattctttttatcacttgggagaacttacgctttgtcgcagctcaggcacttgtaggtatacttgaattcaatgctatagttgtggcagaccttgatc

SEQ ID NO: 36263 - DNA, 1947 bp, DROSOPHILA
aaagccacggtaaacatttgtcgcagaaccgaacacgtcagctacggggattgattgttaaacaacgtttctatcgccccgcaaatccgatccgtagcagcagtccatcctgcgccgtccgcatccgatccgcgaagtattttccagggcaaaaacgtcaaacgcagcagcaaaatggtattaattgctgcggctgtctgcacgaagaatggcaaagtgattctgtcacgtcagttcgtcgagatgacgaaggcacgcatcgagggactgctggctgcctttcccaagctgatgactgctggcaagcagcacacttacgtggagacggactccgtgcgctacgtctaccagccgatggagaaactatatatgctgctcatcaccactaaggccagcaacattctggaggatctggagaccctgcgcctcttctcgaaagtgattcccgagtacagccactcgctcgacgagaaggagattgtggagaatgccttcaatctgatcttcgcatttgacgagatcgtggcactcggctacagggagagcgtcaacttggcccagatcaagaccttcgtggagatggactcacatgaggagaaggtctaccaggcagtgcgtcagacgcaggagcgtgatgcgcgccagaagatgcgcgagaaggccaaggaactgcagcggcagcgcatggaggccagcaaacggggtggtccctccctgggtggcattggcagccgcagcggcggctttagcgccgacggaattggcagtagcggcgtgagcagcagttccggtgcctccagcgccaacaccggcatcacctccatcgatgtggacaccaaatccaaggcggctgccagtaaaccagcttcccgcaatgccctcaagctaggtggcaagtccaaggacgtcgatagtttcgtggatcagctgaagaacgagggcgagaagattgccaatctggcaccggcggcgcccgctggaggttccagtgctgcagctagcgccagtgcagcggccaaggcagctatcgcgtcggacattcacaaagagagcgtacatctgaagattgaggacaagctagtagtgcgtctgggacgcgatggtggcgtgcagcagttcgagaactcgggcctcctgacgttgcgcattacggacgaggcctacggacgcattttgctgaagctgtctcccaaccacacacagggcctgcagttgcagacccaccccaacgtggacaaggagctgttcaagtcgcgcactaccatcggactaaagaacttgggcaagccgtttccccttaacaccgatgtgggtgtgctcaagtggcgcttcgtctcgcaggacgagtcggcagtcccgctgaccattaactgctggccatcggataatggagagggtggatgcgatgttaacattgagtatgaactggaggcgcagcagctagagctgcaggacgtggccattgtcattcccttgccaatgaatgtgcagccttcggtggcggagtacgacggcacctacaactacgattcacgcaagcatgtgctccagtggcacattccaataatcgatgccgccaacaagtccggttctatggagttcagctgcagtgcctccattcccggtgacttcttccccttgcaggtgtccttcgtctcgaaaacgccgtatgcgggcgtcgtggcccaggatgtggtgcaggtggacagcgaggcggcggtcaagtattcaagcgagtccattctgttcgtggaaaagtacgagatcgtgtaggccgcgccgctggccacgcccacctaagtagtacataaatatacataatttcccggggtcatccgatgcgatgcaattaattcaactgctgcagcatgttgagaattatttttccatgtgcgaactttacatatttatggcgcagacagcttctcagagcgagtaattgattcc

SEQ ID NO: 36264 - protein, 532 aa, DROSOPHILA
MVLIAAAVCTKNGKVILSRQFVEMTKARIEGLLAAFPKLMTAGKQHTYVETDSVRYVYQPMEKLYMLLITTKASNILEDLETLRLFSKVIPEYSHSLDEKEIVENAFNLIFAFDEIVALGYRESVNLAQIKTFVEMDSHEEKVYQAVRQTQERDARQKMREKAKELQRQRMEASKRGGPSLGGIGSRSGGFSADGIGSSGVSSSSGASSANTGITSIDVDTKSKAAASKPASRNALKLGGKSKDVDSFVDQLKNEGEKIANLAPAAPAGGSSAAASASAAAKAAIASDIHKESVHLKIEDKLVVRLGRDGGVQQFENSGLLTLRITDEAYGRILLKLSPNHTQGLQLQTHPNVDKELFKSRTTIGLKNLGKPFPLNTDVGVLKWRFVSQDESAVPLTINCWPSDNGEGGCDVNIEYELEAQQLELQDVAIVIPLPMNVQPSVAEYDGTYNYDSRKHVLQWHIPIIDAANKSGSMEFSCSASIPGDFFPLQVSFVSKTPYAGVVAQDVVQVDSEAAVKYSSESILFVEKYEIV

SEQ ID NO: 36265 - DNA, 5409 bp, DROSOPHILA
agtccctcgatgcgtgccttcgtcatctcgacgaactgacgtgacagaatcactgcgtgtacaaacgttacgggttagctaaagtgattatttcttgcggtgcatgcaagccacttacctttgccattcttcgtgcagacagccgcagcaattaatacctgcaagtcggataggtttagtgataataccggaatgcaataacccccgccgatgagacccaaaatcgccgacgtgtaggtgtgtgcgtgcgtaggtcggggctcttaccattttgctgctgcgtttgacgtttttgccctggaaaatacttcgcggatcggatgcggacggcgcaggatggactgctgctacggatcggatttgcggggcgatagaaacgttgtttaacaatcaatccccgtagctgacgtgttcggttctgcgacaaatgtttaccgtggctttgtgtgagttcgggtagtgtgaccagcgccactgcggaaacacagtgttaatacgccttgggccaaggtaggaggtaggcccgtggataccctgccattttttttttttttttttgctactccatctagaaaattgttgtgtctagccttagcaagtacaccgcactactcacttttcaccagtgtagaatttaacatttcaagattgtgcaaagcaattatttaataggttgtattaggcatatattaacatacataaacagacatactctttcactgtaagtaatgagtccaagcatcgcctttaccaacaccgccggccgacaccggctatgcaaaatcgagctttacagcactagcttttaaatgtccgtttaattttaatggaaaccatgtttctggttaagaaaatatataatacattaaacaaaatatactacttctactacttcgcacgaactgagatctcagttaagtttttcaaattgtctatgatataccaaaaatggtttagggcttggagcacataatttaacaaaactcaaaagagaacccagctagttggacgactcgtccagtgtcagcgtttccactcggctggcgatcgacgccgctgtctcctccgccggctgacccttctgcttggcgtactccacgctcaggatgcgcatcacctgtgcggcagtcatgttgtcgcgcttgtgtctctggaagttgtccttaacgaacttagcaaatcccttcgcctcgcccgccggcgtggatacggtgtttccttgcttgtcctttttgttcaggaagagggtgatgggtccccggcagatcctgcagcgcaaatcttccaccttgcgggatcgggaatgggcatgtgacctgtgatgcgtaaaaactgcatgacaataatattctttttatcacttgggagaacttacgctttgtcgcagctcaggcacttgtaggtatacttgaattcaatgctatagttgtggcagaccttgatctgcgggagatcggggaacttgtcgttggctctttgtgcccacatcttccacacccgtccgtgtccaccctcgccattgaatacccaggccgcagcatggcagagttcgtgtatcaaggtgcaacgcaggcggtccgcggtagtcagcactttgacgctcagttccaccacgctgctacgctggttaagtctgcaaacaatatatatttatcgaattcaaggaggatatctggttgtctctataagaatcacccacttgcgcttgttcatgcaccggccggcagtgttgcgcagcaatttggaccaggtgatgggcacatccagctcgttgttgaacacctgggcgttatacatcttgtaaagatgctgggccagctgatccttatttcttgcgaagttttcccgatagaagaaggcctcgttgtccgccctatcgcggctcacttgtccctccagggatttcagaaagccgcacttgccgccgctcgcaacgggtgagagatccttctgcttcctaggttttggaatctgcttagtggattttgggggggtagaaacttttggcggtgcagatgttttgggcggagcagtgcctttaggcggagccgtttttggcgtaagcaacttgagaattgggctctcgtggggcgttgtctgaccttgctgcccaatgccaagcttcttctttacctcctgcactctcctgtggactggagtcccgggtaggtagtcgctctccagttcatccagcatgtccaggtccaacgccctgtttactatctccttagcttggttatcgttctcgaatcctgcgttaggggtaaaaagttggcgacgaatgtttggctgctgcacaggagtggcaggaagtttagccttaacgctggcgcgacatgatcgcagtatgtcgtccaggcgacggtgacattttggcgctagaataatgagttactaaaacatttaagtcagccatttaaaatactaatatcaactcttacacggcgagtcctggtcgggattgctgatcacctccacctcgtctttgctcaagtcgagataggtaaggtcgcctctcttttgcttgttctccttgtccttatcactgtcgctatcactaccgctttcgctaaaagtggcatctgcatcctcgtcgtcggaggcgtctgtcccgctgtcggaatctatgagcttgcgccagcgatcctcgtctatatgattggtgcgtgggcgtgtcaacggcttttgagtccgcggacgtctctccgtttggacagcgcgcatcggaggcagacgagtcgagtttaaaggagtctgatttgtgcgcagaggtttagtaactggggattaaagcgcgtgtgactcaacggttggaggataaaaagcatggataaattcttacatatgctgaagtccccgagaacactttcatctggcttgggcttcttttttttagcggtggttaccgctgttgcttgaatattcctgggcctcagaggagcctgtttaccgccactaccactggagcgctttagagtgcggatcacatctggtgtctgccaagacttgccgtacaattgattgagcagcttttctgcgtgggtgagaaactgctcatcctcggatgcatcatccacagacagcatggatttttggtggctctgagggtcctgctgctggtgctcttggtgctgcacctcctccgagctgggcagggacttagtggccctgggcgaagagtaatgctcatcgtcgtcttccgccgaacttgactccatagtgggaatgctgattttaatgttgatcttcgctgaaatattaatactgctgacctggatagaaccgtgttcgtcccctcccgatgtggaggaaccagagctggccttttgcggcgtgagctcgccctcgctgctggtttccggtatttcaatggattcatcaggaacgggctcattgttgtgaatcgtcgagttatgggtctcagaactatcagaacacagggtgttgggctcggtgtcattgtctgctaaacgcttgctgctgtatgtgggctcaagctcctccgatccgagagtattcgcctccgtttcgtcgtctgccaaccgcttgctgctatccaatcgagtggcatctgctgagcagatggtattcacctgcgtatcgttgttcgccagttgtgtgctgttgtaaatcggcctggtagtgggtggctgccagtcctcgtcggtgggcgacatggattcggtgtccgcatcggctagacgggattgccgctggctggaagagagggggggcggtgtcaatgggccattccactccatctcgcgtcgctctatggacacatcgcgcagaaaagcctcgatgcgctgcactttttcggttgtgagcatgggctgtggtatgtcttcctggccgggattagccacaatttcccgttcactcacagccatgctatcgggaggcaagggttcttgctcatcctcgctagaatcggatatggtgatacaggaggcggcgtcgtcgtcgccggatacgttctcttccgtagtggaggaaatgcaaatggagatctccggcttggccgagtgctcctcatttatgggctgcactttcaaattgctgatgccagcggacaggagctctacatcgcccacatttgccacatcctggctgcagccgtcggcgctcagctgcaaggcttccatgtagtcggaattgtcgagttctgtgtcctccgtatttgccccgcaggacggagcgggtgctcccacattggcgcgcatgggagctgctggcagtttccttgttttctggtcgttcctcttttctggatgatccttcggcgcatgggacacctggagtcgttttttgtgggaggatagcgtcaaattggcgaacttttgattgaagggaacttttactttgctcgggtcgaccgcattgaagagcctatacttatgatccgccattttgggggcgtcgttggggcatttacggtaaatcaatctctatgaatatgctttaagcaaaattcgtatttgctattattctgtgcgcgtcgatttacgttcatcgttatcgatagactatttgattttccggcatctagctagtgctgttcgaaaatgtctaaaacggcatcactagtaaaacgaattcttccaaggaaatgaaactaaaaacaaaaccaaactactgctcagttaatttaataccatagtacacccaaacttacaaaattagccaatggcgattgtgtcgtcggcccgtgagtcgctctcccatgcgatgaacaaccgcttcttgcccaacctggagtacttgctgcagggatctatcctggattccgccgtggaacacttgatgcacaggtgggagacccagtgtcagatttgaatcgtttgcacccgactaacagtctaaccgcctacccactatcagactaaagggactctgcgacaatgtggacacctcgccggagccgtttcacgatctggaagtgtgtatgagccttcgccagcccaatgccaaccagccgctgcttcttcgcgtgcgccgagcccttggtcgcgatgcaccctttcagatgcgctacctaggaaaccccgaggtggatctgcgccggcctacattggtacgcagctgcatggactgcgcctgcaccaatggcattttggaattcctcacggaaatgggcttccgcctggagttcgagtacatagcaaagggttggaatcatgaaatatattacgcttgggttgccaaaatggatagtgacaaatggacttatttcaggctatatgttccgcaaggggcgcatgaagattaccgtctccaagctcattaagattgtgcccggcaagcagcaggacatggccaacgagccaatctcacaaagctacatagtggaactctctgtggtggcgccaacggggcaggagaatgtcggcgaggaaatgcgcgtgtttg

SEQ ID NO: 36266 - DNA, 3159 bp, DROSOPHILA
atggcggatcataagtataggctcttcaatgcggtcgacccgagcaaagtaaaagttcccttcaatcaaaagttcgccaatttgacgctatcctcccacaaaaaacgactccaggtgtcccatgcgccgaaggatcatccagaaaagaggaacgaccagaaaacaaggaaactgccagcagctcccatgcgcgccaatgtgggagcacccgctccgtcctgcggggcaaatacggaggacacagaactcgacaattccgactacatggaagccttgcagctgagcgccgacggctgcagccaggatgtggcaaatgtgggcgatgtagagctcctgtccgctggcatcagcaatttgaaagtgcagcccataaatgaggagcactcggccaagccggagatctccatttgcatttcctccactacggaagagaacgtatccggcgacgacgacgccgcctcctgtatcaccatatccgattctagcgaggatgagcaagaacccttgcctcccgatagcatggctgtgagtgaacgggaaattgtggctaatcccggccaggaagacataccacagcccatgctcacaaccgaaaaagtgcagcgcatcgaggcttttctgcgcgatgtgtccatagagcgacgcgagatggagtggaatggcccattgacaccgccccccctctcttccagccagcggcaatcccgtctagccgatgcggacaccgaatccatgtcgcccaccgacgaggactggcagccacccactaccaggccgatttacaacagcacacaactggcgaacaacgatacgcaggtgaataccatctgctcagcagatgccactcgattggatagcagcaagcggttggcagacgacgaaacggaggcgaatactctcggatcggaggagcttgagcccacatacagcagcaagcgtttagcagacaatgacaccgagcccaacaccctgtgttctgatagttctgagacccataactcgacgattcacaacaatgagcccgttcctgatgaatccattgaaataccggaaaccagcagcgagggcgagctcacgccgcaaaaggccagctctggttcctccacatcgggaggggacgaacacggttctatccaggtcagcagtattaatatttcagcgaagatcaacattaaaatcagcattcccactatggagtcaagttcggcggaagacgacgatgagcattactcttcgcccagggccactaagtccctgcccagctcggaggaggtgcagcaccaagagcaccagcagcaggaccctcagagccaccaaaaatccatgctgtctgtggatgatgcatccgaggatgagcagtttctcacccacgcagaaaagctgctcaatcaattgtacggcaagtcttggcagacaccagatgtgatccgcactctaaagcgctccagtggtagtggcggtaaacaggctcctctgaggcccaggaatattcaagcaacagcggtaaccaccgctaaaaaaaagaagcccaagccagatgaaagtgttctcggggacttcagcatatttactaaacctctgcgcacaaatcagactcctttaaactcgactcgtctgcctccgatgcgcgctgtccaaacggagagacgtccgcggactcaaaagccgttgacacgcccacgcaccaatcatatagacgaggatcgctggcgcaagctcatagattccgacagcgggacagacgcctccgacgacgaggatgcagatgccacttttagcgaaagcggtagtgatagcgacagtgataaggacaaggagaacaagcaaaagagaggcgaccttacctatctcgacttgagcaaagacgaggtggaggtgatcagcaatcccgaccaggactcgccgtcgccaaaatgtcaccgtcgcctggacgacatactgcgatcatgtcgcgccagcgttaaggctaaacttcctgccactcctgtgcagcagccaaacattcgtcgccaactttttacccctaacgcaggattcgagaacgataaccaagctaaggagatagtaaacagggcgttggacctggacatgctggatgaactggagagcgactacctacccgggactccagtccacaggagagtgcaggaggtaaagaagaagcttggcattgggcagcaaggtcagacaacgccccacgagagcccaattctcaagttgcttacgccaaaaacggctccgcctaaaggcactgctccgcccaaaacatctgcaccgccaaaagtttctacccccccaaaatccactaagcagattccaaaacctaggaagcagaaggatctctcacccgttgcgagcggcggcaagtgcggctttctgaaatccctggagggacaagtgagccgcgatagggcggacaacgaggccttcttctatcgggaaaacttcgcaagaaataaggatcagctggcccagcatctttacaagatgtataacgcccaggtgttcaacaacgagctggatgtgcccatcacctggtccaaattgctgcgcaacactgccggccggtgcatgaacaagcgcaaacttaaccagcgtagcagcgtggtggaactgagcgtcaaagtgctgactaccgcggaccgcctgcgttgcaccttgatacacgaactctgccatgctgcggcctgggtattcaatggcgagggtggacacggacgggtgtggaagatgtgggcacaaagagccaacgacaagttccccgatctcccgcagatcaaggtctgccacaactatagcattgaattcaagtatacctacaagtgcctgagctgcgacaaagcgtcacatgcccattcccgatcccgcaaggtggaagatttgcgctgcaggatctgccggggacccatcaccctcttcctgaacaaaaaggacaagcaaggaaacaccgtatccacgccggcgggcgaggcgaagggatttgctaagttcgttaaggacaacttccagagacacaagcgcgacaacatgactgccgcacaggtgatgcgcatcctgagcgtggagtacgccaagcagaagggtcagccggcggaggagacagcggcgtcgatcgccagccgagtggaaacgctgacactggacgagtcgtccaactag

SEQ ID NO: 36267 - protein, 1052 aa, DROSOPHILA
MADHKYRLFNAVDPSKVKVPFNQKFANLTLSSHKKRLQVSHAPKDHPEKRNDQKTRKLPAAPMRANVGAPAPSCGANTEDTELDNSDYMEALQLSADGCSQDVANVGDVELLSAGISNLKVQPINEEHSAKPEISICISSTTEENVSGDDDAASCITISDSSEDEQEPLPPDSMAVSEREIVANPGQEDIPQPMLTTEKVQRIEAFLRDVSIERREMEWNGPLTPPPLSSSQRQSRLADADTESMSPTDEDWQPPTTRPIYNSTQLANNDTQVNTICSADATRLDSSKRLADDETEANTLGSEELEPTYSSKRLADNDTEPNTLCSDSSETHNSTIHNNEPVPDESIEIPETSSEGELTPQKASSGSSTSGGDEHGSIQVSSINISAKINIKISIPTMESSSAEDDDEHYSSPRATKSLPSSEEVQHQEHQQQDPQSHQKSMLSVDDASEDEQFLTHAEKLLNQLYGKSWQTPDVIRTLKRSSGSGGKQAPLRPRNIQATAVTTAKKKKPKPDESVLGDFSIFTKPLRTNQTPLNSTRLPPMRAVQTERRPRTQKPLTRPRTNHIDEDRWRKLIDSDSGTDASDDEDADATFSESGSDSDSDKDKENKQKRGDLTYLDLSKDEVEVISNPDQDSPSPKCHRRLDDILRSCRASVKAKLPATPVQQPNIRRQLFTPNAGFENDNQAKEIVNRALDLDMLDELESDYLPGTPVHRRVQEVKKKLGIGQQGQTTPHESPILKLLTPKTAPPKGTAPPKTSAPPKVSTPPKSTKQIPKPRKQKDLSPVASGGKCGFLKSLEGQVSRDRADNEAFFYRENFARNKDQLAQHLYKMYNAQVFNNELDVPITWSKLLRNTAGRCMNKRKLNQRSSVVELSVKVLTTADRLRCTLIHELCHAAAWVFNGEGGHGRVWKMWAQRANDKFPDLPQIKVCHNYSIEFKYTYKCLSCDKASHAHSRSRKVEDLRCRICRGPITLFLNKKDKQGNTVSTPAGEAKGFAKFVKDNFQRHKRDNMTAAQVMRILSVEYAKQKGQPAEETAASIASRVETLTLDESSN

SEQ ID NO: 36268 - DNA, 3680 bp, DROSOPHILA
tagccaatggcgattgtgtcgtcggcccgtgagtcgctctcccatgcgatgaacaaccgcttcttgcccaacctggagtacttgctgcagggatctatcctggattccgccgtggaacacttgatgcacaggtgggagacccagtgtcagatttgaatcgtttgcacccgactaacagtctaaccgcctacccactatcagactaaagggactctgcgacaatgtggacacctcgccggagccgtttcacgatctggaagtgtgtatgagccttcgccagcccaatgccaaccagccgctgcttcttcgcgtgcgccgagcccttggtcgcgatgcaccctttcagatgcgctacctaggaaaccccgaggtggatctgcgccggcctacattggtacgcagctgcatggactgcgcctgcaccaatggcattttggaattcctcacggaaatgggcttccgcctggagttcgagtacatagcaaagggttggaatcatgaaatatattacgcttgggttgccaaaatggatagtgacaaatggacttatttcaggctatatgttccgcaaggggcgcatgaagattaccgtctccaagctcattaagattgtgcccggcaagcagcaggacatggccaacgagccaatctcacaaagctacatagtggaactctctgtggtggcgccaacggggcaggagaatgtcggcgaggaaatgcgcgtgtttgccgagcaactaaagccactcgtgcagctcgagaagatcgactacaagcgactgggcggcatgccgtagtttacaataaaagtgcacatcgcatttatccaacagttatttaatttcttaaatgtaagaaaatatacaaatttacagaaaagaaccgagagggaatgattacactgccagagtaaaaaatatctcaaattcaaccttacacacccacatgacacgacaacaacggactttcccaaagcagtgataaagaagctgcggggcggttaatccttaaaggcctcattaagagccgccagattgcgatcgctcacataactctggagatcgctgcggcccatcagcgaaatgaccatcttcagcgtactccaaatagactcggacatctggttctgtcctctaaaggtagccgccatcgccgcattgggcagctctcgggcggcgttagtgtgagcctgcatggtaagcgctgtgagtaagtgctccacagcttccttgtaggccttaaggttcatgcaacatacgcccacgttgtaacgcacacggatgaagcccggttggagctgcagcgcctgctgataagcctccaccgcctccacggagcgcgagccgttggccaaactggcccccaatcggttccatgtcttcgcattttggggatccacctgcagagcggactggtagcagtccaccgccttgtcgaactccccagatagattgtagagcacgccgagggcatcctggacttcggcatccacctccgaagggtgctgtcgaacggcttccaagtagatctgctgcagatcgcgcagcttactcggaccaatcagcgacgaagccaacgaagtgccctcggcctgcagctccggatgggctgcgaccaggtgctgatacttgggatgcactgtcagccagttgcacagcatgcgcacggcgttgttctgcaggccctcgttggtgtagcacgcggccagggccatcaggacctgttggttgtccggttgcaagtcgtaagcccgcttaagtgccgcaatggcctggggatccatttcgttctctgtctgcgaagtgcccagcaactgccagacctcagcgcgctccggttgctttttggccgccacctcgaaacatagaactgcgctgggtatatcccctttggacaggtactccttacccttttcaaacgggttctccacatcagacatggggttgccctcggcgaactcgtactccttataagcgtccatattgtcgttgtactccgacagccacggatgctcgttctcgtcggccagcttctgccactcgtcttgcagccgctcccagaacttttcgttgaagttggcggcggtttgctctttttgttcggtgctgcgctggtagtcgctgatccagtcgtccagcgattccccctgtggcgcctgtggcagatgatctgtgattatagtttccatggcggagtcaaagaaggggtcctgttgctgtcctgccgcaatgggcatcaaaggctgacgcaatggcggcagggaccgaaagttctggctactgatcaggggctcgtcgaagaactcctgggcatgctgcaggtcctgctgctgtgcctgcatgtggatcatcttgttgggcagggcgggtgccagtccgcgggcaaagtcctgtccccactgctccgcctgctgagagtgcatctgctgctgcggatttccgtgaatatttatgtcccgcatctcctggagcagagtgtccatctgaaatgactgcggtggggcagtgacctgtcccaggaactcgttgatcaactggtcctcgggacgagcagcgcgctcgaagtgtcgctgcacatagccctcatccttgtgggcaacatcgcgggtgaactgtccgcccagttgcatgagaggattaactccaccgcagtcgccctcgaccaatgggcggaaagacatggtgttcgaagtggagatgctacgtaactggggcaaccaacgataagaaaaggggccaaatcaggtccaaaacaaaagtccaaatgtcacaaagattacctgtttatcggccgttatcgaagctatcggctttgtgacagtgttgcacagcgctctaataataataaaatatatcgccgcgcaaaatcttatccgccagagaattggtttcgaacgccaaatccccgactgcaccatggactacgacctttttcagtcggatgacgaggagatcctggctaccttcatacaggcgacacagaagcaggaaaccctgagcgcgcaaatagacgtggacgatagcgaagaggacctagtcgacggtctacacttgcccgagttcaactgcagtggccgagacactctgaagagccaactgtgcgagggaggctttctggggaatggctacgcccaattggatccgccccgctctcgcctggattatctctgttttgactttgctccggctcaattagcggttggcgcggtaagaaactacctgtacggcgaggcctggtgagtttagagctcccctggcagctgccaacaagtacaactcttccattctcagtaagaatgtgcagaagctgttaaccgtcgtgatgggccagcaacacctgcaggccacggccgcctctatgaactctggttggtatagagtgcgccagcaggtcacacacttctaccatctgatgctgctcctacgaggcaatgagctgctgccttcacattttcttgatgggtttcgacaattgctcaacgatcagctggatgcggatacctggaaggttttgtattttgcggagcacaacaagggaaacgactgccaggcgccggcgtatcacctgtatcacggcgtactggagtggcgttttctggacctgcatatactgtacgcctctgggaatgatcaagcgttcctagggcagctggagcgcacactcgacgatctgatcgtttg

SEQ ID NO: 36269 - DNA, 1680 bp, DROSOPHILA
atgtctttccgcccattggtcgagggcgactgcggtggagttaatcctctcatgcaactgggcggacagttcacccgcgatgttgcccacaaggatgagggctatgtgcagcgacacttcgagcgcgctgctcgtcccgaggaccagttgatcaacgagttcctgggacaggtcactgccccaccgcagtcatttcagatggacactctgctccaggagatgcgggacataaatattcacggaaatccgcagcagcagatgcactctcagcaggcggagcagtggggacaggactttgcccgcggactggcacccgccctgcccaacaagatgatccacatgcaggcacagcagcaggacctgcagcatgcccaggagttcttcgacgagcccctgatcagtagccagaactttcggtccctgccgccattgcgtcagcctttgatgcccattgcggcaggacagcaacaggaccccttctttgactccgccatggaaactataatcacagatcatctgccacaggcgccacagggggaatcgctggacgactggatcagcgactaccagcgcagcaccgaacaaaaagagcaaaccgccgccaacttcaacgaaaagttctgggagcggctgcaagacgagtggcagaagctggccgacgagaacgagcatccgtggctgtcggagtacaacgacaatatggacgcttataaggagtacgagttcgccgagggcaaccccatgtctgatgtggagaacccgtttgaaaagggtaaggagtacctgtccaaaggggatatacccagcgcagttctatgtttcgaggtggcggccaaaaagcaaccggagcgcgctgaggtctggcagttgctgggcacttcgcagacagagaacgaaatggatccccaggccattgcggcacttaagcgggcttacgacttgcaaccggacaaccaacaggtcctgatggccctggccgcgtgctacaccaacgagggcctgcagaacaacgccgtgcgcatgctgtgcaactggctgacagtgcatcccaagtatcagcacctggtcgcagcccatccggagctgcaggccgagggcacttcgttggcttcgtcgctgattggtccgagtaagctgcgcgatctgcagcagatctacttggaagccgttcgacagcacccttcggaggtggatgccgaagtccaggatgccctcggcgtgctctacaatctatctggggagttcgacaaggcggtggactgctaccagtccgctctgcaggtggatccccaaaatgcgaagacatggaaccgattgggggccagtttggccaacggctcgcgctccgtggaggcggtggaggcttatcagcaggcgctgcagctccaaccgggcttcatccgtgtgcgttacaacgtgggcgtatgttgcatgaaccttaaggcctacaaggaagctgtggagcacttactcacagcgcttaccatgcaggctcacactaacgccgcccgagagctgcccaatgcggcgatggcggctacctttagaggacagaaccagatgtccgagtctatttggagtacgctgaagatggtcatttcgctgatgggccgcagcgatctccagagttatgtgagcgatcgcaatctggcggctcttaatgaggcctttaaggattaa

SEQ ID NO: 36270 - protein, 559 aa, DROSOPHILA
MSFRPLVEGDCGGVNPLMQLGGQFTRDVAHKDEGYVQRHFERAARPEDQLINEFLGQVTAPPQSFQMDTLLQEMRDINIHGNPQQQMHSQQAEQWGQDFARGLAPALPNKMIHMQAQQQDLQHAQEFFDEPLISSQNFRSLPPLRQPLMPIAAGQQQDPFFDSAMETIITDHLPQAPQGESLDDWISDYQRSTEQKEQTAANFNEKFWERLQDEWQKLADENEHPWLSEYNDNMDAYKEYEFAEGNPMSDVENPFEKGKEYLSKGDIPSAVLCFEVAAKKQPERAEVWQLLGTSQTENEMDPQAIAALKRAYDLQPDNQQVLMALAACYTNEGLQNNAVRMLCNWLTVHPKYQHLVAAHPELQAEGTSLASSLIGPSKLRDLQQIYLEAVRQHPSEVDAEVQDALGVLYNLSGEFDKAVDCYQSALQVDPQNAKTWNRLGASLANGSRSVEAVEAYQQALQLQPGFIRVRYNVGVCCMNLKAYKEAVEHLLTALTMQAHTNAARELPNAAMAATFRGQNQMSESIWSTLKMVISLMGRSDLQSYVSDRNLAALNEAFKD

SEQ ID NO: 36271 - DNA, 2943 bp, DROSOPHILA
caccacgcagttgcaggcaggagtgccgcccgaaggtcgccttccacaagtggttcacaagattttcccagtgttgctgcaaggcattggtcgactgccttaccgcacggacgcatacgtggccaagactttggagcaactagttcagcactggacgccgcactttagcttctcatccaacgccaagctggtggcccgtccatatgccaccctcctccaggcggatgtagatggagagctggcgcagtttgtgcttcagctcctcgttacccagtttttggtggtccagcggcggagggcaggacagcatgcgggcttggtgatcactataatgcagcaactgatagagagcactggcaaagagcaggaagaacagctgctaaccgttttgcgcggcgtgcacatcccgctgctggaacacgtaatgttcgtggacgaagtggacctcagtcgcaaccaagtgtttggactttataaagtgcttatatcgcacgatgcctacaagcgatcacaggcggtcagggatatgtgctccaatcacttgcgatccctcgccgaaaagcacctggcccactgcacttacttttacttccagatgctgatcaacctggcagagctggcgccggatctagtggctcccatcctatcctttataagggagcaggcagagcaggtggagctaaaacgcggcgctggagaagatgtgggcatacgcaagtgcttgcagcgactccaaaaggtcttgagcagggtttaggctcctcatggcttcttttgtacatataaggattctcaataaaatgttaggcattctataaaatctttattatttcagtcggaagattcaatgattcctccttaagagatatacgttacggtgcggcaaaatgtacatggtggtttacacagtctcgcgatctgtgctcaaggtctcagttaaagtgttggaaataaatacattatgattgcttctcctttgggcagttctataaacagacggctaaaccacgtttttgacgtcgcgcggtatgcgattggtaagcagctcggcgggcataaagccggagtcgcccaggtacttgatggacacgttgccggatggactgatggtcagccaggtgatggaagcgtgattaatgttaatccgtagccaaccctcggcggggaactgcagggctcggcagacaaagtagcggatcacgttgccgtgtcccacgatcagggtatagctctccttctcttggtcgggataggcgcggtggaagtatcggcgaaagccggcctctatgcgcgatccgtcgcgaaggaactgctgcagtgaaatgaaagccgaatatcatgtggaatacgcactgggttgacccttgacttgacttacagatgcctccggcttccagtggccgactggcggctggggcggaataggcgctccttcacgcaggaaggcacagttcaccactttctctttttcgaaatcgatctgcttgagaataatatcggaagtctcctgggcccgcaccattgtggaggctactaccttgtcccacttgatgcccagctcgcagagccgtttcccagtaaactccgcctgcttgcggccgcgctccgtgagatgatgcgtgtcatccgagtcacccacgtccagatactcgccatgccgcactaggataatgtggcgcgccttcttggccttcgccttctcaagctccgcgttgtagcggttctcctcctccggctggctgtttcgcagtggacgcacgagggcccgtggctcccggcaatcccagttggtgtcccaaagggcccacggatccaccggcttatcactgtgcgtccacgagttctgcacgaccgtctgcgggtcccgcagccgctgtaggtagtaagccgccagtccggctcctgtgccgcacacgaagctagtcaactttcgcatcgttagggcttttaggtattttctttaattttagttttgttccgctgaataagtgcggtatttaaatactgcgatttggtatttgacatactaggttagcgggtatataaataccgcgcaagaccatttagaattcaactatcgaaaagttaccaagatgaatcaaaaatacgaaatatatttacacaattattgtataccaagaaaattaaggatccacaatcaattgtttcgttaattattccgtatgtgtttcttaaagaaataccatgcaaatactgaatactgaaaagtaccagcgctggcactccttaataacaatcaggttgacgcgatatggcaacgccgtagtgtgaaaaattgcaatttttttcatttcacacacacagacgcgacagatacgccagcatcggaacgaaggacgtaaaaaggccgcagaaaaacgcctatcaaagctgaggtttattgaaggggttatcagaaagatatctctaggaaaagccgccaacaggagtcacagcgtcgacattccatcggagcagcaagaagcagaggcgggggcaataagaaacggaagaagaagaagccgattcgacgtttatcaattatgaatttcctgggattcggccagtcagcggacattgagatagtctttgatggagctgagcacaagacggcagaggttaaaggggaggacggcaaagtggagaagatgctgctattctacgacggggagacggtatccggcaaggtgcgtcgtggtcagcatcggggggagttcccccaagcataaccagagataaacccatatccacccccttttcatccaggtgaacgtgaccctcaagaagccgggcagcaagctggagcaccagggcattaagatcgaattcattggccagatcgaactgtactacgaccggggtaaccaccacgaattcaagtgtctagcgaaggccctggcccgcccgggcgatctcatccagaacaacagctatccattcgat

SEQ ID NO: 36272 - DNA, 877 bp, DROSOPHILA
cctaacgatgcgaaagttgactagcttcgtgtgcggcacaggagccggactggcggcttactacctacagcggctgcgggacccgcagacggtcgtgcagaactcgtggacgcacagtgataagccggtggatccgtgggccctttgggacaccaactgggattgccgggagccacgggccctcgtgcgtccactgcgaaacagccagccggaggaggagaaccgctacaacgcggagcttgagaaggcgaaggccaagaaggcgcgccacattatcctagtgcggcatggcgagtatctggacgtgggtgactcggatgacacgcatcatctcacggagcgcggccgcaagcaggcggagtttactgggaaacggctctgcgagctgggcatcaagtgggacaaggtagtagcctccacaatggtgcgggcccaggagacttccgatattattctcaagcagatcgatttcgaaaaagagaaagtggtgaactgtgccttcctgcgtgaaggagcgcctattccgccccagccgccagtcggccactggaagccggaggcatctcagttccttcgcgacggatcgcgcatagaggccggctttcgccgatacttccaccgcgcctatcccgaccaagagaaggagagctataccctgatcgtgggacacggcaacgtgatccgctactttgtctgccgagccctgcagttccccgccgagggttggctacggattaacattaatcacgcttccatcacctggctgaccatcagtccatccggcaacgtgtccatcaagtacctgggcgactccggctttatgcccgccgagctgcttaccaatcgcataccgcgcgacgtcaaaaacgtggtttag

SEQ ID NO: 36273 - protein, 289 aa, DROSOPHILA
MRKLTSFVCGTGAGLAAYYLQRLRDPQTVVQNSWTHSDKPVDPWALWDTNWDCREPRALVRPLRNSQPEEENRYNAELEKAKAKKARHIILVRHGEYLDVGDSDDTHHLTERGRKQAEFTGKRLCELGIKWDKVVASTMVRAQETSDIILKQIDFEKEKVVNCAFLREGAPIPPQPPVGHWKPEASQFLRDGSRIEAGFRRYFHRAYPDQEKESYTLIVGHGNVIRYFVCRALQFPAEGWLRININHASITWLTISPSGNVSIKYLGDSGFMPAELLTNRIPRDVKNVV

SEQ ID NO: 36274 - DNA, 2543 bp, DROSOPHILA
tcagggggataagtagtaacagccagagctagggcaacaacagaaggcggaactattacgcatatattcgtattcgtatacagcagcaggaaggcagttcagcagcagcaacaaatatgcatatatctatttttttaaagttaatttaaaattgttacaaatgttttattgaggttatgcgcatcattaaccaaaagcaggcaaatcgcaaatgatagtaacaaaaaaacaaaacgaaacttaggacaaatgagaagaggcaacctcgtagctacaaccaatctcttggcgtttccattggtattattgctataacaagtcgagaagctgtcgagaggcgcgcgactcggacacgaaagcaaaccctaatcccctgcgccccaaaactagttaaactccctagtattccgatgaccattccctatccttgtggcgtttggaaaatatgatttttcaatttgaaaaatgttgaaattgctttctaaaagtgagacccctgaattgaaatttaagtgtgcattaaactaaaccaactccaatacaaatgaagatgaagcagcaaacagcagacaaaacatccattaaataataaagttttagtctatagcgtactaacgaattgatgctgggagcgttctgataatggcgatttgtccgagcgatcggaagtggaaacgacgaaacgtgttacatgccttgcatatgtacataacagttcatatacataacatacaagaattattgatatatacacttagacacgcaatttaacaaataaaagcgatatgagcgccaaacacgaagacaacgttaagtgaatcaagtggaaactttgccaagtgcactgcctttcaaatcgattggtgtgagtgcctagtccaccatttctgtccactgggataatgcctttgaggtgacacaccaatagcaagctggtagtcagtcctcgcggagtaacttgtatgttaatataactaatcgggtgatgaaacgactactcttatccagcaggtattatataatttccataacatctagatttatttaacaaataacgccggtttagcagctgcgacgacggctagtcccaggcctccttgatcttcagctggttcagccgctcctcgatggtaacgtgtggcttcatcttgcgcagtgtctgctcgtccgtccatctggcaacgagcttctcgcgcttctgcagctccttggcatgaccgaatgactgctcctgcaggcgggaagtgtggcattaggtgaggcaatccgtacagagagcaggacttaccatggtgagatacgggtgtcggaggagtaacattacctgctcctggcgctcgtactcgtgggtcagggtgtccattgctcgctgactgaccggtttcaccaggcgccgcttgccccggaatatgtggccgggcacagtcttcttgaacaaattgatcagcgtcaggtgcattttgttgctcaagtgccaagtaaaaactacttcaatccgctaactttttattttataataaattattattatttctactttgtcccgaatttggatgtgaccaagtttcgcgaagggaaaaaccacatcgattattttagtaactggtcgatacgccaagacaaatcatggtttcgcttatcgataggaaactaccgcttatttccggttgaactttagaagtcgtaatgcaataacaatattggtacgtattgtaacaacgtcgcgcatttcaacccgatcacaacatggaagacgccgtggaggcccttttcatcagcacgagcagcgaggacaacacgacatgcagcgtgcaggatttgcggacaggcacagacctgatgcgctacaagggcggtggatgcgcccagcaccacagcctgaacatgatccacctgaactacgtgatggcggcgaactccgccaagccactgctccacgtgtggcccatcaacaagcaagagcagatggccggactgcggttcgtggtgcccggcaaggtcaacgccttggccctgacgcctgatgggaacttcttggtggccggcatccaggagaacatctatctatggcacatgagctccggccgtatgcttaacaccctgtccaagcactaccaggcgatcacttgcctgcgcttcacggacaacggtgagcacttcatcagcggcggcaaagacggagctgtgcttgtctgggatctcaccttctccgccgccccactggacacgggcgggggcaaggatagcacggagccgttgtacagctttaacgatcacggtctggcggtcactgatctatactccggcatcggaggcatccgttcctatctgtacaccgtatcgttggatcgctgctgcaaggtatatgacctgtgcgggggcgtcctgctgctgagtgtggtgttcccagtggccctgcatagcgtgattgtcagcaagatggaaactagggtgtatgttggctccagtgacggcaaggtgtttgtctttaatatggaaaacgcgccgcgcatgaaggtgagtccagatttcgtttatccact

SEQ ID NO: 36275 - DNA, 486 bp, DROSOPHILA
gacaaagtagaaataataataatttattataaaataaaaagttagcggattgaagtagtttttacttggcacttgagcaacaaaatgcacctgacgctgatcaatttgttcaagaagactgtgcccggccacatattccggggcaagcggcgcctggtgaaaccggtcagtcagcgagcaatggacaccctgacccacgagtacgagcgccaggagcaggtaatgttactcctccgacacccgtatctcaccatggagcagtcattcggtcatgccaaggagctgcagaagcgcgagaagctcgttgccagatggacggacgagcagacactgcgcaagatgaagccacacgttaccatcgaggagcggctgaaccagctgaagatcaaggaggcctgggactagccgtcgtcgcagctgctaaaccggcgttatttgttaaataaatctagatgttatggaaattatataatacctgctggataa

SEQ ID NO: 36276 - protein, 106 aa, DROSOPHILA
MHLTLINLFKKTVPGHIFRGKRRLVKPVSQRAMDTLTHEYERQEQVMLLLRHPYLTMEQSFGHAKELQKREKLVARWTDEQTLRKMKPHVTIEERLNQLKIKEAWD

SEQ ID NO: 36277 - DNA, 2521 bp, DROSOPHILA
gtacaccgtatcgttggatcgctgctgcaaggtatatgacctgtgcgggggcgtcctgctgctgagtgtggtgttcccagtggccctgcatagcgtgattgtcagcaagatggaaactagggtgtatgttggctccagtgacggcaaggtgtttgtctttaatatggaaaacgcgccgcgcatgaaggtgagtccagatttcgtttatccactgctttgccaactaattcctttacttacccaggaatatcacctagagggggaggaaatccaggcctttgtgggccacacatacggcaaggccatcacctgcctggctctgaatataagcgctacaactctggtctccgggggcgaggacaatcaggtctgcgtctgggacgtgggcagcaggcaacttattaagagcctgtcccaaaaaggctcggtaaccaatctgcatatccgcctgctcagcccagccatctttctgccggaacacaagcagccgcagatgttcgccgacagtctaaagcgaatgattagtccgtgggatgagaatgactgtatcgagctcttcgatccggactactccgggggacgcaagacaccggagctggactacacccaaagtcatccgggtacggatgaggagataatactcaaacttatagcgtccatgagttcgggaaagaacgaggacgacgaaggaattgaggcggaaaccaaagctacagatgtcgaggattccgaggtcgaagaagaagaacctgaatccgagccaatggaaaccgcctccaaggaagctgagtccgaaaaatcgtatgcagaatatcagccagactcagcacagacaagcgacgaaagagtgcaagagctgcaggccgagaatgcgcgcctcaaagcgcagtcaatgcgcttgttccagatagctttcaagtatattactagcgataccaatggccaggctgaaatcacagagaagacaaagcgcaagaaagcgcggaagacatagtgaaccttaagcttgctttcaattacgtttacttaggacttaggacaaaaatacatgataatagaaaaaaaacagcactgattgtgcctaaaaacgatttggatgaacaaaacaataacttctcgtagagggatctacttgggtgccgcttcgctgcccgcctgcccgtccatgttgtcatctcccgattcgggagcgttgtcattttcctcggcaatcaggcgacggatctctcggttggagttcagcagctcccgtagttgggacataatgtcgtctgtgcgctgctccacggcgtccagggcacagctgagagcgtccagactgttgttcacgtcctccatctctgtaggggtcattccattagagccaatcccgagcagaaacggggcgctgtcaaaactcaccttggaggtccgcctcctggacattggtgttgccagagtcgccggacgacgagggatcatgattgtttttgggtgacattttccctggaattttccccggagtttttccgtttgttttttccagttggatttattgtcacgggatagctataaacgatagaggtggttagaagagaacgataggtctcagttcaaatacgatataaaaaaaaaaacttaataggggaattcagtacatacgtacgtttttgtaattacgaaaacactttttagctcaaaacactaggcgaacataatccactgcaaaagtccaaagctaagtttccacttagtttttagggatgtgcccgtgcctcgttttatttttacgtaccaatggaatagcatgggaaattttggcttattcgcatatgtcgtgcctaattcgtgacacgaacaatgaaacaaatggtttacgtatctctaggcgttgactggacttaatcgaacggttctttcccatagtgcttaatgttgattggccagagttgaccccttctgacaatgaacggctgtttaatttctcagagcgatcagcggtcgtactccaacgttttctgttcgcctggtgtctacagtcgataatcttgcccattttgaccgaaataattttgaagcatcgaattgcgacagtagatttcttgttgcaatcatgaggcgagcataataaacagaaagtgtactagcctctgtttctacgttgtttttagagatgtgcatgtatatcgttttattttcacaacgcaagcaaattactagggattttggtatttgctcgagcatgacgtgccgattgcgtgtcacgaacagggaaacaagaggggttcacatctcttctgatactcttgcttaagctttggtctaactgttcacaaggctgcattcctattggttcaattgcgactggaaacatgcaatatgcgaccattttggaaaaagaaactgtttcttgattttgtcgacatgtatcagctggctggctactggctactggtttctgaactccagatattcagtcgagaatcgcatgcgaatgcccgtaatatttgctggcatcaatatttaatctgttgcctagcgt

SEQ ID NO: 36278 - DNA, 460 bp, DROSOPHILA
aaaaaacaaacggaaaaactccggggaaaattccagggaaaatgtcacccaaaaacaatcatgatccctcgtcgtccggcgactctggcaacaccaatgtccaggaggcggacctccaagagatggaggacgtgaacaacagtctggacgctctcagctgtgccctggacgccgtggagcagcgcacagacgacattatgtcccaactacgggagctgctgaactccaaccgagagatccgtcgcctgattgccgaggaaaatgacaacgctcccgaatcgggagatgacaacatggacgggcaggcgggcagcgaagcggcacccaagtagatccctctacgagaagttattgttttgttcatccaaatcgtttttaggcacaatcagtgctgttttttttctattatcatgtatttttgtcctaagtcctaagtaaacgtaattgaaagcaagcttaa

SEQ ID NO: 36279 - protein, 96 aa, DROSOPHILA
MSPKNNHDPSSSGDSGNTNVQEADLQEMEDVNNSLDALSCALDAVEQRTDDIMSQLRELLNSNREIRRLIAEENDNAPESGDDNMDGQAGSEAAPK

SEQ ID NO: 36280 - DNA, 4022 bp, DROSOPHILA
cgataagcctgcctctagattcgaagaaaacgatttcctgtctgtggcattgtttacattccagcgagcaacaaaacaagcgcccgatttacgggggaggaatacataaaaatgccgtttgtgtgtatccagatcatacacacacacatacacaggcgcacatccagcgaacccctgcccacccccgcgccgacttgtttgccatggctttccaactttcatggcacacagaaactttggctttccaaacggattcactaccgactaacagtactcaccgcgtccaaggaatttaagtctgctttagagcaggatttatttatttaaaacgctataagaaacaaaataacagcgaattgtctgctcgagaaaaactgtgtatatggcgacgaaacccaactagcgatggcctgctgctgtcccgataactcgatgggccctgtgcgataggccaaaggaatttttcaaattttttttgttctgagaacacaaaaatctcacgaaatttgtatagcatttcatccttaagaaactcaattcacaatatttataatttagctaaggcgaatttatttctagttcatgttatcatgttatctcgaactcaccgtttatcttgtataaacatttaccaacacaagcacctgagtgtacatgagggtgtatgacaacacaggtacgaccaaaaactattgtttttgggcgacgaattaaagaaatatctatgactttactattacttaccgcttcgaaagtaaatttatctgctcaaaggcaggttaacgcacttttgacgcacttagatatttaaattcgacaaaaatccccgactatgaaaactgtgtatatgagcgcagaacagataaccgataactcctctatcgcaggtggctgccaacttgcttcaaaatagaaagcgcactttttaaatttccaaaagtattcaaacactggtctttaatttcttaatacatatttaagttgggcaagcaatattggtttatgcagtcgtagaagtgggttcatcggttatggtcacagcagctggcggcggatcgccggccttccgttgatccctaaagaacatgacccacgcgctcttatggatctctattccatcacataggccatacacctgggcaaatccgaaataggcagcaacagcggcgacaccgaagagaggtaccattatgactagtcctcccaggcaggcgaagaacaccatggacacaatggtcaggagtgtgcctaaaacgagtcgataagaacgtgatctctggtaaacactacggaacgcaccttctagcaccagcaaacctgtaaaggtcataaccatggtggctattccaaacccaaatattataaggaagggcagcatgaatacaagaccaccagctagcaggcagatagcaacgtgcggattccgggtgcaccaggccgcggtggcctccaggaaatcatttccacctagctcggacatcacaaaatctgccaggcggcagatttgaagccctgcaatatggcaacgttataacaaaggcaacttttgttacgcggtgtgatgcataaaacaggttaacaaccgtacagagtagtacatatataagtaactaattgtggcagtaagcaattaagcgcttttacagatagtacttcaactagtggacatacatgacctgtagagagtctggagcaagctctccaggaactggtcgccagtcagaactcctgcactacgatcgcctgggccatgtatctttacgtgctccggtttgctctctgttcccgatcccgcagacttcttggcgtttgcctctttggctgctttgcgagccttgttcgagtgagcctgcagagtcgatcaaatcaaatcagttatgaatattatgtgagtcaaagaacccaagtgattagatgccggctgccactgagtccgtgaaacgcgacctttgacttgcgatgccgattccagccgaaatctacggattcttccgaagatgccggaacacccacttcactcacacccgtacccaccatgttgcgtggctactgcgagaatctcaggcggttgctgtgcgcattacaggaggagtctgttccaggttcattcgcctgcttgaagcaacagtaaatgaaaacaatataaataaacaaaaaataatcgacgtcgtagccctgaaactaaatcatcgagggagagctgccacctttttttttactaaatttgaattagacaagatgcgtttcttaataatgatctagcgtggcttagttttgctttttaatcataattaatttgtttacaaaaaaaaaattaacactatgttaaaaaaaaaattataaatttataatggcggtcagcgtgcgacatttcttcgccgtaggattagtgaagcaggaatctgagtccgttaaacggaggacgcgccgtaatcctctccgccaccaagcgctccccgtgaacagtcatgccgcagcgcaccttcttggcatgcagaaagttcagatcggcggctcgctctccacttttgagcggcaaccagccgtacacctgcgactccaggagcggaacagcttttccgagctgcctctgacgctccacatgcttctcaggccaagtgtgccgtaggtacctcaaggtatccgtcggctggcgttgctcatactgggcgtagaacttccgtgttagcggatgaactggaaggcaggagaagatattattagcagtagtgaacaattttgtaaactattgtaaaactttcaatgattaaagttttatttttacaggagcgctacgatgcaacaagcttgtcctcaaacatgatataccgagctaaccagaaatctctagcataccttggctcactggaacaaaggtttcgtaaagtcggatgtgccggttagatctatggatcagctccttttcgaagtcgtagggcagcggtcggggatccccctcgcgatgatccagtgcgtcgccattctcctcgacctcgtcggtggtttcgagtcccggtttcatgctcctgcacgtctactattttgagccccgaaggagagctctgtttacggaaatccaggcaatccgtccgcaacgcgtggcgtgctcggttcgtttgactggctgcggactgcgctgcatcaaggacacctaccccccacaatccccttgcctgccgctcactgcctgcctggctgtcttttcgttttggcagcaacttgtactcattaaagttttcctattgttgctgcatggcaggcaacgttaccaatactgtacacgcatccccacgacgcagcccacggggcccaaggagttgctgctcccaactcccgggggtgtcgatggcagtggtgtgacccacaatcacagtttcaccaacgtcagaggcgcctgtcgggcgaatttccccagcaggtgctgtgggctgtccgcgatgtatgcgattggctcaagagaaagtaaaaggacgtcagccagtgatgagacggatcactggttatattcaagattggaattggttgaagtataaccaagtgtaccgaaggcgaaagtcatcgattggttggaactggaacttatctcgcctattttaaggctaactactacattgtaaacaataggagcttactataccttcgcatcactgcttccagcacccaagggctggctccattcatgtcgttggcgtaatttagtacaagcccaaaacccaaatccctgaagtaaacagcaatatccgaaaataaacccattcgagcgattgcctttgcgtgtccaaacaatcgcagccacaaaattatctagaggcagaggagcaggtggccaccacatccggcacttggccgccgcgattctcaacatttgcttcgggttgtgcaactctctcgattcgtcgtaaattttagcctaatcgaatctaattgaatacataaatacggaaataaatcaatttaattacaatacagccaacaacagtcatcgcaaatagtttacacgcacacaagcactcgaaccatta

SEQ ID NO: 36281 - DNA, 1056 bp, DROSOPHILA
atgaaaccgggactcgaaaccaccgacgaggtcgaggagaatggcgacgcactggatcatcgcgagggggatccccgaccgctgccctacgacttcgaaaaggagctgatccatagatctaaccggcacatccgactttacgaaacctttgttccagtgagccaagttcatccgctaacacggaagttctacgcccagtatgagcaacgccagccgacggataccttgaggtacctacggcacacttggcctgagaagcatgtggagcgtcagaggcagctcggaaaagctgttccgctcctggagtcgcaggtgtacggctggttgccgctcaaaagtggagagcgagccgccgatctgaactttctgcatgccaagaaggtgcgctgcggcatgactgttcacggggagcgcttggctcactcgaacaaggctcgcaaagcagccaaagaggcaaacgccaagaagtctgcgggatcgggaacagagagcaaaccggagcacgtaaagatacatggcccaggcgatcgtagtgcaggagttctgactggcgaccagttcctggagagcttgctccagactctctacaggtcatggcttcaaatctgccgcctggcagattttgtgatgtccgagctaggtggaaatgatttcctggaggccaccgcggcctggtgcacccggaatccgcacgttgctatctgcctgctagctggtggtcttgtattcatgctgcccttccttataatatttgggtttggaatagccaccatggttatgacctttacaggtttgctggtgctagaaggcacactcctgaccattgtgtccatggtgttcttcgcctgcctgggaggactagtcataatggtacctctcttcggtgtcgccgctgttgctgcctatttcggatttgcccaggtgtatggcctatgtgatggaatagagatccataagagcgcgtgggtcatgttctttagggatcaacggaaggccggcgatccgccgccagctgctgtgaccataaccgatgaacccacttctacgactgcataa

SEQ ID NO: 36282 - protein, 351 aa, DROSOPHILA
MKPGLETTDEVEENGDALDHREGDPRPLPYDFEKELIHRSNRHIRLYETFVPVSQVHPLTRKFYAQYEQRQPTDTLRYLRHTWPEKHVERQRQLGKAVPLLESQVYGWLPLKSGERAADLNFLHAKKVRCGMTVHGERLAHSNKARKAAKEANAKKSAGSGTESKPEHVKIHGPGDRSAGVLTGDQFLESLLQTLYRSWLQICRLADFVMSELGGNDFLEATAAWCTRNPHVAICLLAGGLVFMLPFLIIFGFGIATMVMTFTGLLVLEGTLLTIVSMVFFACLGGLVIMVPLFGVAAVAAYFGFAQVYGLCDGIEIHKSAWVMFFRDQRKAGDPPPAAVTITDEPTSTTA

SEQ ID NO: 36283 - DNA, 2195 bp, DROSOPHILA
aaatcaaagccgtgcgagtggagtctccttgccatatggcagctgaccaggccgagagccttaactgtgatttctttttaatggcgtgacactagacaacggcaggcagccaaacccgaatcgagcaacatcgagttgcaacaaggcttaattactcagctggaaatcgttcatcggcggagttggccaacaggcgatcttcgggaacacccagcaggatcttggccaagtcaattggctgatgtggccgccgagatttgcatgaggccccccaggggccaaaagcacagtaaaaataaatccattccagcgacattatacggtcgtaaaaattgtagaaccgagctctggctaaatcgtcataaggcgatttgtacaatggctttcattaaattgaagcgcatttttaataaagcgtaaaaaaagcaacacggaaaaaacagaaaactttgcatagaaaaatgctaaaaaaaaaggacggagaaaatgggggagtgtggtgcttagctgccgcgacaattttaatttaatgatgcggacttagtccttgtaatggccagtccgcgtgtcctttgcgctacgtttgttaaattaacagcagcgtttgtcatttggcggatcaaaaaaaaaaaggaaacacaaatcgacgaggcaacataaaagtaataaaaaagaaacaaataaaagcatatggactcgaagttgggacaactgcgaattaatttaaatgatttttatgatgtcattgcgcaactgagacgattgcatggcgcctcccccgccgccaacaagcaacatttttatatttccctccctcgttttcattttgtgtggtaaaaatgccgaaaaacaaactcccaactggccgagttgccctttggctgatggtgcgatgcttctgctgctgctgaagtagctacgagcggtaacgaaattcacggtaggagataaaaatgtagcaaatcgaagcaacgatcaacaaccggaggtgatgagctgaatgctggaggaggaggatgaggacgaggttgtggatgaggacgaggatgcggatgcggacgaggtgcaccgcatcgaaaaaccgcgacggcactgggtttcggttttggtctcgcttttggctttcagttggctcaaaactgaggagtcgaaccaagcaattggatctgccggctgcctcgggaagtttggataagtaagccaaatattaatgcccttttttctgtgaaaattaatataacaaacagatctgaagcttgtgaattataaacaaaaatgtggatgcaaaatatattcagctaacaaatctacatcatatgtagactgaaatttttatgaattaatatataaaattcgcatcacaaaaaaacataaaaagtcacgtcattatatttttttcgatatttattttttattaacataacctcctggaaaattagtgaaacttcttctgagagtattcttttaagaggtctgcgaagcgaacgaagctgagacaaatgtgataaccacgcagcgatacgagtactcgtactccacagccccaacatctctgcagactctcttccgaagcctggtcttcgttcatcgcccaaaagacacgacgccagaagagtaagggcgaagaattgaagaggatcggggggaatttattgtcgatttggcgaggtgtatcgacaaggcaactgctactgggcacacacggcctctgaatgcagaattccgattttcgagccacagaatgaggctgagtggtggggaatggaggagtatggcgggtccagaatgctcctgctgcccgatgatatcgcccagtgccaatctgcatccgcagattccaaggggagttggccagggcgagctgaaggggtgccttaccttgtgctgaggttttaatttgtaggatgcagttgctgctgcgcaggtaagccaaggtgatgagatgaagttggtggctgccttttggcccggcctgcgcacaagttggcttagatgtgcgcactgataagcggaccgtggtccttatagttgtggtaccatccctccccccactcacctgtgaaaacggaggctcacggcatgataaagcccaccgaaaagtgtggattatttcattttgctacgttttgtagccgcctgctggtgttcctctcctctccgatactctgctgttgtttcgccgggtaatgaataaa

SEQ ID NO: 36284 - DNA, 195 bp, DROSOPHILA
atgctggaggaggaggatgaggacgaggttgtggatgaggacgaggatgcggatgcggacgaggtgcaccgcatcgaaaaaccgcgacggcactgggtttcggttttggtctcgcttttggctttcagttggctcaaaactgaggagtcgaaccaagcaattggatctgccggctgcctcgggaagtttggataa

SEQ ID NO: 36285 - protein, 64 aa, DROSOPHILA
MLEEEDEDEVVDEDEDADADEVHRIEKPRRHWVSVLVSLLAFSWLKTEESNQAIGSAGCLGKFG

SEQ ID NO: 36286 - DNA, 3360 bp, DROSOPHILA
cgttgcgattgtttttcgcgctcacatacgtgtaggagcggaatggaatatgtatatatgtaaagatgtgaatgggcatccaacggtggagcagtctcgtccttttccaacaggatgctgcgcgcgcgttgaaaagaggcggagactcgctgccccagcgaaaagaaaaaaaaatagaccaacactttgcgaggagcacagcgggaaaaaaaaggcaaaaggaagcactgaatgcagccgggactctttcttatcaacggactcggttcggcagcactcgctttccccacttttcccattttcccgacatttcagctttttcccccaaaaaacgatgcgacgtcgctgattggaagcttcggcaaacagctcgtttttggggcggagcataagctttcgtcacagtggcgtcgccaaatgggggagcatttgcaaaaaagtgaattttcctgaaaatacacaatcatataaataaaataattaaattattattttgttttgcttacattgttttgatatatgtttcattattacaacaaataatacaagttttgtggagaagttcatttgtaatgtcattttttttgttaaaccgaacttttgataactttttgtaatttccctttaattttattttaaactacaatatatcgatttcccgtgcagcggctatcatgcccacgaatccttcggtcacctcgcgtgccactggaataatatcctccggaggaaggacaaagcccaattcgcccttatcgcgcagctctatggtatagtgtatcttaatgttcttcaccgcataggcccattccttgcccgaaccagatacttcatctggaaaaaaaatatataattataagaaaaatatttataataattatatatataataatatatatatatatatatatatatatataataataatataattataaaaattttagacttacataatgttgtagcactggatccataggtaaatactgtgccatatcttctatatagagcatccgagaagcccttggctacgtgcatcatttgtggatagtgttcggggaactctagagctgtgtgtccccaaggcgaaagaacatactgtccataggaatgcaatgagatataaatctttatagtgccttcaggtatggagttgtttatgtaggcggttagttgactgatctcgggatctgattctggtgagggaccagcatataattgtgaacagggatccgattcggctccagtcactgaaatgattaagattaagattataataataaatttagaatactacaatattcttagtaaatatgatcattaatatgtgattataaacttacacatccacaggtaatcaaagttcctattgagatcagttccaatgcactcccccgtgggatctgaaggcaggcgggactttcgccaaagacgttcctgcaaagttatggtaataaagattatcgctcaaagagctaattgactactagttagtaataagcgataagatagtctgcgctttaactatatcggcatgtatttgatctgatctgcaatctaatcgcaatggcttgcgcctactttcatgaccattcatatcgtatcgtaaatatttagacaatttataagtactaaccacttcatgggaataagcaaagccatctgtatttagaacgggaatgatataccagtccacattctgagctatatccctgactgccgggttacgaggcaccagcaactcatcgatgaaataggtgatcgtcgctgacgtaatccattcgcgggcatgaatattggactctatgaaaacggcgggatttccctctttgtatgaaattttaacacctctaatcggtctgccctcgtatgagttgccgatggtaaagggtgtgactatatccggataacgatcctcgatcacatccaaccaggcgtatatctcttccagagtgtgaaactgtgtccattccatggaagtaatgcgttgtttgggtctctgggcatcgatgtgggtctgaacattatcgatcttcaggttataggtgaaattgtgtttggtcaagaggctttcaaatgtcttctgatattcaggaggcagcattatatcggaggattcacccaagtgacgagcctcacgccaactgctgagctgtgggagatacacataaattataaggatttttttgggttctatgagtttaacttaccttcaaggacctctcctgcgtgtgaagcagcttaaactgctccagatcatcgatcctcacattgtataccttgtagttatcatatcgcacttgctcaacggacctagccagcccaaagagtcctacgactaggagaatcttaagcaacataccgctctatgggaatgcccgtgtggaactgtcgacgcccgtagaattaacaacctgattaggacaaacttatcgctgcgactgcccattgagtccattgacggttttcgtttttttttttttttttttttttatcagcaataaaaaaaaactattttagacttcttgttcgcgctattcgagttcgagttgtctgggcagcacgagcacttggtacttaggctgtctctcaactttacacataaattttgtgcaacggcagcccatttcattgtaggtcattgcataatgaagttaccgccccgaggcacataaatttccctgggagctcgaggagatttcagaccgctttctgttcgctgtcttctgtttgacttgcggtgcttagtgcgaacattttgtttaggcccgttgcggttgaggttttcgctgccagtttcagttttacttttttttatgtcctgtggcgagtgcttaaaggacttcgtcctgggctttggtcatattttgcgcgggtattagaggaacacgacttggtcgttgtcaccgcatgaggtgcgtcaacgtgtgtcccgtgcccgaaaaatggcaacggtgtggggtttacttaagtggcctggacatgaaaggcgcatcaaagtggatttccagccgggaaaatgccgaacgaagaactacagcaggggtggtagcaaaatatttcgcaaaaatgttaatggctgtgtgaaatatcggtggaaaatgctaaacttccagtggcattcaatctggccagctttttggctgtcccaactgagaagggtgaagaatttacagcctttacaataaatcacggatttaacagtaacttacaagcctcaaaagtcggacataaagtgtattatggtgctataattctttatgcttcaatcacttcttcgaatagtaatcaaactttttacttaataccagaaataaatgtttgatactaaacctaagaaattggttggcatgattggtt

SEQ ID NO: 36287 - DNA, 939 bp, DROSOPHILA
atgttgcttaagattctcctagtcgtaggactctttgggctggctaggtccgttgagcaagtgcgatatgataactacaaggtatacaatgtgaggatcgatgatctggagcagtttaagctgcttcacacgcaggagaggtccttgaagctcagcagttggcgtgaggctcgtcacttgggtgaatcctccgatataatgctgcctcctgaatatcagaagacatttgaaagcctcttgaccaaacacaatttcacctataacctgaagatcgataatgttcagacccacatcgatgcccagagacccaaacaacgcattacttccatggaatggacacagtttcacactctggaagagatatacgcctggttggatgtgatcgaggatcgttatccggatatagtcacaccctttaccatcggcaactcatacgagggcagaccgattagaggtgttaaaatttcatacaaagagggaaatcccgccgttttcatagagtccaatattcatgcccgcgaatggattacgtcagcgacgatcacctatttcatcgatgagttgctggtgcctcgtaacccggcagtcagggatatagctcagaatgtggactggtatatcattcccgttctaaatacagatggctttgcttattcccatgaagtggaacgtctttggcgaaagtcccgcctgccttcagatcccacgggggagtgcattggaactgatctcaataggaactttgattacctgtggatgttgactggagccgaatcggatccctgttcacaattatatgctggtccctcaccagaatcagatcccgagatcagtcaactaaccgcctacataaacaactccatacctgaaggcactataaagatttatatctcattgcattcctatggacaccaagggcttctcggatgctctatatag

SEQ ID NO: 36288 - protein, 312 aa, DROSOPHILA
MLLKILLVVGLFGLARSVEQVRYDNYKVYNVRIDDLEQFKLLHTQERSLKLSSWREARHLGESSDIMLPPEYQKTFESLLTKHNFTYNLKIDNVQTHIDAQRPKQRITSMEWTQFHTLEEIYAWLDVIEDRYPDIVTPFTIGNSYEGRPIRGVKISYKEGNPAVFIESNIHAREWITSATITYFIDELLVPRNPAVRDIAQNVDWYIIPVLNTDGFAYSHEVERLWRKSRLPSDPTGECIGTDLNRNFDYLWMLTGAESDPCSQLYAGPSPESDPEISQLTAYINNSIPEGTIKIYISLHSYGHQGLLGCSI

SEQ ID NO: 36289 - DNA, 5005 bp, DROSOPHILA
attaattagaatttcaaccgtgcgcttttaattattcccgctgataaggaagtctttgggtttaaacttaattgatttgcttttattttccattttaaatatatatgtatatatatatatatccatataagaaaaactatcatacatccaaaattatattattaataataaatagaactaaagtatacaaatattactagacagcttcatccgttaattgcatatccaacgaacattccatcatcatccgccatcatcaatgttacaccatttcgagaatttgacggaaaaatatttgttaaaaaattacaccatgagatttatgactaacaaaattgcgtgagaatgtagaagtcatttgtttgttacactttatattatttactttgtatgatttgtgtttgctttttctcgggctctaacacctcctactccgttttcagcatccgcttccgcttccgtttcagcgaccgcttccgcttccgcatctcctttgtggcatttgcatatatgtatatatcgctttataacgctatactcgattcctaagtctatgtaccttgcgctttttcggatccaactcggtatgtccctatgtacctatgtccctagctttctttggctgcctcttgaatatccttgtagttgaatgctttatttgttgctccgcataggtatagtagttgctcatattgtttctttgttgcaaatagtacgcattttggggattctgagggtctgaaacattgagtgcagttttacaatttcttaattgattttctttcattttgaagtttctttttggttgttttttttttttggctttttctttgttttttttttactgtgtgttttgtcacgggtttcgtattcttataattttggttaattttagctttcctctttggctgcagtttttccaactgtgagtggttgtgtgtgtgtgtgtgtctgaacgtgggtgcatcctccgtctgccggctgtttacatatatagatatcacgagagttcctgcgagaactgcgtctccagggtgggtctagttctagtggggttcctgctgggattgcgtatcggtggtcctgggctgccatagcccgccgcatacagctgcgggcacgagtcttttatgagttcctgcgtctcgcgcaactgccgctgcacctgcggcgccagtctctgcacgctgatggccggcgggaacttgtattccgccgctggagcggcctgcaaatggtcaagtaaatatattagtcattaagctaaaagtcaagataataggcattaagaattagttgctcatgagcgcaaattctgcagacagtagaattttttaagaattcttcagcagactcaagttgccctctaagatccagtacatataggatcactcacctgtacgccgtgcatcatctcgccgtagtaggcgcccggcggaggaggcggtggctgttgctgctggatttggctgtgtggagcggttggcggttcgtaagtttcgggggcgttgcatttgatgctgaaatgcacatcactgtatttaaatggatataatatatatatatatgatgacagatagctgaacctacccagttgcacagaggagagtggttgcagcgggtccaccatagatcaggcgctttggactcacgctctggggctttgatccggcgggaagggtcagcaggtattgctgttgctgctgctggtaaagttgctgctgctgctgctgattgagttgcagctgctgttgctgctgcagctgtagctgttgttgctgctgttgatgctgctgctgcaactggacgagctgtgccgctgctgctgccgtggacgtgttgacaacattaggatccaactggggcagcagtattagttgctgctgctgctgctggtagagcactgccgcctgttgctgctgctgttgttgctgctgctgcaccacttgccgtcccgtcaacacatgctgaggtagatactccgtcgtgggcagcgcgactatcgtcgatgaggaggaggaggaggtggaggcggtgaccgccgaggcgctagaaggctgaatcagcaggccggcgccacgcggtggctgcttcaatggcacctgcacctggcggatgggcgtcgtctgcagcgagcggctggccgaggagcagatggaggccgtaatgctggcggactcccaatgttgacgcagggcgtttagtcgggcctcctccaatgcgatctccgtctcgctggccgaatcgtagtcgggaccctaaaacaagcgtgtttgtgtttagccagatttggtcacagacaagaagtaaaagtttagcaaaacacccagaatataaagatcaaattaaaatacctttaaaatggaaatttataaaagattttgtgtctaacatgtttaataaaataatcaaattaatccccatggcatatatgtacattttcttgctgcgcataagttgttccaatctctttgaagtcaaattttcaggtaacaagcgaattttaatggctcctcacatgttgttcgaaaagaaaacaaatagggggccataaaactaattgttttgctctttcgatttgggatagccaaatacttagtgcacttacatatatattgatttttggccatttgtttattatcacggaacagccaattacacatcaatgttatgactagttagctgatcattatttacattggttgagtttatattgcaaagcttttaaaatatatatgtatgttaaaattaataaattctattaaattacgtatttggggtcaatgaatttatagaatttcgtactttcaactttttgtgtttatagaaacaacaattgttctctgtgctttatagcgagtgatttaagtttttatactattgggaacccccttgatttaaatttcccatctggtatgtgggaatgtatcactaagtggactctcacctcatcaatcttcttgtccagcatgcggaagaagttctgctggctagatgatatttccctggaaaagtgaggtgttcattttcgggttatgcggtcgatgggctaacttactggctttgcagcagcgataggttcttggcgcgcagcagtgagacggccacgtcctcgtcgctttcctggatgtccttattgcttagctcctcgctctcgtcgtgcttctcgcggtcgcgctgctgtgccttctcagcatcctcgatatggccttcgtcctcgtccgtttcggcatctgagtcggctgccaaacaaatggataatgccaaagaagagtttcgagcattagtcaagatgagtgggcaatttcgcgagtgccatggagtggcaaaagttttgcaataagccaagtgtggcaaacttctctgcgaaacggggggcagtcgcagtcgagaaaaatgcttagaaaacacttgtagaaattatgctaggtcctgggccactatggatactcaaaaaaacactatctgcctttcaaatacttaattatttataaaaataaataaagaaatcaaagtttttagcatcctttttgtacctgcacgtttctgttttgctaatccatctttcggcttagcctgcgtatacttaatatttcctcgggcctttctttgaagtggccttgccagccataaatttaattaaaagccgttatgcattttaatgcaaattcggtaaagcgagagccgcgagtattatgaataattaatctaggaacgagactaaagcttaggcgcctccgaaatatttgggtcgtttatggcacaatggcgcctttgtgtatgctatacttttttagctttaacccttttgcccacagagacacacacacacacagctatatacaaactggggggggggggctggccacgccccttgaagcggcgcccactgcaacaacaagttgcctttttagcagttaattatacacacacaaaatgaaataaaaaaggcaagaaacacgcacacatagacacagacagcaacaaacgcgcggggttgggcatagtcaaaagtttgccatgtaggctaggtttttacattcttataaacttaaattggctagtgtgcgtgtgtgtgtgtttatatatagacaatgctgtgggctttaaaatgtaggcctttattattactttggtgaatgtatggccttaaaactgggctcctcctttcaacttccccttcttttttcactgctggtgacatattaatcaatgatgtcctcattgtgtggaaacaggtggctcacacacacacacatgcacggaaacacggacgcacacatgcacacacagctggaggcaaattgatgtcgtcatgcgtgtaagcttttgttgtgcgaggcaatacgttttcctcgccgtttccccaatttcccttgctctacacagaggaaaatgcctaaacgatttgatagatcattccaaatgatcgggcatacacaaagttggcaaaacaatatcaattctagcacgcaaaatgagaataacataaaatctataagtaaaatgaactgagaaatttttgaagatcaatttatcagtattgctgattttttattatatatatgcacataggtggctactaaaaatatttgaactgtgtattttgggcttatgaaaacccttagataacctattgatttgcttcatctttaacgcatttacgtctggtgcaccgtgtgtggaacttataaaggcaggtgcccaaaggatatactctcatttcgcctactcaccatgtcctcctttcttgccgttcgctttactcttcgattttctgggatacaaatgtatcttgctctgtccacagcccatcttttgaatgtgccgctgcctctagaaatccagaatcgctgctgctgcctctgctgctgctcttgttgtttttgttttcaatttgtgttgctttttatttatctgtttttgttgttgtattattaatttgttgctcgacacgttgctctcccgctcggtctgccgctcctcactcttcgcgtctccgtca

SEQ ID NO: 36290 - DNA, 1263 bp, DROSOPHILA
atgcccaaccccgcgcccgactcagatgccgaaacggacgaggacgaaggccatatcgaggatgctgagaaggcacagcagcgcgaccgcgagaagcacgacgagagcgaggagctaagcaataaggacatccaggaaagcgacgaggacgtggccgtctcactgctgcgcgccaagaacctatcgctgctgcaaagccaccagcagaacttcttccgcatgctggacaagaagattgatgagggtcccgactacgattcggccagcgagacggagatcgcattggaggaggcccgactaaacgccctgcgtcaacattgggagtccgccagcattacggcctccatctgctcctcggccagccgctcgctgcagacgacgcccatccgccaggtgcaggtgccattgaagcagccaccgcgtggcgccggcctgctgattcagccttctagcgcctcggcggtcaccgcctccacctcctcctcctcctcatcgacgatagtcgcgctgcccacgacggagtatctacctcagcatgtgttgacgggacggcaagtggtgcagcagcagcaacaacagcagcagcaacaggcggcagtgctctaccagcagcagcagcagcaactaatactgctgccccagttggatcctaatgttgtcaacacgtccacggcagcagcagcggcacagctcgtccagttgcagcagcagcatcaacagcagcaacaacagctacagctgcagcagcaacagcagctgcaactcaatcagcagcagcagcagcaactttaccagcagcagcaacagcaatacctgctgacccttcccgccggatcaaagccccagagcgtgagtccaaagcgcctgatctatggtggacccgctgcaaccactctcctctgtgcaactggcatcaaatgcaacgcccccgaaacttacgaaccgccaaccgctccacacagccaaatccagcagcaacagccaccgcctcctccgccgggcgcctactacggcgagatgatgcacggcgtacaggccgctccagcggcggaatacaagttcccgccggccatcagcgtgcagagactggcgccgcaggtgcagcggcagttgcgcgagacgcaggaactcataaaagactcgtgcccgcagctgtatgcggcgggctatggcagcccaggaccaccgatacgcaatcccagcaggaaccccactagaactagacccaccctggagacgcagttctcgcaggaactctcgtga

SEQ ID NO: 36291 - protein, 420 aa, DROSOPHILA
MPNPAPDSDAETDEDEGHIEDAEKAQQRDREKHDESEELSNKDIQESDEDVAVSLLRAKNLSLLQSHQQNFFRMLDKKIDEGPDYDSASETEIALEEARLNALRQHWESASITASICSSASRSLQTTPIRQVQVPLKQPPRGAGLLIQPSSASAVTASTSSSSSSTIVALPTTEYLPQHVLTGRQVVQQQQQQQQQQAAVLYQQQQQQLILLPQLDPNVVNTSTAAAAAQLVQLQQQHQQQQQQLQLQQQQQLQLNQQQQQQLYQQQQQQYLLTLPAGSKPQSVSPKRLIYGGPAATTLLCATGIKCNAPETYEPPTAPHSQIQQQQPPPPPPGAYYGEMMHGVQAAPAAEYKFPPAISVQRLAPQVQRQLRETQELIKDSCPQLYAAGYGSPGPPIRNPSRNPTRTRPTLETQFSQELS

SEQ ID NO: 36292 - DNA, 7045 bp, DROSOPHILA
tctggggtgatgataataatgataaaccctctgacattaaacaatgggagggccgacaggcgagtggctgtctgatttttactgccgcctcgtcgaccacaagtagcttgacactttcataaacgtaacagtgcgataatgattacggcccgcccaaccaccacacccacgcacaccgacgcacagttagatggaaaagcgggcagcatacggcgttgaaatgcggtgataaagccgagcggcaaaaagaaaagtttcactcttgcataaaagggttcaaagtggcaatggtgcggatgccgggagtgatgtgtttgcgtttgtttgggtgactagctgcgccggcttcgactccggctcctactccctattgccccctagccctatctgtgtgttgtatctgtatctgtgtgcgtgccaccgcatttaaccgcgtgaactgcgcgccatgataacggtaattgccaccagctggaacaccgccatcgactttggcatgtggcatgcggcaccccgaatcctacctgctgaaaactgagcccatgactgccgcctaagggcagtacgtcagtaagggccacagttgcacggaaatatatttcaaagaaagcttgttgttagcttaagaaaaaattaatctaaaattttaagagagctcttcaggcagttttttattttagtttaccatcaattctttcgcttggtgtttggaaatacatccctacttgaaatttaccaaatctatcataaactattttcagaaagaaagaaaacctgattttccccagtgcagactccacttgacttcggtgtcgacacgacgactccacttcaatttgggtgaggtcctggcttagctcgcgtgctcaagacgcttacgtttcggccctttcgccaggagatgttttcgtggtacctctgcggttttaagattattagcagagataggccatttgtggcattcgcgacaacgacaatggtggccaccgaacgtgcccgcttatggcagactctgactcccagttgcgggttcccagttggaatcggaataaggatccgaatctggagctggcgtgacgccacgagccaccagccaccagggtggcaatttttcacagttactgcgcgaaccaggaaggaaattagtttaggcaaattgtgtggcttgtaaaacacgacggacgtttaccttggccagtcgcaattcataaagatgtgcgtgattgaaaaaacagacggacaaggagcggcaggacgaaacgacggaaggatacgcgaccagacaccgagcaactgcattagccatccgacgcctctgtgtttgcccagtgtaaaaggtgcaattttgatcgaaagccaaattgaaacgaagctaggaaagttatgaataatataatcttcggttaaccgaaggctggatgccctcgtcctctataagaataaaaaatagatataacataatatattatgtaccatacataagggacgaaggcataagacaaagtaataaatttatatttatacttcgatctttggattatccaaagaaattgttgagtgtttcaggagattttttacaatttatgtattccttgctgtacaaatcaacttttaataaataaaagttggttttaaagtcttgtttaaagtcagacactcggactaaaagtgaggactacgtgaaacactcaatacgacctaaaattgtttagtgatattttcgtgcaagcccgttagggcataattaaaaatttaaactggtaaatatattcaaatacattttctttctttttcttgatatttccattggaatacttacatcgtaattctcgggcaaaccaggcgggcccggtggtcccggcggacccatgactccgggcagcccgtcgacgcctggctcgcccttcagcccctgggcaccttcggacccccgggcgcctctggctccaggcactccggtggctccctggataaatggaagcggaagcgagacatccagaagcaggacaagaagtgtatcggcggggatggagcggtatgaaagggaagaaacgtcgccggcagcgacagagaaataaatcacattagtgggcgtgcatataacgtgtcctgcgtccttaaagctacaaatctacgtctatagggcaagttctacagcgtctacggtctgcgacttcaaggagctgttttcggagccatagcatttggggctgcctaactggctgcggtcgatttacataatcgttgcgttttagtccaagctcattaatctacgcgaccagggccgtccatgtggcatgtggttcggttttttggggcctttgggattgggattaagtttgggttgtggggagtctaccgacattccaataggctacatggatgggtacacacaaaaaatgtgtctcccgatgttcttaatcttatgcaaaatggtcacgctgtgagccatttgcgtgccatgttctgcttcttgttcttgttgctatgttggcctgtgtagctgttgcttatcgtcgtcctttaaattaattgctattagttaagggattagcagtggggcaacaaagttgtcgctggaatttccggtatgcgcgccagcttgccatatttcaccgtgcctggccaaaggcctttttgagtgggttgggcttaaggattttggtgtgggtcagtgggtttttcggtgcgagtaaaaagggggggtttcggggcccaagctggcatatttagcttctggcaatggaccgcagaatgctgagcataccgctttccttttgatgtattgcatcgcattgaagaggctgcgttccacaggttgctaaagtgccccagataatgtcagattgaatggagacggtgatgggctttagaagagaatgtctttggcctgctttcgctttttgaataattccaaccgaagtaatggacatgcattcaaagttattctatattttcggtaagcttctcaaagttttttggccctgttgcgtgataagcacttaagtgagttgagaggagagcttgttacattgtggactttgcctttgacccgcacacacacacacacacacacaggcgcactcgcatgaagtaaatggcaagtacatagtcaagtgtagttcagcacacatacaggaagacatagagacatgtcctttgtgtatccactgcgaactcttatggttgccaaagacgttcccagctgatgagataatataacgagtagcacccggagagtggataagtgtttaagcgtgagctggcgcataaagaaatttttcgttacgattcgctcccattttctcctttttctcatctaccacgcgactctaagtgttcgtctgtgtgtgtgcacgttaacgttttttccatttccggttacacgcacagctatacgcacactttctctcacacacacacacacacatggtgcacagtgcaaattatgatgtttgacataggaaaacatgcagccccttctgaaattgccctccctccttttgccaattccccagtccatcctgcttcaatccactcactcttggagattagacgatgtgtgtaatgaaattgaaaatgtgttagattcatgtcaaatattgcctttttgcgaacccgttgtaactcgaaattgccgtacacacagataagcccaacgaacggaagaaaaacatgaaagaaagtttagctcaaataccttccagctcgattatatacatagttcgcttgggtacagcaacgacttatcttcagaccttcactaagacatccaataaaatttagacaataggaactcatctctagtcttcctatagacaggtatcacaagacaactattatatttatcatggattagttaaatatttgatcatcttaaaatatgtcattcttcttgcattgtatctaactttattatgttggtatatatgaaatattactccctaaatctatcagtactcagaaatatgaactttatagaacttcctttgtaataaatatgtacatcttgccataatgaaatatccttcgttaaggtaagaaaatggatagagaaaatcctgcgaaatggcatggactggtacttacggtgtgtccaggggtacctggctttccatccttgcccggcgtgcccggtgctcctcgcaacgattcccgcaacgactcattgtccttgatggcctctaggatatcagacgcattacatgtacactcgccagtgtatttctgcgaagggaaatggaatacaaaacttagcacctggctgtggatcggatcacattaccgcggcacatcgttatgggcaggcaggcaatttcgtgttgcccaccacaacggcacagagaaaaaaattacacaattctaatttcatttataaaaaaaaaaaataggtgaatgtgaatgtatgtattttctgcatactacttgaatattcgtaccatttaacaagctgtctaaacgtacgctgtaaaaaacatagcgttgtctagatattcaacaattgtagcatttagacacatttagctctctaaatatttttgcatcttattttgaaatggtaagtggaatgtttcaagttcaagttgtaattatatcgaaattcttttttctgtgcagatgccagcggcaaataagtctctatttgcaatactcacagcccccgcactcgtcgtctccacaaagggcggatagggggccgtttcgcctttgggtcctggcggacccggcggtcccggcggaccgcgaatgctgtcgcccttgggcccccgctctcccttctcgcccttgatgccgcgatacgctgccgaaacggatgtggaaatgagatggaaagaaaaaacaagtaatgaaaaccattgcattggcattggacatatgtacagtgggtcacattagccgaagtggtatggattccggcgggtatgcacttacgtctctcgtgcgtgtactgcgtctgtcccgggggctgcattccactggcgtcgaagatgtctgtcgcctgcgaagggggagagggaaaaattcattaggactgaagtgcaaaccgctgtcaattttcattgattttcctgacataaacttataactgaatgtaaatatttaattatacaaagcgcagccacactgctgaccaatataaccatttatacagcacttataagagcaccgtcaatagcactagtgcaaactcatttgtccttgcttaatgcaccgccaattaatttacttaattttatacacttttaccaatagcactgccgactaacctcatcgcctgtattccaaaaatcatcacttaaaatattcgcttccgttgaatcctcgaaaagaatattcttgggaccaaaaatatgaaaaggtggaaagggaaacagataaaattataagggaaccaaaggtttaagtaaataataatttggaaatcaacatacctctccagatccttcataaaatatagaaccatcatccttaaaaaaaataaataaaatataatgccaaatttcaggacagaacaaacgaaataatttcaagttattgttacaaaagaaaatgaaaacaaaataaaatgaataaataaccaataagtttgtattcacgcagtgaattaaatgtggtaagtaactaatatgtgtaaaagggatttgcaaatatttcatagaactggcttaaacatttttgtgctaaatttacagctgataaccaacacgattagccgcactgagctctttaattcacaaatataactttatagcacggggattaaaaatgcatcatcacatatataagtgtatccgattacatgttatttgcagcattatttggttgtctcaataaatgaacgcaaatcccaatgcaaatattctctcacttatgcgaacataatgcaattttaatgtaatttatcagtaagatgatttgccctgctattcattaattaatttaaatgccaaccaatgcattcggttagtctggtttagtggtgacctccaaatgatgatgacttaccgccgtggtgggagcaatcgttgcctttggcggcggcatgcatgtgacatttatggcatcgggattaccatagacattgattttttctaaatagccctgggttaaatagtaacgtgtttgttagcaataatcgcatattttatgtacatatatgcacactgcgagtggaataattttcgaaacgcttttcatcgaaccaaacgcacaatgagtgcccacaaaccactacataataaatcaatcaatttgtatatatacgtacatatgcccgtacatctgcaaagtatatccaatacccgagccccatttgtaattgccgcaaatcgaaatttattattgatgttaatgtgcaacagtgactgccggccggccggataactaatgtgtgccgtggtttcggatttagaattacaattaagcatgcatatttcacattagccattagaaaggcgggccaggataaataaccacttgcgagcagtgagtcgaactgctggccgcagtaactaactacgaaatgcggagtatggaatacggaatgggcctatgaagacaatggaccacaaacaatatgctgtcgggtcctgctgttgaatcctgagtccttagtccttcgacctcgctactgctgtacacactcacctccccagatagagagacacacaaatgctcaatgcacatttgcccataaactcaagcactgcaaataaaaacggcacagcaaacactccggcccaggacaccagtttcaggagcagaaacaggcgcagcaggactcaggaccaaaaccgggtatcccagaactaagccatcgtaatagcagtcgggtgttttagttgcggctgctactgctgcttcgtcctgtgaatgatagtaatggccgtgcagcttttatcctgccgctcagctaaaaaagttttgtctgagacgctaactcgttgagtttcgggttaaaagcgtcctggcacggctcacaatggcttaatatgcgccgagtctgcggcggacttacaatctggattttggaactcgagtttat

SEQ ID NO: 36293 - DNA, 681 bp, DROSOPHILA
atgccgccgccaaaggcaacgattgctcccaccacggcggcgacagacatcttcgacgccagtggaatgcagcccccgggacagacgcagtacacgcacgagagaccgtatcgcggcatcaagggcgagaagggagagcgggggcccaagggcgacagcattcgcggtccgccgggaccgccgggtccgccaggacccaaaggcgaaacggccccctatccgccctttgtggagacgacgagtgcgggggctaaatacactggcgagtgtacatgtaatgcgtctgatatcctagaggccatcaaggacaatgagtcgttgcgggaatcgttgcgaggagcaccgggcacgccgggcaaggatggaaagccaggtacccctggacacaccggagccaccggagtgcctggagccagaggcgcccgggggtccgaaggtgcccaggggctgaagggcgagccaggcgtcgacgggctgcccggagtcatgggtccgccgggaccaccgggcccgcctggtttgcccgagaattacgataggacgagggcatccagccttcgtaactgtgaaaaattgccaccctggtggctggtggctcgtggcgtcacgccagctccagattcggatccttattccgattccaactgggaacccgcaactgggagtcagagtctgccataa

SEQ ID NO: 36294 - protein, 226 aa, DROSOPHILA
MPPPKATIAPTTAATDIFDASGMQPPGQTQYTHERPYRGIKGEKGERGPKGDSIRGPPGPPGPPGPKGETAPYPPFVETTSAGAKYTGECTCNASDILEAIKDNESLRESLRGAPGTPGKDGKPGTPGHTGATGVPGARGARGSEGAQGLKGEPGVDGLPGVMGPPGPPGPPGLPENYDRTRASSLRNCEKLPPWWLVARGVTPAPDSDPYSDSNWEPATGSQSLP

SEQ ID NO: 36295 - DNA, 3844 bp, DROSOPHILA
ccaaaatcaaactattttttcttttgccatgttcgaggcagatataaccatctggccgtttttccactcggaatctgtggatgataggcgaagatatatcataaaggttattctggagttatgcgtcttcattgtgataggatttgttcactggatcctggtgctaaccttgctgcagtaagatttggataataacttttttacttatgatttatgtaattactactagcgaatggtttctggtcttggtaaacgagcactcatctgcattgctcctagcctttgtatttggcattttcctacttttcctgtttgccctaagtatgccgctaaggaaaatgtcctgtgtcaactggctgattacgtttattatcgtgggtattctaacaattaaattacctaacaatgtaaccccatagcatattaaggtggaatgtgtggtagtttctctcagtgtgctgatcatatcatcgggagtactttatatgcttgccggatttctgattgtcagccttgcatttgtgttatgtacacttatagctgctttaatggcggtaagctagtacagataaaggatgttaaataatcaaccaaaatcttgcctaagtatgacctcacaggcaccggactctacctatatgcccttgcaactggcacttactcactgagcatatactccctggtattgtatgtggttctcgacgtgatctggggattttatctcttcgcattctgtatcggctgtgtggtgatgatggtaagcatttttcgcattttaccagcctgcaactgtctgccgcataaccacaaatcacttgcagttcctgatgtatcatgtgcagtgcatcatgggcggaagaagggcctcgaccaagttgttcgatgacaagttcgccgccctgctgctgttccacgagttcataggcctctttgtgctaaccctctactggcggcccataatgcatcgcctgcagttgaaacaataaacgaacaatcggttttaagtaatccccctgtatttcaagcagttttccaatctcctctcagacaggctccccagtggctcctgcctgcggcagccgccgggtcctctcatgtgcagcctcacatgatcccgacactcgatccgtccgtctccattgcaatcctcgccaccatatcgctgcacatagctacgcacaatacgctcggcgcactggacatccaccacgcatcttccgtagtctgtgggttgaagggtgagatgtaggaaaaagggttagtcggtggacattacacgcttgtggcagcctggcaacaacaggatacacatgaagaaatttacaacaaaatcttgaaactgaagatgaaaagcaaatttaaaattaatagagaaatggagaaatggcttatgctttcgacttgttgtaattttgttgccaaacatttttgctcagtgtattcattaccccgggcgagtgagtcgtccgggtcaattatccggagtgcgtcctgccagtagacgtgggagatgcgataaatgccgcacggctcctctggtcgtcctcggtgcctgcagattgccggaatattatccgtggcagtggtggccatgcagtccaggcacttggcactgggctctggggaggatgtcggaggcggctggaatgttgttatcgtcgaggtctgggcatctgcaaaatgcattccaaagagggtccaattagccgtttaatcgaaactatttaccacacaatatggctaacagcatgcagcatagttggcagtgagttatccatagttcccgtggacgtaaatagctcctagacctcacgtttaaaccgcactctcctcgttagttgcaaagttttttgagtatgttttattagcagatttactgaagcaactttaaactgcacttttatgaactttaaattgatgtaaaacatagttccgactatattttggccttataagtgcagaggacgttgctaaacgaaacttaaattgagttcacatttggtgtttacaaacttcctgttacttaataaatataagtcttccgtcggaaaaataattgtttgagactaaagttttcaagtcgaacttaaggcgaatgtagaaactataaatctatattgaatgctggcaaactttagcagatgtgtatttattatttacagtttaatctcaaacttttacgtgcttgacatactgtcgatgactgtcacttattgaaatgatcgattaaaattttttatatacaataaaaacaactcacgcgttgcatagttgttgtgtaataaatacaagcttttatttattatcgctataatttcgaaacgttgaaatctgctggttcatctaatggcaattctaatcagtcagctgggaaagaaaaaaaacaaaacaaagaaaaagagagaaaataccactatcccaacaatataaaccgcttataaaattaaccgaagtctaagagcttcttagcgattgaacaagagtccttgtggcacactcacccactcccgcagcggtgaccatgggaaagtcctcctccaggacctccacttgcccccgatccttgagattgatgtgcagtcggcccagatgatgcttctgtcttaagtgcatgtaaatggcgccgatgatgagcagaagggcgatgaaaatggcgcccgtactcaggacttggcgagtgcagcaggaccttcgagtccatcgtttccgcttacgactttccccggacattgacagcgcttcggcatattcctgatgctccaccaccttggactcatccgtttccacatcatcctcactgtatttggccaattccgccacactgctgctgcatgtgggctccatggcgagctggcttctccctttgctatcgcaaaccgactaacccaagcgaatagctggaacactctgtggcatttgtacatggtaccaagttacaggtgctgctcgagataacctcccctcgattatcgctcaatgttgtcggcgtaattgatgcccggcgattgcggtttctacattcccagcgtttttttttcccccgaccagctaatctgttccagcgtttgttctccattcctccagcatttcggtgatttttctctcgcattcaagtggcgctcaacatggtgatttttctccaattcccgaacatcagtagttgtacacctcaacaagtttaaattgcatgtggtttcattcctaaaagtggcacgaatttaaacaagtagtgagtttattttaaaagtactatattcggcagcattggcgaccaagccgtgcttattttgcacataatactcaaactaatatgattgaaattatttcagaaagtgaataaaaatattatcaaaaatgtggtatctgcatttaattttaagctttgtatatttttaatttcattctcttatatttctttggcatttgattaattataacagctctaataaagaactgaatgtatgcacaatttttcatggaagcatagtttaatatatttaatacatatgttttcgtgacatggaacataattttttttttaaatttcagcagtatgtagtttttattgattttattacatattcatttgattttttcacgtgtatctttagattgggtgtcggtgacactccgcttccatttgcgacatgacaacttatggcagccgtccattgaaaggggggaaatgggtggcgatatttgccaaatgggtggtggttgggtggctggttttgctgataaccttgcgcatttgtatgcgcgaattgtaaacaaatatgagaaattgttgagactcttgcggcgaaattggaacgaaagttggggcagcaaacaacagcagccg

SEQ ID NO: 36296 - DNA, 792 bp, DROSOPHILA
atggagcccacatgcagcagcagtgtggcggaattggccaaatacagtgaggatgatgtggaaacggatgagtccaaggtggtggagcatcaggaatatgccgaagcgctgtcaatgtccggggaaagtcgtaagcggaaacgatggactcgaaggtcctgctgcactcgccaagtcctgagtacgggcgccattttcatcgcccttctgctcatcatcggcgccatttacatgcacttaagacagaagcatcatctgggccgactgcacatcaatctcaaggatcgggggcaagtggaggtcctggaggaggactttcccatggtcaccgctgcgggagtggatgcccagacctcgacgataacaacattccagccgcctccgacatcctccccagagcccagtgccaagtgcctggactgcatggccaccactgccacggataatattccggcaatctgcaggcaccgaggacgaccagaggagccgtgcggcatttatcgcatctcccacgtctactggcaggacgcactccggataattgacccggacgactcactcgcccgggactacggaagatgcgtggtggatgtccagtgcgccgagcgtattgtgcgtagctatgtgcagcgatatggtggcgaggattgcaatggagacggacggatcgagtgtcgggatcatgtgaggctgcacatgagaggacccggcggctgccgcaggcaggagccactggggagcctgtctgagaggagattggaaaactgcttgaaatacagggggattacttaa

SEQ ID NO: 36297 - protein, 263 aa, DROSOPHILA
MEPTCSSSVAELAKYSEDDVETDESKVVEHQEYAEALSMSGESRKRKRWTRRSCCTRQVLSTGAIFIALLLIIGAIYMHLRQKHHLGRLHINLKDRGQVEVLEEDFPMVTAAGVDAQTSTITTFQPPPTSSPEPSAKCLDCMATTATDNIPAICRHRGRPEEPCGIYRISHVYWQDALRIIDPDDSLARDYGRCVVDVQCAERIVRSYVQRYGGEDCNGDGRIECRDHVRLHMRGPGGCRRQEPLGSLSERRLENCLKYRGIT

SEQ ID NO: 36298 - DNA, 2543 bp, DROSOPHILA
gcgaagttgcagcacatttggggcacgttcgaaacatattactaaactaactacaaacacgatttggggttcaactctagcgaaacaagcatatcattatctatgccaaccatccaaaaatttgtcacgtatcttcgatttgttgctttgtcttacaactttaaagctgctgtaaaactttttatgtttcaatgttcaaaagtttctgaaaaatcatataaatactgtaccctatattacacaaatgtacaaaaaacgtgggattaatcgaattacttgcataagtagatcaactgtgatcgaagataaagttaagtgcacctttttaaggccatttcacgaatcattaaggtgtaaataagcattgaaaagtcttacagttacccagcaagtcaacaaatcagcaatttaattgtcaaaatctgtgcctgcaatcaaaacgtcctcaatgacccgacaacttttgccacaattaataaatcagcaataagtaaacaatgttcgtttgaccgattttccagcagctccagttcaaatgactcgcagtgggcaatttaatggcttaaagacgcgcctctaaatcgccggcacgtgctaaggttactcggttcgacaaaaggcgattttggcattttggggctcttcgaacctatcattatctaacctcaagtcaacgagcagcccccgagggtcgctggtgtggctgcctgaaatatgaattaatatgggaaggggactttgaatctctgcgacatgcaaacagtgttgtatctgtgtatatactatatgtatatgtatgtgtatgggtattggccaaacagccagccgggcacatacggtcaagggtaatggcactggatcagcgggcacatcaatcaaatcaatgaaatcgaagacaacaccaatggcaccaaacaatcgcaggggaacaacccgttgacttttgcgggcttatcgccattgtagcaaattatcactgtatttatttttggatatcgtcttatgggattcgatcgctcttctcacctataaattcgttgcgaatgcgaatccgctcctgtagagtggccgccgagatgatgacacagttgatgaaggccagcagggcggcctggtagtccaggggcggatgggcagcggcactcgacagctccagttcgttgatgacaatcttgaagcggtatcgctgcttcttgagattctgcatggatattatgattgaattaggacaaatttaacattttattgtagatatatccaggatattcattgagggattatatgtatatcttgagattggacatgagtgcttttcctaatcgtttctcacccccatcaaatgcgttgtattcccacttaccttgtaaaattctagggtttcgatggctcgtgcatatccatcggggctgtaggcgcacagcgcggagaggagctcgaagacctgcttcttgacggtggcattctgggtgtccagggcagcgcccagcttagcaatgtagtcacgattctcgacaatgtagtccaggccgatgcgtgagtccatcgtggtggcttgggttgtttggtttctactttttttttcgggggattcttttcttggaacggatcacgtccccaagatggacgctttatttttgggagggcagcaatcggatcgaatcgaagtgagacgatcgattggggcggctagttgcaaaggttggggtgctcgcatggaatatctaagcagttcacgtcatgccgaatgctgctcgtgttctgaatctgaaaaacgggggaaaaacgggggaaaaacagtggaaaattcagttagttgggttcaagctgtgattgcatttccgatgatttaggcccttcaattctcgccctgtcacgcgttgttccatatcttgtgggcctttgaaaactacacccaatccccctcgatacccatttaattaatttacgatcggttctcggggcaccgagctgcaattgtcataaattaatttcgaccaagcaatcgccaaggggcgtaacagattttgaattttctatcggttttcgttttcggatattgggattacgtttcggaggcacgatcaaaggcaacctttggcaatggcgacgggttccgccttctagatcggcatctcaattaccagcaaaaacgatctcgttaatttgtttactttcgattagtcgccgtctaaactgccgacaaagtctgtcatttgggttcgcgcacatattaaaatgcgatttttcattaaaatacaaagagtgccgataaaatgcttaacatttttgttaagagccccgatctcgagtggcactttgcgttatttgaaattataatttgtgtgtgcgctaaatgctcatgttattgccattgttgctattgttttcattcccattgagatgactttttgaaaaaaaaaaaaacgagacacataggctgtgcgctaatgaaatcacatacaacgacttcgcaattaatggacagacatcacaaagtgacatccttgcgatatgccttattgtcgtccgtccgtcacttaaca

SEQ ID NO: 36299 - DNA, 384 bp, DROSOPHILA
atggactcacgcatcggcctggactacattgtcgagaatcgtgactacattgctaagctgggcgctgccctggacacccagaatgccaccgtcaagaagcaggtcttcgagctcctctccgcgctgtgcgcctacagccccgatggatatgcacgagccatcgaaaccctagaattttacaagaatctcaagaagcagcgataccgcttcaagattgtcatcaacgaactggagctgtcgagtgccgctgcccatccgcccctggactaccaggccgccctgctggccttcatcaactgtgtcatcatctcggcggccactctacaggagcggattcgcattcgcaacgaatttataggtgagaagagcgatcgaatcccataa

SEQ ID NO: 36300 - protein, 127 aa, DROSOPHILA
MDSRIGLDYIVENRDYIAKLGAALDTQNATVKKQVFELLSALCAYSPDGYARAIETLEFYKNLKKQRYRFKIVINELELSSAAAHPPLDYQAALLAFINCVIISAATLQERIRIRNEFIGEKSDRIP

SEQ ID NO: 36301 - DNA, 3963 bp, DROSOPHILA
acaccgtttatatattggcaaacatggctcacacctttcgctaatcttatcaggcccccactgcaattgtagttcccacttgggcttatcataaaaatgcgggaaatcatggaaagtgagagtacctctttggagcagtgaaatatataattagtcagacggcagcttatcagttgtgctcttgcacttgcaaacaaaaaaaaagtgaagtgagccatatgcagaaagctatatacccactatctaattgattgattgggccgagccccaacaacaaatctaaatacagaaatctggatagccaaatggccaatactttaattaatggctagcctatattttccatagtcatggactctgatttacacataattcacgtgagtcaggtgctattatttgttatcatggtgaattcgcacgatctgttactaagaatagttcttcggacttttgtggtaggtagatagtagtatctactcgcaaggttccccaaaaaatattaattaaaccattttagcggcattatggataccaagttggccaattcacctgttcgtattcaaactaattaaatttctcaatatcaattgaaatggcctatataagagcacgattggtagagtggactaacttagtatcttttacaaacttatgacaaaatggtcagttttgaggaagccgccgaactcgccaagaacttctccaagaagcccaccgactccgagttcctggagttctacggtctcttcaagcaggctaccgttggtgatgtgaacatcgacaagcccggcattctggatctcaagaagaaggccatgtacgaggcctggaacgcccacaagggtctctccaaggatgccgccaaggaggcctacgtgaaggtgtacgagaagtatgcccccaagtacgcctaaggccagactattctccagactgttctctatctgacaaataaactcgaaatcttattatgaatatccataatgcttacatatttcgcttagaaggctgcctcggattggggcatcgaaatggcggctgcgatcagtggcttggcctggccggccttcatcagcataacccggatcagcgagttatccggcgtgaggctggccggtggcaatttgtccatgggatccaataccgccaccacctcgaagtccacccgtagaggaactcctggcaggacactcggcagtcgggccagtgtctgcggaatggtatagtgacgccggtccgcgtgaagcaaaaccaccagattggaggccatcttaaaggtggacaggttttgaacggtgaggtagagccgaaaggcgggtccactgccgcagacctcggcggatagctttacgggtgcgtgggtcaggtctccagatatcgtgctctccgacgagttgatggcatcgatggttgctcgggctgctgtgtggcgaagacgccacagctccacttggaaacttccgtaggttgctggaataggaaatgaaagaataatcttgattagaacaataactatataaaattgtgttatgaaaataagagggttacttacatttggcctgctgcttctcccttgccgcctgctccacaaagatggagctcttcttgggcttatccaaaatcgaggcatccacgatggatttgttatcgcccaatgctcgcttgttcgccaaatcaccggccttgggctcaaagcgggacacacgtctcaggatcttaaccacgataccaccagattgagtaacgagcgtgaggacgtgatcctccatgcccattcgtccgtacagcatggcatccaccgtctcctcgagaacaaactcgtcgacgaggtagcgctgcaaataaaacttgaccactcctcctctaagggcaatggccaccagggtgagtcccagatgggtcaagggcagcggtaggaggcaaacgggtagatcggacatgggcacctggtataacagcttgccccgctttgagtagcacagatagcgattgtccatggtggaggcgattatcgtctgatcgatgggcagcagtaggaggccggttagggggatgccgagcttgaagatctcctgtccctccgattggcttttccgcaggaggtagacaccgccatttcgcgtggccaccacgatgcagaaatccgtctcaaaggttccctgcacggagatcaggctcggcacggccgtctcatcatcgcaggccttgccctggtaaaccaaattgaagccctgcggctccaggatcatgatgtgcccggtatcggtggccaggaccaagtgggacgggggattggcatcgctggagatgcgctttatgcagcacatggccacaatgttgccaacccgacccactggggagtccttgtgcgtggcaatgaagtgctcccgctcctgctcgcccatttgcagaagtcgctgcgatttccgcgacagcttggagtggtctatggtttttagggagtcaagcagggcgggatgggcacttggcttcacaaccggcagttttcgccatacctccagctccagatcctcggagtcctgtgcgggaatcgtgtacttgaagtatggctttaggtgacgatagaagagcactgactcagcgatggccacggcaattactggaaaattgtattcattatggaatctaatttaaaaatattaaaatgcaacgttatttctacccggcgtcttgggctccgtttcgtcgatgtagagactttcaatggccgctggaatccccggcagtggctgctcgtgcttgagtttaagaccacggaaaaccttcagcgtggcagtgggctcctcggcggcattgtccagtgaaatgtccgccgccagcagccggacatatccgtcgcactgcacgtcgctcagggccatgcaactggtgagggtggtgagatgcggtggaggagcctcctccgccgtgtccacgtgaagccagttgggagcaccggccatggcaggatcttggtgaaaaatttgcagcacagtgtgaaaacgaacaggtgattcaggacatgcttttgttttggtttttcttgtccttagcaaccgggatgacagcacattttttgttacttatttgggttttttcttaaaaacacaaaatgatcgtcagcattattcttaaatgctaacagggtaaagctacgtataactaaaaaatcatttggcaaaaggtaaaactgtgatcaaattactgatgatagaaaattttatttaaattggccgccaaaaatgcattttgtctggtcacacttaaggccggcctgctaaagacgtgcaagcatcgacagtatgtgttatcgataagtgcgagggaatattcgatacccacgtcaattgcttatcgcaaaaaacattcgttataaatatcatctcagcgacgccagcagttgaattcaatatttaacattttgtatacataagtgactgactacggccctatttaactgcaagtaatgacggagctaagggacgagacaccgctctttcacaagggcgagatagtcctttgctacgagccggataaatcgaaggcccgtgttctttacaccagcaaggtaaatacacatgcacacacacacacacgcgcgcgcattgaaatgtcaagcaaacgtcgtaggcgaagttttcacaaatgattttccgtttcccgcaattttccgtacatgccgcaggtgctaaacgtctttgagcgccggaacgagcatggcctgaggttctacgagtacaagattcacttccagggctggcgtccatcctacgatcgctgtgtgcgcgccaccgttctattgaaagacaccgaggagaatcgccagttgcaaagggagctggccgaagctgccaagctgcaaatgtaagataaccccctagacatgcgtggaatacctctctaacgagttcccccttctttttcgcacagtcgtggtgactactcctacaagggcacacccga

SEQ ID NO: 36302 - DNA, 1818 bp, DROSOPHILA
atggccggtgctcccaactggcttcacgtggacacggcggaggaggctcctccaccgcatctcaccaccctcaccagttgcatggccctgagcgacgtgcagtgcgacggatatgtccggctgctggcggcggacatttcactggacaatgccgccgaggagcccactgccacgctgaaggttttccgtggtcttaaactcaagcacgagcagccactgccggggattccagcggccattgaaagtctctacatcgacgaaacggagcccaagacgccggtaattgccgtggccatcgctgagtcagtgctcttctatcgtcacctaaagccatacttcaagtacacgattcccgcacaggactccgaggatctggagctggaggtatggcgaaaactgccggttgtgaagccaagtgcccatcccgccctgcttgactccctaaaaaccatagaccactccaagctgtcgcggaaatcgcagcgacttctgcaaatgggcgagcaggagcgggagcacttcattgccacgcacaaggactccccagtgggtcgggttggcaacattgtggccatgtgctgcataaagcgcatctccagcgatgccaatcccccgtcccacttggtcctggccaccgataccgggcacatcatgatcctggagccgcagggcttcaatttggtttaccagggcaaggcctgcgatgatgagacggccgtgccgagcctgatctccgtgcagggaacctttgagacggatttctgcatcgtggtggccacgcgaaatggcggtgtctacctcctgcggaaaagccaatcggagggacaggagatcttcaagctcggcatccccctaaccggcctcctactgctgcccatcgatcagacgataatcgcctccaccatggacaatcgctatctgtgctactcaaagcggggcaagctgttataccaggtgcccatgtccgatctacccgtttgcctcctaccgctgcccttgacccatctgggactcaccctggtggccattgcccttagaggaggagtggtcaagttttatttgcagcgctacctcgtcgacgagtttgttctcgaggagacggtggatgccatgctgtacggacgaatgggcatggaggatcacgtcctcacgctcgttactcaatctggtggtatcgtggttaagatcctgagacgtgtgtcccgctttgagcccaaggccggtgatttggcgaacaagcgagcattgggcgataacaaatccatcgtggatgcctcgattttggataagcccaagaagagctccatctttgtggagcaggcggcaagggagaagcagcaggccaaatcaacctacggaagtttccaagtggagctgtggcgtcttcgccacacagcagcccgagcaaccatcgatgccatcaactcgtcggagagcacgatatctggagacctgacccacgcacccgtaaagctatccgccgaggtctgcggcagtggacccgcctttcggctctacctcaccgttcaaaacctgtccacctttaagatggcctccaatctggtggttttgcttcacgcggaccggcgtcactataccattccgcagacactggcccgactgccgagtgtcctgccaggagttcctctacgggtggacttcgaggtggtggcggtattggatcccatggacaaattgccaccggccagcctcacgccggataactcgctgatccgggttatgctgatgaaggccggccaggccaagccactgatcgcagccgccatttcgatgccccaatccgaggcagccttctaa

SEQ ID NO: 36303 - protein, 605 aa, DROSOPHILA
MAGAPNWLHVDTAEEAPPPHLTTLTSCMALSDVQCDGYVRLLAADISLDNAAEEPTATLKVFRGLKLKHEQPLPGIPAAIESLYIDETEPKTPVIAVAIAESVLFYRHLKPYFKYTIPAQDSEDLELEVWRKLPVVKPSAHPALLDSLKTIDHSKLSRKSQRLLQMGEQEREHFIATHKDSPVGRVGNIVAMCCIKRISSDANPPSHLVLATDTGHIMILEPQGFNLVYQGKACDDETAVPSLISVQGTFETDFCIVVATRNGGVYLLRKSQSEGQEIFKLGIPLTGLLLLPIDQTIIASTMDNRYLCYSKRGKLLYQVPMSDLPVCLLPLPLTHLGLTLVAIALRGGVVKFYLQRYLVDEFVLEETVDAMLYGRMGMEDHVLTLVTQSGGIVVKILRRVSRFEPKAGDLANKRALGDNKSIVDASILDKPKKSSIFVEQAAREKQQAKSTYGSFQVELWRLRHTAARATIDAINSSESTISGDLTHAPVKLSAEVCGSGPAFRLYLTVQNLSTFKMASNLVVLLHADRRHYTIPQTLARLPSVLPGVPLRVDFEVVAVLDPMDKLPPASLTPDNSLIRVMLMKAGQAKPLIAAAISMPQSEAAF

SEQ ID NO: 36304 - DNA, 2785 bp, DROSOPHILA
ctggtccctcagtcactttgtccttccgcctctccgactgtcacagttcctttctgcccgactgtttatcctgcggagcataagcttcatatatatacacacacatacaaatatacagaactgaatacatatatactagctgcagcagaagaactcagcggagaagctttcgggcttatagaagaggcaaaataggattttatactgaattgctccagttaggatagtaaattattaaaaaaaaaaagggatactccctcagaaaattgaagtttatttatttacttattatttatttacttaatcacaagattaactcatttgtttctgtgcacaaacaaaatcccataacagaaaaaatgtaaactatgcctatgtagcatattttgtctaataaatgtgttaagatgttgttacactttgtttatttaggtttttgtgacacttttctgctcaatgaatttatttctatattttcaccttcatatttatgctgttctgaccccaagaccgaatacgaaaagcaaaagggttaaaattgcattttattgtgggtcaaaagtgccaactacaattagtttaaaacgagaaaacctgtcaaataaaaacaaaacctaaaatgtaacatgctaaaaaacgaacatattatgaccaagttgaagattttttttgtgtttatgttccagtgtgttggtttatatgttgatttagacagttttataaacccaaaagcaaacagatagtgtcaacgttgcgtatacgcagcgtaagccgttctcccgcggcagctgcagttaaggcaaaatatgcacaattttaaatatatgtatatatgtatataaagaggatgtgcataactggtcctgaagtgcatggtgaaaattcaggaggccaggcgttttctgaattctacttcaaaacaaaaattttggtgctaatacagcaatatttttactcaaactcgcagcttcaacttgccacattatattttttttccaccatggagtctgctaaagtcctaaataaactattgaaggaagctcccaaagattctaaaggaagcaaagagattgaagagttacgaaacctgatcatagagctgatgaaaccacgactgggacaactacttcagatactaaagactcgcatgatagcttccactcgagatgagtttcaagatgaaaatgaagactggtggccagattatgagctattatcagcagactggagagccttcacagatatgaatgtaagcaagagttattaaaaaaacgaaataagaaaaaactaataatatattaataaattatactacagggtcttttagtctgcactcagaatgctttaaagggactaccgggtgatcttaaggccattggtgaaaagttcgattatgcctattccgttgcaaagcctataactgctcgaaataagaccaaaaactattttttagtagtggaacttatagaggacatggaggactttgtaacgcacctcagccgcctgtgtagcaagaatctggacgagcgaagggacctatacgatctggcttcgataactaaagatactggcgatagaatcaaggtgaaagtcttcgatgaacgcatctttgtgcaattgcagtcgcgaattgcaagtcttaggaactacataagggacttctgtgcccttttcgatgcccacttggagtccgaagaggaggatgaattcgaaacattagatatgttggcaaaaccccaaggaccacttgccacgggaaccaatgctgataaggcccggacttaagccaaatcgatcaggaagtcatctcaccgtctattcccatggcatggcttccaacggttttcattgtacaatacccacacttggagctacagaacacagaaacatgactccggcatatgggcggtaataaagagttcgcctccagtgtattggagtatctgggaaagctttttatgcttcaaagtcaatatagtagtgtgccatgtacagagcgcacagttttaaaacggtaagtatgcctttcagttacgtggtcgtgtgtggtgacacacttgcccctccgcaccatccactgaacagccctacgaccctccaacagccacccacccactgccccttgtcaatgggctgttagttgctccgagcacagacgccattcaagcggaaatgcagcaccgaaagccggctacaagctgcactgagcgaaattcgtacaaatatttgagtgctaaatggtaaatggttaattcgctgcttacattgtaagtacgacatataaattgtcattgaaaaagttagaaataggaattgttcagaaatttatgagctgtcgctcttaagagttatatatatataaggaagtatatataaggaagctagtatgcgaaggacttacatccaaagccatttacatattgataaacccttgctatttactgatttttattaaaatcttgcaagttttagctgccttttactgtgtaagttctatgaacgggcgcacggcaacgaccaaaaaagagccagaaccatagccagaggcagaaacctccatgtgaagtgtgtcatcagtttaaggtttttgtgggcagcactcgcacacagacggcaatccactcatactaacacgccgaacacgcacacagatgcacaggcacagatacaggctcagagggccggagaaaacgatacggaatacggagctccactcacgagaccgagcagcccgtattttcataataaacaaatgggttgtatggttggttggcttaactttcgg

SEQ ID NO: 36305 - DNA, 717 bp, DROSOPHILA
atggagtctgctaaagtcctaaataaactattgaaggaagctcccaaagattctaaaggaagcaaagagattgaagagttacgaaacctgatcatagagctgatgaaaccacgactgggacaactacttcagatactaaagactcgcatgatagcttccactcgagatgagtttcaagatgaaaatgaagactggtggccagattatgagctattatcagcagactggagagccttcacagatatgaatggtcttttagtctgcactcagaatgctttaaagggactaccgggtgatcttaaggccattggtgaaaagttcgattatgcctattccgttgcaaagcctataactgctcgaaataagaccaaaaactattttttagtagtggaacttatagaggacatggaggactttgtaacgcacctcagccgcctgtgtagcaagaatctggacgagcgaagggacctatacgatctggcttcgataactaaagatactggcgatagaatcaaggtgaaagtcttcgatgaacgcatctttgtgcaattgcagtcgcgaattgcaagtcttaggaactacataagggacttctgtgcccttttcgatgcccacttggagtccgaagaggaggatgaattcgaaacattagatatgttggcaaaaccccaaggaccacttgccacgggaaccaatgctgataaggcccggacttaa

SEQ ID NO: 36306 - protein, 238 aa, DROSOPHILA
MESAKVLNKLLKEAPKDSKGSKEIEELRNLIIELMKPRLGQLLQILKTRMIASTRDEFQDENEDWWPDYELLSADWRAFTDMNGLLVCTQNALKGLPGDLKAIGEKFDYAYSVAKPITARNKTKNYFLVVELIEDMEDFVTHLSRLCSKNLDERRDLYDLASITKDTGDRIKVKVFDERIFVQLQSRIASLRNYIRDFCALFDAHLESEEEDEFETLDMLAKPQGPLATGTNADKART

SEQ ID NO: 36307 - DNA, 2958 bp, DROSOPHILA
tgtatctatccctgccaaagaaaaaaaactctctatcagcccgctctttgtttttctgttcttttcttccccactaacatctccgtctgcgctgcgattgatacaccattgatccgttgatccattccgccgtaggcatcatctaccatggagcacaatcaagcacctcctccgatctgtcaccaatgtccgaacagaaatcattgccccgccgcggtcgctccaggtatcatcatcagcaatatcagttttccaccaataccacaccgcgccaccacaacagcaacaaaatgaacaacaacaccaccagcaacacgaacaccacagccaccaatacgacagccacaccatcgacatccagcaattcgaacaaaattctatcgccgcgcggcggaaatctgaaatccatatcgagcacgttcaaatcgcaagactccatacagtgccacatacccacattggtcaagtcgccatcgatcagtacacagcagcagaaacagttccataagcagcagttgcagaatagtagtaccaataattcccagcatagtagctctaatccgaacagtagtagtttgaagcaacagcagcccctactgatcacgcccaagctccatcagctggaggccaatggccaggagcttttggggctggacgggatcggcaatagcccgttggtagcctgcatgccgccctcttcacaattccgccccataccccacaagtccataatgcccgcgcatgagccaccgcaccaccacaaccacagccagcaatcgcatccccaccagcagcagcagcagcagcagcatccgggcacgctgctcaacccatcgacggccatgctctcctccaagttcttcacagcgccaacgctgcccaaataggatacggccaatggggggagtgaatacgttggtggtgccatggaggccatggacggtttcggctatgatagcggcgagatctcctgcacctacatggacccaatcgatcagacatgagacctggcctacggtgaggtgtgtggtccccccgagggggcccgttaaggacccttttcacgacctggtggctcagctgagtgcctggatagcataacctagaaatttctatggattcgaaaccattttaaaaggttcctaagagtatgccataaaaagtttaaagctgtttcgtttttgaaacatgttgtagcatacttttggacacttttatacgagtctagggttttctgtgaatcaaacttaaaagagaataaccttaaatcaaaatttgaagcctttaaggtacaagctgatacaacaggtcgtgaaatttgtgcccacccacgcacacccaaccacacaaccagactagaactacaccactaggtctataaacgaatgaatgcttgaatgctgtggttgcaatcagaaaaccaactctggaccctttcttgtacttgcacccccatcaccccccaacgattgccacccaccaccctcccactccccgaatgaaaacacgcatccagggccggcatcctgcgcacgctgcatccgctccagctgcaggccgagtgcaacctcggcgccttccatcgcacagaggacggcggcctgggcgaacggatcgagctggccgaggttgaggtcgatgtggatacgattaagaagctaaagctgggtcagaggtcatcgctctggtcccgaccctcatccaccacctcccagctgcagcaggagcaccagcagcagcaacagcagcagaagcaccaccagcagcagcagcagcaacaccaccaacagcagcagcagcagcagcagcaggcaccacagcaaccacacaaacgagcgcattcaaagtcaccgcagccacaacaacaacagccactgcaacaacaacgccaacaacattcacccgctcctggccaaaaattgcttagcgagaaatcggattattcgatatccgtctgagacattggtaagatctgatcgcaagatcagcagattggatgagaccgggccccccgatagccacaaatttagcagcagccgggccgtttttgtacatttttgtaatgcatttgttaccttaccaagacgccccccccccccctaaaccccctaaaaaccattacaccactcttgaaatgataaacctcaattccaaactttcggaacagccccgcaccaagtaatacccttctctctccccaaaagaaacaaccagatgaacactcagtaaactttcggacaatcagtatcaaaattctgcaccaaccatccaaaaaccaaaacataccgaatcgaaacacttcccattatgaactcctgcccgtatttatagaggtcatactatatctaagtattaacgattgtgcatgctatatacccacgtatgtatgaatatggcatgtgtccaaaaagaacccaggtcagttgtcgaacttccagaaatgttgtatgtacatatatatactaacgtagtctattaagtatccgtaacgactaatgcgtatatcactcgaaactgtaactcaaactactaactgcaaaactatcgcaaactatcgtatcgaatcgattcgaatcgaactgtttttcatcgtatgtagaaagaacgaacttcttctagatgtggaagtctcgaatagcattgagtgtttggcctatgaaaagctactcctaaagtagttctataagtttcggttttgtgggtacaccagggcgatgaaacgaggaatttaatcttgaaattttcaactaagccgaaaactcagatatacatatatgctgtgtacaaatttatatgaatgtatattgatgtatgtccccgtgtgcgtgtctacgttatgaggcagtcgtgtgctcatctatgtatataggatatataccgagatatacaatcgaagaatactcatttagttgttagcgaatccacgtacatgtagagtattgagcaaatgctgtaaat

SEQ ID NO: 36308 - DNA, 459 bp, DROSOPHILA
atgagacctggcctacgggccggcatcctgcgcacgctgcatccgctccagctgcaggccgagtgcaacctcggcgccttccatcgcacagaggacggcggcctgggcgaacggatcgagctggccgaggttgaggtcgatgtggatacgattaagaagctaaagctgggtcagaggtcatcgctctggtcccgaccctcatccaccacctcccagctgcagcaggagcaccagcagcagcaacagcagcagaagcaccaccagcagcagcagcagcaacaccaccaacagcagcagcagcagcagcagcaggcaccacagcaaccacacaaacgagcgcattcaaagtcaccgcagccacaacaacaacagccactgcaacaacaacgccaacaacattcacccgctcctggccaaaaattgcttagcgagaaatcggattattcgatatccgtctga

SEQ ID NO: 36309 - protein, 152 aa, DROSOPHILA
MRPGLRAGILRTLHPLQLQAECNLGAFHRTEDGGLGERIELAEVEVDVDTIKKLKLGQRSSLWSRPSSTTSQLQQEHQQQQQQQKHHQQQQQQHHQQQQQQQQQAPQQPHKRAHSKSPQPQQQQPLQQQRQQHSPAPGQKLLSEKSDYSISV

SEQ ID NO: 36310 - DNA, 2443 bp, DROSOPHILA
actttgcggtgtttgaacttgtgatggtgcagtggaataggtaactaatgtctgcggctgtcatgtttatgcggcagccatatcgtaaattcaaaaatatcaactaaatattaagaaaacaaagcgggaaaataatttaaagtaagcttaaataactacaaaatgatcgagttagttacatagctttcgagaaatgttcttacggtgcgtatgattaatattattatatatttctattatttgttattttttttataggtgaaattattcagttatataattttagttttccattttcgtgttagcaataatattatcttttatttatatttaattccaacactttaaatggcccacaatgcgttgtttttagagcaagacacccgcataaacgcttcagcatggtgggttgcctgcatcgatgtgcacacatgctcatcctggagccgagtcaacacagtttcctgccccctcagacatgcttccgtgcatttccgccccaaattatgcagcaagaacaagcggaatccgacatcaggacaagaaccattagacatgcactttgatttggttgaaaactttattgcggatccccattctcttccgtactcgacagcaatccgcagcagtagctgtagcaggagcagcagtaaatcaatcatcttccacaatcaaaagcccgtcgaggaagttgtgtccccgaggacaggcactgtacaggcccaagcaattggctccagctcttcccgcggcgtaggcatcatggtagtcattgtccagatccgctttgccgggactaaaatgattggcagattaaagtagcatttatggggattcgtgtaagtgtttgaaaatgaatgagaaatgatgagggagcacttaatatttatcgtattccttaaacttgaagactcttttcttttacctgagtacaatatccataatttccgagaacacaccgatatgatgatggatctgagcattctcgcatatggagcgcagcagacattgtctgcccatggagcggtcattgttcctcctgcccatatactcctccagtgcagtgtagaccaagagcctggcatcgtccgcatatcgcactccgccattggccacatggcgctcaatattccttcgcatttgcatcaaggaacgagcgaaggtgccttcccacttatcccacggccagatgggtgatgtgggcagggaataggaaccaccttggagcgtgtaggagagcacacaggaacggaaggtcaccttgtcccccaagggtatgggcatcgagggaccaatactaaacttcaaagacccactattctggtagatcagccagcgcttctgtcgatgtcccatgaattccgtgagatttcgggatgaatctccccgagatggcaggctgagcatggccaccgccaagagcagacccgttgtccacttcatgctcccaacgactactaactagctgcaggtgtaggcgtcacggacttaactcgttctgaagtgagccatcaacgcaagatgacaagtggaaatttcggaggcacaaacatttggccaggcaattagcattatgaatttgtcaagaactggattacactgacccaaaaaggtgcatgtatgcataaatattcaaagtatactaacaagtatatgatttacaaattatttttttgatttaaaagtaaaaacatatttaataaattgaatagaatgtcaatatataaaacaaatatctatcactaggccaagttgattttaggcatgcagaacacattatttttcaatgtgttcccaatccgttttggttttctatttgcacacgtgagtggaaaactgagtggacaacagccacctaattggattcggcccaactagagtgacccaaaacgtggggcagatcgagatgaaaggtcacagaaatatggtgaaagacccacttagaagaccattaaaatacggaaaatctcagcacacaatcagctggcagagcgatgaaacgaaaaatgttttgcaaattatttatacaaatacgggaagtagcaccaactgtctgggcgaccgcctcaaggcgaagataatatcctttttcgggttgttttctgatttgtcgacgtggccggaaatgaaaagcaaatagctgttgcaggaaaagcagttggcaagcgaatttgcttatatcacagcccgggcatggcaaccgtggtggcaacaatcggagtgctgcaaacacgtctacaagccgcaaagatgaagacgtaggaaatgggttccgaccacgaatagtggttacacgctaccgagaacccatgtgggtggataggtctgacaaattcccagtgccgcgaaacttttgccatccacctaaatctcggacacttccgctttctagcgaataacatacaacaaattgtagaagatataaattcatgttgacaattga

SEQ ID NO: 36311 - DNA, 660 bp, DROSOPHILA
atgaagtggacaacgggtctgctcttggcggtggccatgctcagcctgccatctcggggagattcatcccgaaatctcacggaattcatgggacatcgacagaagcgctggctgatctaccagaatagtgggtctttgaagtttagtattggtccctcgatgcccatacccttgggggacaaggtgaccttccgttcctgtgtgctctcctacacgctccaaggtggttcctattccctgcccacatcacccatctggccgtgggataagtgggaaggcaccttcgctcgttccttgatgcaaatgcgaaggaatattgagcgccatgtggccaatggcggagtgcgatatgcggacgatgccaggctcttggtctacactgcactggaggagtatatgggcaggaggaacaatgaccgctccatgggcagacaatgtctgctgcgctccatatgcgagaatgctcagatccatcatcatatcggtgtgttctcggaaattatggatattgtactcagtcccggcaaagcggatctggacaatgactaccatgatgcctacgccgcgggaagagctggagccaattgcttgggcctgtacagtgcctgtcctcggggacacaacttcctcgacgggcttttgattgtggaagatgattga

SEQ ID NO: 36312 - protein, 219 aa, DROSOPHILA
MKWTTGLLLAVAMLSLPSRGDSSRNLTEFMGHRQKRWLIYQNSGSLKFSIGPSMPIPLGDKVTFRSCVLSYTLQGGSYSLPTSPIWPWDKWEGTFARSLMQMRRNIERHVANGGVRYADDARLLVYTALEEYMGRRNNDRSMGRQCLLRSICENAQIHHHIGVFSEIMDIVLSPGKADLDNDYHDAYAAGRAGANCLGLYSACPRGHNFLDGLLIVEDD

SEQ ID NO: 36313 - DNA, 2990 bp, DROSOPHILA
atcaaacggcacggtggtgtccacagctgtttggtagaaagcgataacatcgctgacggtgcgcagttcatgtacctgggagttgggcactccgtgctgcagctcctggaagcacgcgttcaggaattcgaatttctcggagagattccccaactggtcggatttcagttgaagcgaggcggctacggttcgaatacgttcggcggcatctgcaggtggggagtacggcttatggggacgcaagaagctacaatcaggagaatatttacttggtttttatgtaaataaattaaagaaagtgcttaccccttggcggcgatggactcgccgacagctgaaatggtgctggttttgacgggctttgcttttgcggccttggcggcggaggcaaaactcctatgcaggcttcccgcaagctaaattcatggtggcattggattttaagtgaacatttttattattttttacttacaattagggttttacgtaaaatcgctgccattggatgtgaccagattgaaaacaatgcggcatggcagtcaatactgaaaatatattcactatacttacaggtaaggagatggtaacacaaaaatactgcattgagcgttgccaggtggactcactgtttacccactgttaaatttataaacaaacttaaaaaaaatgaaaacattatgagtattgagttatttttagtcgaagatctatctcataatagtctttcttgaaacaaattttagtttaagcaacaataagtgataggattttattttaaaaatatattacctcatcaatttcaatttaaatctaaattcgacataactttacgaacgataactttattaaattgcgtggcagctctaagcttttgtcgataataaggtcctgttattcaattgataagtcctgctatcgcgccaactgttatttttttataattttgcattgaataatagttttaaactacattggtgttctttatgtagtataaaacagtatggacaggacaacagttgtcccgagtccggcctccacctactgctcctttatgggtggctcccagcactccccattgcggcgatcacagcgcctcatcgacaaggaaaaccgggatctgcagaagattccgcccaaaagtctttctcctcagttatttggaaacactgaagatgattacagtgaactattgttgcagcaagggaaagtggttcacctgaagcctgcagctaagttggtgcccgtgagatcctcggataatctagtccatcttggatcccgggataaagttgtccccttgaaaacttccaatagaatcgttcacctgaagcctccatataagattatccacctcaaaagtttagatgaagttgaaaagaccgtaaagaagaagaataatattcagaaagaagttcatcaaaggaattcacaaaggagaagcattcaatgcactcccaaaaaacgtggtcgaaaaccaaagcaaccggctaagaaactgcagtcaagaatttccaccgatcagctaggaagcacaccatcgccatccaagctgcctgccaaatatcccgcccattttgttcatcaacttccgcccgctgaggattccagctgtgccactcgaagacgatccttatctgctccagctatgcaacttagcgatctaagcctcacacccgatgagatccaaactccggagcggcgcggtgaaatcgtaaacaaatcgccatcggatctcgactccgatgtctccttgaacttctcgctgtccgattccattggcgagatcttcggcaccaaggacatcagcagcattctgaccatgcagcggccgcgtcagtacattttgctggaggagcatctgcccacactggccaccatgttgaacgttgacttggagcgactgcgctgcgtgctggatatcactcagggcttgagccacgagcaaatcctgcgctttccgataaaacatgaagaggatgaattggaagtaccttagatatgatggggaacttatagcagtagtataatgttttcactttgaatagttttaatgtccaagtccaacatatttaattcccataagatccttgttgctttaacttaacatttaaaatgtatatctccctttttttttgtatatttttaagtggtatttaattgttgttgttttttgttgttgttgtttctttttcgttattttgccttagactttcagagtgcacaatttttgtttaaaccatttacttttttgtatattttaaattactaatgctaaacgttatctagactttatcatacttcataattggtttcctttcctccacgacaatacagcagcaatcgatcggggtttttttttgtatctgttactaagttttcttttttgtttactgtgtttctcatttaacgtatatacaaccgcgtgaatttggagttgcagctccctagtagtcgctgtcgtagcttccgtcctgctgcgcctgcgtcgagtcatcggaacgctccgaagtgggctccagatcaacgtccagggccgtagtgttggccggacagcagctgggatgagccattgagtcgaaggcatctttgatttgattgttggcacctttgggatctaggtcggtggcccagctgaagtgcatcagcgccagatccatgttgccgagcgtcttgtggattttgccgatcagatagaacaccaccgactccttgggcacgacttccttgagctcctccagttcgcgcagcgcctcctggtacttgcccagcgagaagtagatggagccgcgatggaatcgcgtcagcgggttcttggggtccagcgtggcggccgtgtttagcgtctgcagcgacagatccttcttcttcatgtagaattgcatggcgccgatgtgcacgagaataaccgagttctgtggattgattttcagcgccttcacgtagtgaatctcagccagctcgtatttctcctgcttggagtagatggtgcc

SEQ ID NO: 36314 - DNA, 951 bp, DROSOPHILA
atggacaggacaacagttgtcccgagtccggcctccacctactgctcctttatgggtggctcccagcactccccattgcggcgatcacagcgcctcatcgacaaggaaaaccgggatctgcagaagattccgcccaaaagtctttctcctcagttatttggaaacactgaagatgattacagtgaactattgttgcagcaagggaaagtggttcacctgaagcctgcagctaagttggtgcccgtgagatcctcggataatctagtccatcttggatcccgggataaagttgtccccttgaaaacttccaatagaatcgttcacctgaagcctccatataagattatccacctcaaaagtttagatgaagttgaaaagaccgtaaagaagaagaataatattcagaaagaagttcatcaaaggaattcacaaaggagaagcattcaatgcactcccaaaaaacgtggtcgaaaaccaaagcaaccggctaagaaactgcagtcaagaatttccaccgatcagctaggaagcacaccatcgccatccaagctgcctgccaaatatcccgcccattttgttcatcaacttccgcccgctgctccagctatgcaacttagcgatctaagcctcacacccgatgagatccaaactccggagcggcgcggtgaaatcgtaaacaaatcgccatcggatctcgactccgatgtctccttgaacttctcgctgtccgattccattggcgagatcttcggcaccaaggacatcagcagcattctgaccatgcagcggccgcgtcagtacattttgctggaggagcatctgcccacactggccaccatgttgaacgttgacttggagcgactgcgctgcgtgctggatatcactcagggcttgagccacgagcaaatcctgcgctttccgataaaacatgaagaggatgaattggaagta

SEQ ID NO: 36315 - protein, 317 aa, DROSOPHILA
MDRTTVVPSPASTYCSFMGGSQHSPLRRSQRLIDKENRDLQKIPPKSLSPQLFGNTEDDYSELLLQQGKVVHLKPAAKLVPVRSSDNLVHLGSRDKVVPLKTSNRIVHLKPPYKIIHLKSLDEVEKTVKKKNNIQKEVHQRNSQRRSIQCTPKKRGRKPKQPAKKLQSRISTDQLGSTPSPSKLPAKYPAHFVHQLPPAAPAMQLSDLSLTPDEIQTPERRGEIVNKSPSDLDSDVSLNFSLSDSIGEIFGTKDISSILTMQRPRQYILLEEHLPTLATMLNVDLERLRCVLDITQGLSHEQILRFPIKHEEDELEV

SEQ ID NO: 36316 - DNA, 6184 bp, DROSOPHILA
gggaataaatggagggaaaacaaaaccaacaaaaacaactctaattgcagacacaatgacttctagggacgagggcggacggatcgggagtcctggtgtcctgaagtcccgggcaggacgaatgctgggatagattgaacgagttgcaaggatttgcacagcgccgcagggaaagatgcccgcttcggtggcagacagacagccgaggcgcattcatgtggaatatgaaacgaaatgtcaatttggagaaatatacatatacatgcagatatatagatatatatatatatatatacccccaaccccactcgacatacatacatactcgtagtatatgtatttgggtctgggggccattgggaacatgtagaagaacagcccgatctaaacaccaaaagtgttattctaatttgggataaggctaaatctgtttgctcgcaaaacgagctctccaatgtaaggaaaactccgactttcgaatgcgacaatggccgggcattataaaaaatgtaaaatgcttattaaagtgcaaaaaggtctcaagggatttgcgcacccgagaaggccagcggccctttatgaatttttgatatctccccgggattattgcttttgtttatgccagctcacaattttaatgcatgattggggattatttttctgcatttttatgcggcatgtaaatgatgtatggggtagtaaaatattttacgatcataaatgcatttattcagctgaaaatctagagcagccattgctgaattcatttatacttaaagggtttttactgatttcggtctttggcaaggaattcaactccatcttgctttcaaaaattgagtttggtcagaaagatattgtgaacctaaaggcatacaaaacataattttgatgcaatttaaatatttgttatttactttttcccaattatgttctatactttccagataacacctgcagtgaaccgttcgaagcccacctgcgcggtcccggattcgttatggagccacccggtcgtgtggagttttcgaactcctccggcggctggctggactgctcggcctccggaagtccgcagccgacggtcgactgggtgcacgcggatggctcggcggtgaccgagatccatggagtgcgacgtgtcctgcgtaacggaacgctcgtcctgatgccattcgccgcggccgcctaccaccaggatgtgcacaacacgatctatcgctgtattgccagcaattcggtgggtcgtatcgtctcgcgggacgtgcaagtgagggcgggtgagtggctacagtgcaatgtgtgggcgtggcagcattatataatatatatatatatttttttttttcatactccgctgcagttgtggcccaggcctacaaagtggacgtagaggtgctatctgccgcaaggggatgcaccgccattctgcgctgcgtggtgcccacgttcgtcaaggaattggtacgagtggtctcgtgggttcatgaacccgctatctacatctatccctcgttgcaaggcggtaagttaactctgtcgtccttatgccagaaaccgaaaggaaacgcaacgatgaggagctcagctcagctcagttcagttcagtctgcatctgcatccttgtccgtgcgacaagccaacaaagtgcattgtttgtttgcagtatttgcctcacatgtttgcctgcttaactgccatttgcgtccgcacctgcccctcagttttcagtttccttttggtcctttggtgcataattaacattgtcctttagcaatttgagacgagcttttggcttgccttaacccactccacaaagagctggcgtttccggttgtctatattacaaagagcgtgtttccccttctgttttttcaaaattccaccggcttttgtggcgagtaaactatccggaaaggtcaagagtgtctggcagaagatttgaatcagaagcatgcgacagaatgaaggcatccatcttgattaatcctgtcagcaggaatgccaatgcagagactgagagtttcctttttatatccaagttttaacttcgagaatatatatatatttttttttgcaacttggcttaacttctagtggaactttaacccttctcttttatgtgtatacttggttggtttttgagttgagtttaggcaacagttcatcgtagggaaatgtactcatagctttttttgcatttcccttccaccagatggcaaattccacttgctgcccaccggcgagctgctcatccacaatctgcaggagagcgatgagtcgcagtccttccgctgccgcagcatgcaccgcctcacccgtcaggtggtcgtcagttcacccacccgactgcgtattaattgtgagtatacccatgcccaggcccaggcccatggccaaaagccccaaaaaccccgattccaggaccacaccaatgccacatatatctccatcaactctatcatctctcgccgcagcgcatcgcggcatcatttcgccgagcgtggtggagcacacggctcatgtgcaggtgtcgcaggacgagggcgcggtgctcctgtgcgtcgcccagggctgtccttcgcccgaatacaggtgtgtatgggtataggtggcgcaaatcgatgctatccactggcatccgcccactcccactccccaaaggactcttccccccccccctttcgcactcactcactcattcggtcgctgagagctttagcacacatttctggcgaaacttttgacgttgacaggtcctggccgcacaaacgctataacgctgggctctcagttattagtgcactggggaaaactatcaggatcttaactgagtgtccttgaagtagccaaagttttgcatatgttaaatctaaaaaagtatattattcttttgaaatatatatatattcaacatttagacatgccaatcaaatttaaaactcttcacggagtatttattatacttgtctgtacaaactattagattatgatatatttatagtcagaatacattttcccctgtgcaaagccagttatgccatggtggtgcaagttaattgaaacgcatacatctaaagtgtgtggccagggcatttagtttagtttggcagccaaataaataaacaaccgctccaggggtcagaatatgagagatgcggagactgttagctgacgttcatattatattgtaaaatgtgtctaaagagttggtaatgtgtggccttaattgaaatgtgagctaaaagcgttagttaactttctcgacagccgatgggtcgtatgcgcaatgcaacgtaacatacaccatctcgttcgacaacaatggcctaggtaatgatgtgaatgtagtcgggatggaaaaaaaaaaactctactgccacatcgagaacagagaacagagtgtatgtggccataattacgctttgataagcagacaagtaatgtaagatccgatggtctagtgagggtaggtggaaacaggcacaatgtcagcctgatgacagaaaacaaaagaatctataagcgactgcatggtggggcacctacatatactcgtatagatagattgctgtgccaaggggaaaatattgtagccatttcataattaatacggcagagcgggacgaggtcctgcgagaagagggataatgagcgaggcaaaggattaatgcaacattaaacaaaggcaccatcaacacagacagacaggggatgggcaaaaaaaaaaaaaaaacaggataaagaatgccaaaggtagtcagtccatcaggccttgaactttgtttcgttccctgatagttatagttgaaataccctttcaataatttcacaaactttgacagccatcagatgttagatttgttatggggcaaccagatggtacatgataaatggactacaattgttcaagagctcaacactattaatttaagtctgtctgattcggagcattctgagctcaaattactaagcgaaattttcaattataaatctagaatgcactttgcacaaatgtttctcacttgaaattggtgtcattcaactttaatgttatattttaactttaaattatttatatatttctaagcaaaatttgttactagattagatttttagatttaatttatatttgtagtggcataacgaatgctcctctgactgccccgaagaataaaatagattgcaataaccacagttgctcagtttgttcgcttttttaaaatctaccaattgaaaatggcgattaatggagtcgatttacaatagtctgatccacacaaatcttttcatttttccacgctcctccaacgcagctggttcacccacaatggagccggacccctgcccgtgctgagtggcccacgtgtccgactgcttggccccatcctggccattgaggctgtgactggcgaggattccggcgtctacaagtgcacggccggcaatgtgggcggcgaagctagtgccgagctccggctcacggtggccacgcccatccaagtggaaatctcaccgaacgttctcagcgttcacatgggcggcaccgcggagttccggtgcctggtcaccagcaacggcagtcccgtgggcatgcagaacatcctgtggtacaaagacggccggcagctgccctcatcgggccgcgtcgaggacaccctggttgtgcctcgcgtgagtcgcgagaaccgcggtatgtaccagtgcgtggtgcgacgacccgaaggcgatacgttccaggccaccgccgagctgcaactgggtggtgagtccatctaagctgtaaatattagtgggcaaaaggaatttaaatttatgatttgaaccataactctattgtgaagtaaaatctttaatatctattcccatttttattgtaagccgcttattttaattccttctccgacttacaaacaattctattccccactttgaaatcctttatgtattagagcatctaatccccctcccggattggaccagcttatggttaaattattaatgtgacctcttgccaccacattctgctccccagatgcgccgcccgtgttactctacagctttatcgagcagaccctgcagccaggaccagctgtaagcctcaagtgctccgctgccggcaatcctacgccgcaaatttcatggacactggacggatttccgctgccatcaaacggaaggtaattgaacttgttgaaaaggggcgaaatgggggcatagtaggggctttgaagggggcctgccagtggggtggggtttccgtgatgggcttggcaatggcaacggcagaggcggcgctgcgggcgcccagcaaaaatttatctcaactgcggctcccgactgtggctgcggttgcatttattgcactcgttgtgtgcgtttgtttgccttttgctttttccctccataactttttttctcattttctgtattttttgtttttttttttttttgttgctgctgcctgcgctttcctttcaaaaacattgccccacgaatatatagaaaaacatatacacacatatagaaagtggctgccgcgcctacaaagttgggtggtttgggtcggcctcgtctgctccagcgttcattcactcctgttccggcgactgtaagtgtatctgtatctgaatctggtactgaatctgtgtatccgtgtttgctgtgtctggtccaaggttccggactttgcctttctatttgttaattaagtggccgctcgccaagcaaaaccttacgcatttaattgcatttttagctggcccgctgccaactgaattgaatctctttaatgacattgacatttgcattggccgcataaaatcgaagcgatcggctcaaatcgagaccagacttgacaaacagttggttgcctccattcgtttgctagcaaataaaatgcagcagcgaatcgattgattggcaatttggtcggcgacattgtcagttgccattcatttggcttttatctcagtcccttacctgctggaaaataaaaacccttctttttgttttgtatttcgttttttttttttccggcagtcctgcttcatttgcagtccgttggcagctgccactaattgtttgagttacgtctgtaatgatttgcaagtcaaacttctgttgacttttcttgttgattaaaaaataccagcagcatcatgaaaatcagcagcgttttatt

SEQ ID NO: 36317 - DNA, 1305 bp, DROSOPHILA
atggagccacccggtcgtgtggagttttcgaactcctccggcggctggctggactgctcggcctccggaagtccgcagccgacggtcgactgggtgcacgcggatggctcggcggtgaccgagatccatggagtgcgacgtgtcctgcgtaacggaacgctcgtcctgatgccattcgccgcggccgcctaccaccaggatgtgcacaacacgatctatcgctgtattgccagcaattcggtgggtcgtatcgtctcgcgggacgtgcaagtgagggcggttgtggcccaggcctacaaagtggacgtagaggtgctatctgccgcaaggggatgcaccgccattctgcgctgcgtggtgcccacgttcgtcaaggaattggtacgagtggtctcgtgggttcatgaacccgctatctacatctatccctcgttgcaaggcgatggcaaattccacttgctgcccaccggcgagctgctcatccacaatctgcaggagagcgatgagtcgcagtccttccgctgccgcagcatgcaccgcctcacccgtcaggtggtcgtcagttcacccacccgactgcgtattaattcgcatcgcggcatcatttcgccgagcgtggtggagcacacggctcatgtgcaggtgtcgcaggacgagggcgcggtgctcctgtgcgtcgcccagggctgtccttcgcccgaatacagctggttcacccacaatggagccggacccctgcccgtgctgagtggcccacgtgtccgactgcttggccccatcctggccattgaggctgtgactggcgaggattccggcgtctacaagtgcacggccggcaatgtgggcggcgaagctagtgccgagctccggctcacggtggccacgcccatccaagtggaaatctcaccgaacgttctcagcgttcacatgggcggcaccgcggagttccggtgcctggtcaccagcaacggcagtcccgtgggcatgcagaacatcctgtggtacaaagacggccggcagctgccctcatcgggccgcgtcgaggacaccctggttgtgcctcgcgtgagtcgcgagaaccgcggtatgtaccagtgcgtggtgcgacgacccgaaggcgatacgttccaggccaccgccgagctgcaactgggtgatgcgccgcccgtgttactctacagctttatcgagcagaccctgcagccaggaccagctgtaagcctcaagtgctccgctgccggcaatcctacgccgcaaatttcatggacactggacggatttccgctgccatcaaacggaaggtaa

SEQ ID NO: 36318 - protein, 434 aa, DROSOPHILA
MEPPGRVEFSNSSGGWLDCSASGSPQPTVDWVHADGSAVTEIHGVRRVLRNGTLVLMPFAAAAYHQDVHNTIYRCIASNSVGRIVSRDVQVRAVVAQAYKVDVEVLSAARGCTAILRCVVPTFVKELVRVVSWVHEPAIYIYPSLQGDGKFHLLPTGELLIHNLQESDESQSFRCRSMHRLTRQVVVSSPTRLRINSHRGIISPSVVEHTAHVQVSQDEGAVLLCVAQGCPSPEYSWFTHNGAGPLPVLSGPRVRLLGPILAIEAVTGEDSGVYKCTAGNVGGEASAELRLTVATPIQVEISPNVLSVHMGGTAEFRCLVTSNGSPVGMQNILWYKDGRQLPSSGRVEDTLVVPRVSRENRGMYQCVVRRPEGDTFQATAELQLGDAPPVLLYSFIEQTLQPGPAVSLKCSAAGNPTPQISWTLDGFPLPSNGR

SEQ ID NO: 36319 - DNA, 2663 bp, DROSOPHILA
ctccttcgttgttcgcgttgtcataatcgcatttgaattagctgtgcacacgaggcgcagctgaggattctgaacagggtgcataaatgaataatagtaaaattaataattgataagacaaataaaataaacgaagatatgaatttataatgtacaaatacgattcacagatttactttattccacctatatatacaaatatttatatcatttcattcgtcacaatagagaacattcattaaaatatatttgaagctaaatttatatttttatatatatttatactagaatggaaattatatttttatgtgataggaataaaaaagtaatatttaacatactatcgaagtagacaaagtaaaaatataacttaatatacttttatttatttctttgaattcaacgattcaaaattagttagttattctagggaaatctctgactaaaatagtatctgctgcaccctgttggaaagcccattccatccgcttggcaccgtctgcgagcctaatgtgccacttaagacgcatttattgtctttcgttgctgctgccggcgttcttgccgcgcggcggctgttggtggtgccgcattttccatttaattgacgccattgttgacaaaatggcggtcgtgtgttggctttcgctgcaccgctttccaagcccaacttgcaccagccacaagccattaatgttaacgcatttttcgcctagattctggggtaggatgttggcatggatgcactcgtgtttctggtttaccaaaggcgacatcctccagtcggtggagttaaagggggcgtggcgacgacaagggcgcaaatcacttgcaattagtgttaaaaattcaacggagtaactagattgttcatgtgagcagatatactcgaaagttgacagtgattccagttgatcttactgaaaagcactatcagtggtaatcattgaattaacttgatttattcaagtcgtaacatcagtttaaaaaaaaacccttttcaatactccacatccagagcatatgcatccagcacactttcaccccttggacaatccgaatagcgagctaggcaatcgattccagcctggccagctgctaaagcctccttgtaggccacatccaagcgcgttttaccaggtctattaagtttatatagatttataattcttccattcaagtaatagcattctaaaactgcaacttacgtgagtagaacgactagtagctccgccatgatgcccacatggtgatgcacctgcgcattttcacagatccctcgcagcaaacagtgacgacctcgaccaggagatccactcacttggtccatatagttctccaaggcggcatatacgaacaggcgagtgtcgtcctcgtgcgtctcatccaagctcctgatcttctcctgcaacgaacgcgcatatatcgtctcccatttgtcccagggatatagtggtgccgatggcagggtaaatgccccgaaatgcagcacatagtagtagaccaaactgcgccagaccacgggatcctcgagctgagtggacagcacgggacccactaccaaacggatggttcctccattccggtagatcaactgatgcctcttctggcgcgcatgcatatactccgtaatattttggccaactggagcagctactaacatatacgcactcctaaccacaggtaatgaacaggccaataaatatatccaagaaaccagttgcattgtgtggaaaaacgtctgtaggtggcacaataactttcgagaatgaaactcactggaatcgatacccatttgtgatgctgaaaattaaagcattatggactcaagcaattagcatccaaattgggttataaagacatccagatctgctttacattttcgttctgcataattaattgggtaaataattacagatacatttctacatatcttaaaaacacaattcaaaaattctttcttaatttgaacttctattaacataaggaatttattgtcatgtgtatttatttaatattatgtcgtcatagcacattgatttatagtttagtatttatattttacatatacaaaacaagaataaaatgtatattcccgcaaaatttaaaatatcgcttaagaaatccctgcaatgttttctatgttcttaccgccatttctggtatttcagtgaatgtacgcaactggtcactctagtattattaactaacaaaataaacaataacataaccaaggatataaaggaaactgtagagcagcgatgaacgccgtgatagcgctgtgccacttttgcgaggcgcacggtccctgcgccatcttctgcacccagacactgagggacaccaagctggaggacctgtcactggaacagcagacgcaaaagacctgctccgcctgcaattactccatgggcaagaataacaatgcgatctacagcagggacacggaaagcggggccacattcgtcagcaccaaggtggcggtgctgccggaggtggccagtctggtcaagcaggcggcggtgctcagtctgagcaatggtacggatgccagcaaggatggcgagttcgtgttctttggcgattcgtccaggggtcacatcctgagtcacaccttccgagtgagcgacctgcaggcccgcggctactcgcagctgttctcc

SEQ ID NO: 36320 - DNA, 597 bp, DROSOPHILA
atgttagtagctgctccagttggccaaaatattacggagtatatgcatgcgcgccagaagaggcatcagttgatctaccggaatggaggaaccatccgtttggtagtgggtcccgtgctgtccactcagctcgaggatcccgtggtctggcgcagtttggtctactactatgtgctgcatttcggggcatttaccctgccatcggcaccactatatccctgggacaaatgggagacgatatatgcgcgttcgttgcaggagaagatcaggagcttggatgagacgcacgaggacgacactcgcctgttcgtatatgccgccttggagaactatatggaccaagtgagtggatctcctggtcgaggtcgtcactgtttgctgcgagggatctgtgaaaatgcgcaggtgcatcaccatgtgggcatcatggcggagctactagtcgttctactcacacctggtaaaacgcgcttggatgtggcctacaaggaggctttagcagctggccaggctggaatcgattgcctagctcgctattcggattgtccaaggggtgaaagtgtgctggatgcatatgctctggatgtggagtattga

SEQ ID NO: 36321 - protein, 198 aa, DROSOPHILA
MLVAAPVGQNITEYMHARQKRHQLIYRNGGTIRLVVGPVLSTQLEDPVVWRSLVYYYVLHFGAFTLPSAPLYPWDKWETIYARSLQEKIRSLDETHEDDTRLFVYAALENYMDQVSGSPGRGRHCLLRGICENAQVHHHVGIMAELLVVLLTPGKTRLDVAYKEALAAGQAGIDCLARYSDCPRGESVLDAYALDVEY

SEQ ID NO: 36322 - DNA, 3100 bp, DROSOPHILA
tatgagctccgcatcctttagcgacttttgcagcttctggatctcacggtcctaagcgggaaaatccagattataccttatttttggggaatgcaaaacttctacttacgtgcacctcgaccttagcgcgcagttggtccatcgcctcctccactttcgcctgctcctccgccagttccagcattttgcgaaattcctcatctttggccaccagcaaatccaacaggtccaccaattcggtgctggagatcttctggtgcgcctgctcgatcaactccttggcaatcatctcaatgtcgtcgatcaggagcagaaggcgctcttttgtgctcaaatgaaacgacattatcacggcaaatcgtttgtgctaagcaataattgcaatttgtttattttccacaccgcaatgtggccgttcttcgattgctgaaatataccgtatagtattccggagcgctgttaataccacgttgtaaaaataccgtaacagagaggttgccagactaataggagttgccacatgggttatttcatacactcaaaaaaaagggaatcaagtactcaaaagcaaagagtagaagagactgttcaaaaataaaacaaattcgcagcgttatctctagtaggtattatttgcttgtttatttctcgtgtgttacaattgcagttacaattttagcataaaactcttctgttgattagccaaatcaaacctaacaaaccttctcaaatatggcagattacaatactctgttgcatcctcgcgttcgcgtctcccgtcagtttcactcttaaaacatacaaaccagcaagcaacttgcagcaggtacgttggaggggccttgttaataaccgtttagaactagtagatagtcttacaattagttaagatataagtggtttatatgtggctattcatatttcttctccgcccaaaggatcccctttcatcaaaccgcatatgtatgtacatacatacatatgtacatatgcataacaatcagtatcgctggctctcgcgatccgagtatttgccactcagcttgctaaccgaatagcgatccgagtaggcatcgtacttgtccgccttgtagttgatctcctgcggcgtgtatccgatattcttctgccagtgccgcgtccagtagagatcctcgttgcgcacctgcgatggcgtcttcgcatcccggaacacgtacacacagtagatcatgcagccgattagcgtgaggaagccgaagaccaggaacacaattcccagtatccacacgtacagtggctcatagaactgcaccacaatgacgaatcctagcgtcaccaggatcaggcccaagttgagcaacagcatcagacagcacacgcccttgacattggggcaaaatggattcggcgcggacatggtttccactttggcgcctcgccgagtcgtcgagcgcgcactgcgtccggttttggccgtactggccacggagtaaacactccgtggagctcctcgcgacactggacgctgactgtagcgactgtaatggatgatagatagtttagatatgggttatatgctatatagttgtaacaacgcacctgatctcggagggcgccttgtaggcggcactggtcacatagatgtcgctgccggcgtcaccagcctggtcatagctcagggcggacggagcacgcggtggctggcgcgtgggcggcggtccgctgagggagcgaggtcctccgttgtccggcgaactggagaggcccatctgactgtggctgtagctgctctgcaggtgctgatgctgatggtttccattcgaggatgaggagcgcttcttgcgcgaaccattgtactgcggcgagatgcgctcgtgggtcaacgtgtactccgaataggtgcgctccgagggcgcccggtgggagtgggtctcatcgccgtcggtggaatagccgcggttcgagtggacgtagggcggatccggagtgaggcgaccgtgcgtggccacataatggctgcccttcaacctgtaattggatcgcaaatgttatcgccgctgtattagccgttaagtggcccatccgcgctactcacttcttcacttgtctctcgtgcatcctgtatcttttgctccgcctgtatctgtatcttttgctggctcttctctgcggctgattgactgctaatggacccgtctagcaattcctcgaggtgcctgcaatgggtaagtaaagcaaaacaaacacacgatgagctcgacttcatggcaattaggttttggcttcactttatcgactagcttagaacttttaattagagcgatgaaagttttattcgactgcagacagcagccatattcaataaaataactggtttgtttgaatttcacaagcgtaacgtaaagtttcatggctctgggttctctgctcgttgtaaaagtttaatagttaatatttattaaaattacacataaactcgagagcaacatctggatcattaaaaattttaagcaactccagagaaaatgttttttaattgaaaataatgcgataccctgctaatattaaacacgcgacaaaggatcataaagaaggaggtatttcgataagctggccgtccatggagtagattctctgcatccatgaattccattttgcaatcaaaacagaccttaaacttcccttacgccttgcataacttatatcaatttatggttcccgagcggaggacacacccagcttaatgattggaatggcagttcgttgcacttttccgttaaattcgcccccatatcccataccaatgccaaccatcctggccaccaggaacaccgcaggcactcagccaagttggagaaattcgttcgttcgttctttcaagttcatggcagagaaattgaagttgcccgtccttcgcattcgccattcgccggcaatttgtcacttggtcacgtagtgctcggttctgggtgcgtcactccaatccaagccaacccgacccaaccgaaccgaggtgacagttgttaaaagggagcgccagcgggttaagggcaaactggttacatcggccgcaaacttaatctctgcccgatgttaccatgcatttgtttacgcaccc

SEQ ID NO: 36323 - DNA, 972 bp, DROSOPHILA
atgcacgagagacaagtgaagaagttgaagggcagccattatgtggccacgcacggtcgcctcactccggatccgccctacgtccactcgaaccgcggctattccaccgacggcgatgagacccactcccaccgggcgccctcggagcgcacctattcggagtacacgttgacccacgagcgcatctcgccgcagtacaatggttcgcgcaagaagcgctcctcatcctcgaatggaaaccatcagcatcagcacctgcagagcagctacagccacagtcagatgggcctctccagttcgccggacaacggaggacctcgctccctcagcggaccgccgcccacgcgccagccaccgcgtgctccgtccgccctgagctatgaccaggctggtgacgccggcagcgacatctatgtgaccagtgccgcctacaaggcgccctccgagatcagtcgctacagtcagcgtccagtgtcgcgaggagctccacggagtgtttactccgtggccagtacggccaaaaccggacgcagtgcgcgctcgacgactcggcgaggcgccaaagtggaaaccatgtccgcgccgaatccattttgccccaatgtcaagggcgtgtgctgtctgatgctgttgctcaacttgggcctgatcctggtgacgctaggattcgtcattgtggtgcagttctatgagccactgtacgtgtggatactgggaattgtgttcctggtcttcggcttcctcacgctaatcggctgcatgatctactgtgtgtacgtgttccgggatgcgaagacgccatcgcaggtgcgcaacgaggatctctactggacgcggcactggcagaagaatatcggatacacgccgcaggagatcaactacaaggcggacaagtacgatgcctactcggatcgctattcggttagcaagctgagtggcaaatactcggatcgcgagagccagcgatactga

SEQ ID NO: 36324 - protein, 323 aa, DROSOPHILA
MHERQVKKLKGSHYVATHGRLTPDPPYVHSNRGYSTDGDETHSHRAPSERTYSEYTLTHERISPQYNGSRKKRSSSSNGNHQHQHLQSSYSHSQMGLSSSPDNGGPRSLSGPPPTRQPPRAPSALSYDQAGDAGSDIYVTSAAYKAPSEISRYSQRPVSRGAPRSVYSVASTAKTGRSARSTTRRGAKVETMSAPNPFCPNVKGVCCLMLLLNLGLILVTLGFVIVVQFYEPLYVWILGIVFLVFGFLTLIGCMIYCVYVFRDAKTPSQVRNEDLYWTRHWQKNIGYTPQEINYKADKYDAYSDRYSVSKLSGKYSDRESQRY

SEQ ID NO: 36325 - DNA, 2201 bp, DROSOPHILA
ttgtaattatttaccattaaatgcaaaaaactcgagcattggggacgcccgcagagtcggccaggcaataactttactgacttggccaactcactacttcgtccttcgtcctgttttctcatttctcgatccgctttgcggagacccgccaagcaaatcgcatttatttgtaattatttaccattaaatgcaaaaaactcgagcattggggacgcccgcagagtcggccaggcaataactttactgacttggccaactcactacttcgtccttcgtcctgttttctcatttctcgatccgctttgcggagacccgcgagatttgaccggtttcaactcaatcacagcaggagagaagcaaccttattttccgctactagttgaaacttttgttatgatggcgtaaccttgccatccacccactttcattcccactgggttgctgctcaagtttcattagttgtgcactgggcgtctaacaattttcttactgctaaattaaaaacgataattgaaaaatgaactcgtgttaagccgggctcggccatggcagaattattgggaaattccttttgaaatggcaatcagaaatgaggagaaaaagtagcacatttttaattgaattttgctaccctcaacaatgacttgggagcttgagtgctgggaaatggaatgaaatatccccatccacccccttgatttcgttcaattgcaaaatctccaaatcccagaatgtgcttccttgcctttgtgctgcccgaaacccaaagcattaatcattcaaattgcaaaacgtctcaaagcgtaatgccggcgattaagcctttcaatcatgtggtgtccccgccccgaagcaaaaatgttttcggtatctcctaaatcgccctaatttgtgtaatttgcaactatttgcataagtccccgtgacccaaacctaagctccatcccaaaaatctttcaaatcataattgtattcgaagcagctgcggcaggctaactaactactcatcccagaatattgatttatttacctgtccacctggagccggtgcgcccaccgtattggcaatggtgtgcagcacctccgcatacagcttctccttctcgtcctggcggtcaatggactcctcacccgccggcggatcacgttcgttttcgggattagcctcggcacgtgcttcggcggcacgcgtggccgacatgcgacgattttcacgtttccagcccagcgatgtaaagttctcaaagtacgagccgtccgtttcctgaactctgtgtgaagggaaacatgcaataagggtataaaatagggttatatattggaatacatatgtgtgcacttttatggagtctcactcactcactcactatctatctatctctctctatgctgattcgatatcaaaggggatattcaaatcaactgctgccgctgtcagttggatgtccaactttaattggcactgtcaatatgccgttgccgacatacaaatgtgacagtgccgtacctatttcaattttgataagggtcgtcgcctgttgccgcgtaccactcggcgtatgcttgatgccaccgaaccagaggcttgccttgagccgctaattgtatacaaatattcagccgtttgcacacagaagaaaaaaagtctgtgaacccaactgagttactcattaaaaaaaatatgtaatacatttcgagagatttacaaattctccaactgaagtttgctgaaaattatacaaggatgggtgcttaaagcccagtaaactttttccaaactatttgtttccagtgcatgctagattgaaactttttagctttgctcctaactaggactattcccgatagtggatgctcctaatcatttgatttgcatgccccgcactcgggcaaaagcccatcggatttattcgagcagctgtggcaggaaaaagaaaatttttgccaaaaactttgtccactcagcagggaaaacagctaagcggcttaactttgtcgccggcgttgatgattttttacgtttacgtttatggcacaaaataaactgaagagctcacgaaagtaggcaacaatttctgtcggcactttttcctgtcgaccccgaaatgttgggaacacctttcggtgttcatctagacaaatatataaataaatatatatatatatactcatatatatgtgggtgagtgtttgggccggaa

SEQ ID NO: 36326 - DNA, 201 bp, DROSOPHILA
atgtcggccacgcgtgccgccgaagcacgtgccgaggctaatcccgaaaacgaacgtgatccgccggcgggtgaggagtccattgaccgccaggacgagaaggagaagctgtatgcggaggtgctgcacaccattgccaatacggtgggcgcaccggctccaggtggacaggtaaataaatcaatattctgggatgagtag

SEQ ID NO: 36327 - protein, 66 aa, DROSOPHILA
MSATRAAEARAEANPENERDPPAGEESIDRQDEKEKLYAEVLHTIANTVGAPAPGGQVNKSIFWDE

SEQ ID NO: 36328 - DNA, 2270 bp, DROSOPHILA
gccaaagccagccatgttaaaccaggatggtaaaacttcgctggcagctcgggctcttcaggacgcatttcacactttcggctcatcaaaaactcatatttctttaagcaatctccagagtaaacctcattttcgggtttaattaaatgtaacctgtgatccgcactcgcgttgagcgcacatttcccggttaagcagatgccgatttatgcaaagtgctggaaaagctgccttttgagaccacaaagatggtgctgcagcgactggaggatgttgcacctggatgccagatgattctcggctgcattgagagcaatccaaggacccaaaagaggcacctttaagcccaacgaacaagaccttctgtatttgtatgtgtgcgtgtgtttgtgtaggttattcgcaaacaaacttttcgacactcaaaggtttttttcgcccgcatccaaagttgccatggtcctaggaaagtgggcggctgctgaagtttctttccaatttcgacgcccaactaactgaaggaacttttgtaattacgtaattatgaaggtcgagcgataaagtttttgtttggcaattcaaaaaaacaaatcgaaaaacacaactgtgaaattgaagtacattaattaattggtatgtatgtaatttattttagatttgacttcaagcgccccgcccttcaaatccccaaagaagctcattatgccgcaatgtttaatttatgcatttcacattcgaataccttttgcatgtgtgtatgtatgtgtgtgttttggtgtgtaaatatctggcagccaagttggggcaaaatattagcatattcatctgtgggttaattacctccagcaaacatgcgcctccacccattccatctgcgacccaatctccgccagcagacaggcattaaatttgccaaatccattggcacttcatcaactatgcattaagggcaccggacttggatttggtctcggttctggctatgattatgactttcgacttacccggaattggagcgcggatccacttcgggccagctcaggcggcgtttgcagaaggccagcggcggacgtggcggcggatccggttgatgcagtggcgaattgcgctgcctgaaggatccggtgcggggtggagccaggcattccagggcccgtgactggcgacgcgactggggcgtgccacctggcccaacggagccggatgtcgagggactgccgggtcccgcggcaccacctggtattttggggtaacctttttggggaaacatgagaaggggtaaaagcatgagctgaattacataaatcaatatggagcaggtgagcaaaagttaatatacttatttacaataatatggtttgtatttggtttgactttcatgcaaaaatataaatcttcaaaaggtacaaagaaaatagacacgtgtttgttttcccttagttttcaccatgcttctgtgaactttcttcacatcgaaataagaagattgaacaaagtcatacgaaaagtttgatcttcgaaactatttgccctgtgcaatatcctataatttcccgcaacatgcaaatatctatggaatacagctagctgatggcaccgcgctcatggaaagtcaggtgtgtaaggaacgacgcagtcaaagtcaatgtggtgcgatgtggttccgtgtggtgcagtggtccgtgctgaaggcaacggtagtggcaactgcaacggcaatgcaaccgcagcccgcaaccttgacatgcatctgtgtgggtgctgcggctcctgcagctggtcctggttgccactcctggctgccaaggactatgactacggaggcagagagtgcctgtggtgcggggtttcggatggaaatagctaaccattgatgtggctatgaaaagaatgttttatttttttttgtctggccaagtagcggtgaagccgggccaactaaaaaatttcaaagaaaagcaaagagaagaatacgaatatgcgctcgaatttcggtttggtttaaaagtgtgcacaaggcgtaaagtcaaagttggactgcattggactgcggaattgggaaaagcgcttacacacgttgatgggatatttttttttttttttttcatggaaacgacaattccccgttggcagctgtttggccaggaaaaaccgctcgttcgccgctcgtgcaacaagataagccaatttcaagtttgattcaaatgctgcagacgtcggtgaatcaaaatcccagccaaatggcaagtcaatgtcgttggcaatggcga

SEQ ID NO: 36329 - DNA, 270 bp, DROSOPHILA
atgtttccccaaaaaggttaccccaaaataccaggtggtgccgcgggacccggcagtccctcgacatccggctccgttgggccaggtggcacgccccagtcgcgtcgccagtcacgggccctggaatgcctggctccaccccgcaccggatccttcaggcagcgcaattcgccactgcatcaaccggatccgccgccacgtccgccgctggccttctgcaaacgccgcctgagctggcccgaagtggatccgcgctccaattccgggtaa

SEQ ID NO: 36330 - protein, 89 aa, DROSOPHILA
MFPQKGYPKIPGGAAGPGSPSTSGSVGPGGTPQSRRQSRALECLAPPRTGSFRQRNSPLHQPDPPPRPPLAFCKRRLSWPEVDPRSNSG

SEQ ID NO: 36331 - DNA, 2444 bp, DROSOPHILA
gagccaaagcggaaacgaagccgcacaagaagtcacatatgcatgctgattgctttcgcttcgccagctatcatacactgagagaaacaagtgctgcacgagcaagatagttttgtttatttaaattaaagatagaagatcctaatagttgtgctcttatatctttagatgcaatttagttggcttggaatggtttttgctattatacaaattttttccaaattttaattctttgtgtataagccactatcagccaccagaaccaactggcaccccattgcggtggttttgtctgcacatttgttgatccatatgcgagaggcgttgctggccaaaaacattcgccgattgggaaactttgggcgcatttggcggatgccaagacatgtaatgtaattttcatattgagacgatagcgtctggcggattcaataaacttttccatgtttaccatctttgcggcacgcataaccaaacaaattgtttttatttatttttttttttggccaagttatggcagctgatggaaagtaaaagtcaactgagagccaagttaagtgcatcttgggtactttttatgcgtaattctgtacacgatttctcgataagtccggagggttaaaaccacatcggaaaactctattagcaaggctgttttatttttgtttggaaaccagccaacccattcttactttcggcgagtatatgacctttggcaaggcgcttaagaagcttaagcttttatactggaaaaaaatgtccagaaaacatgcaaatcgaatatgggaaaaactaaatataatatgcacacaaaagcctcaattagaatgatttaaatagtaattcttaaaaatatgttgtaacctattaactgtaatcggattaaaataaatcaatgtttttccaataactaatatttactttaaatgtattttcccatgtttaaataaagtacattagtaaatatacaaaaaaaaaaatatatatatatatattagtatcagaactcacccagtaatggattggtggcatttggattgccgattaccaccccgccggatgggtaattactgccgcacgtcgaagatgccaccactccggtgggcggggcaggggttccatagacgcccagtccgctgccaatgctcgcctgttgctgcaagggggcgtggccatgttgttgctgcaactgctgttgttgttgctgttgttgctgttgctgttgctgcggaagtgactgctgtaatggctgctgcggaaacggcacctgctgttgctgctgctgctgcgcctggccggaaacgaggccgccaggtatggcgcctccgatccccgactgctgttcactggactcctggcgggaaagcgagaagcgtcgattgcccaggcccaaactcgagatgccacttgttacatattgctgcatggagctgaggaaactcatggcggcatctggctttcttatctggctggctggtaattggctcaacttgttactcctcctccgcgtcgtttttttttttttttttttgcgaaattaatcagttggaaacttgcgcccgggatttgcctaccccgattataaattgttccagactcgcgccgtttttcgcttatcgaggctctgcaagaataaagacgaaacgagatgtttgtttaaggtggaaaacttctgcaatccgctggtgaattgtattcagctattttcgggcaataattgaacttcgacccagggacttgaacggaattatgtgtatgtatgtaaacattttcgttttcaaagtagaacagccaaacgaaatgcttttcatttgccttttcgacatactgctctagaaattccatgggagccaaacataaaataaaaaaattaattaagccaacttgtttggcacttttatagccaatgcattctaggactgtgattcgaatcgagttccccaatgtccccgatttcccagtcaaacattatatttgtctttgattcgtttcgtcagcagttttgttgacctaccccgccccgcctctcctatttgctcattcaaattctgtacaaatatcaagaaggtgggatggaaggacgattgcatttagacagacattcatcgattgattgaagcgtcgttttgttcacttcaaggcacagctcttaattaaatttcttttgaagtacgcccccagtatcgctggcctaattaacctttaatcagctgagcctaatgagccgtttttggattcacggctaatcgatctgcatgaataattgggcaaaaggtaacaaggacgagttgtccttgtccataaattagccctcatatatggcatcgcacataaaataataacaataattatacgaacaaaaataaacgctggaccaagcagaaaagtagttaattaattagtttgccaggttttggccctcatttatggatgagcaaatcggc

SEQ ID NO: 36332 - DNA, 444 bp, DROSOPHILA
atgagtttcctcagctccatgcagcaatatgtaacaagtggcatctcgagtttgggcctgggcaatcgacgcttctcgctttcccgccaggagtccagtgaacagcagtcggggatcggaggcgccatacctggcggcctcgtttccggccaggcgcagcagcagcagcaacagcaggtgccgtttccgcagcagccattacagcagtcacttccgcagcaacagcaacagcaacaacagcaacaacaacagcagttgcagcaacaacatggccacgcccccttgcagcaacaggcgagcattggcagcggactgggcgtctatggaacccctgccccgcccaccggagtggtggcatcttcgacgtgcggcagtaattacccatccggcggggtggtaatcggcaatccaaatgccaccaatccattactgggtgagttctga

SEQ ID NO: 36333 - protein, 147 aa, DROSOPHILA
MSFLSSMQQYVTSGISSLGLGNRRFSLSRQESSEQQSGIGGAIPGGLVSGQAQQQQQQQVPFPQQPLQQSLPQQQQQQQQQQQQQLQQQHGHAPLQQQASIGSGLGVYGTPAPPTGVVASSTCGSNYPSGGVVIGNPNATNPLLGEF

SEQ ID NO: 36334 - DNA, 3224 bp, DROSOPHILA
ctgaagcaaaactatgtaaattaaatggaaacatgcactctttgtttttttttaaattactctttctttgtctcactctcgctctcccgcttcctctcactcgatttttgtaatatttaaccaaacgcaaagaaagcgcttttctccctctgccaatggctatatctgtatctgtatctgtatctgcgtgcatgtatctttctgtgcatctagaactcaagggcacccccctaccgcgcgcatcctatttgtggggcttccagcgggtaatgcaccttttaccaatcgggctatgtctttttaactacctgttgcagcggaacagcgacgaccactggagatgaacgaacgcgacggactgaactgaactgacgcggcagcgcctgttgccaacaaatcggacgacgcgtcgccacagagcgtgatggagctgcccgaagagagagaggagccaacggcagatagcacccgcgcccgaaagtatgctacttagatactccgaaatctatggcatctgtaagatagatcgcaagggttttctattcaggcaaaatattcctaagcatagtatagtaacttgttatcaatccacaatccatgtaacaccaatactccttcttcaaattatcattattatactagatcatcagtagaatagatgtatctttgagattcgattcgagatccaattgaaataatagggaaactgaagaatggagttctatagaaacctgtctaacctaccaaacttctacctgcgtgtgtgaatactataatgactcattggaaaacgatctttaagaacgccttcatattgttacaggtacataaagatcttactacttcagatactttaatttcgaacgcttctatcttcgctgctactgcagaacactataatgtgcaaatttatatttatttttgagagaccaaaatgccttataaatatacaacaaatgattataataataaaagtgaaagtaaattgggtatgttgggtctacagatttccctgtgcctgctgcaaacgcatcagtcgccgctgcctcagccagggcagcaggagtccacctggacgctggccgggaagtggagctcgtggggcaaggtccattggggcagccagggtgacggcttcggggatgatctcattgcgccggaaaccacggaaggtggcgctaggcctgcgtggcacacgatcctcaggctggcgatcctttttctgcggcacatcctcgtttctaatattcaggctaaagacatccccagtgcgtggatcggaggacagatgactgaccgtatcttgaagcaccttgggtatccgctccaccacctgcaaggcatcgcggagtggccgaatctctcgctccggttgcttgcgcgactgctccttggacgccttgctcttggcgctctttcggaacaaaggactcttcttgttcttccgcgagagtgcatccttcttaagtggagcggggcgagtcagtcgcgaagctgactgctccaggaaccatggttcccgacgagccggctcctccagctcagcctgacgcttgaatgccgatggcttggctgatgcacgctgctgcttctgggctctagtgcccagtggcgagggacgcaccaaggaactggcaaagtcattgaaccactccaggtgatcgacggacctcttgtgccttatctgctccgaagccttggatggcgtttctaagccattggccgtacgttgaatgaccaactttgtggagggcttgtagatggttatgtttgagcgacgatttcgaggcgactgcattgaagtgctggcgctcctggccaccagatctcgcttctgctcgaactgctgtgcgttgcgcacaaagcgattgctgctcggtccctggatgacgatttcgaatggtagattcaacgtcttggcattcatctgcatggtgcgaatgcactcagtatcggattggtcgtcattacactcgcacaggcactcctcgccgcagtagaagcccaaacagccgcaatgctcacacagcgccttgcaattcttctcgagcttcgactccgtcaggggattcacattgcgactagctttcgtggatgtggccaatgtcgatggcggtttggttgtcgtgctggacactacacttgcttggaactgaatagcagccagtagaagtatcaccgtatagccactgaggctgctcttccgtatcttttccgtcatcattgtgggtgctccagttcaaactgtctggccaattgcgatgcgcaaccgattttataacgctgaccaggtgaaatcgtagatgttcgtgactgacagttgattctagcttacagttcgccggaatttatgctgacttcgtgtgatcttgagacatttcccaattgggttctctaattgagttctttgtgccggttttttttggcacacttcggcgtgccaaggccgaattcccgcacttgaacttggcccagaacacacataaatctttgtttacagcgtttattacaaaagaaaccaaacaacgagttgccactgaagtcattagcggcgcttgccctttcccttcttgccgccaccaccacccccagatccggatgcattcgactgtggctgcgactgctggtggtacgagtcgccggatttgttctgtcgcgtcttcagctgcggtatcttgctggcgatatgcagcatgatggactcgcgcgtgggaaagtcattattgtacaaagtgccatcgacattacgcagctggacgcgcacacgaccacggaactccatctcgctgctgttctcgcgacagtacttcttgttctccatgaggaactgcaagttggaaacggacagcacatcgcgaatctcaatatagctgggattgtctacacagttctccttgggcagccgtcgaccctcctggcgtgtctttttcctattgatgtaggcgggatatatgcaaatccatctgtgttaacaacaataagagttacatgcgaaatcgaactttgtgttttgttggccagtgcctggttcctaccgctccatatcgttgtgtttcatgctggggctccagttttttttcatgggaactgctgtcgccattctttcagtgaattcttggttggtttattgcaattcctgtgtaattaacaaaaaatgagctagaaagctattttccacgcaagcaacccaattgaaatagggatggcacgtgcagctggccgag

SEQ ID NO: 36335 - DNA, 1224 bp, DROSOPHILA
atgatgacggaaaagatacggaagagcagcctcagtggctatacggtgatacttctactggctgctattcagttccaagcaagtgtagtgtccagcacgacaaccaaaccgccatcgacattggccacatccacgaaagctagtcgcaatgtgaatcccctgacggagtcgaagctcgagaagaattgcaaggcgctgtgtgagcattgcggctgtttgggcttctactgcggcgaggagtgcctgtgcgagtgtaatgacgaccaatccgatactgagtgcattcgcaccatgcagatgaatgccaagacgttgaatctaccattcgaaatcgtcatccagggaccgagcagcaatcgctttgtgcgcaacgcacagcagttcgagcagaagcgagatctggtggccaggagcgccagcacttcaatgcagtcgcctcgaaatcgtcgctcaaacataaccatctacaagccctccacaaagttggtcattcaacgtacggccaatggcttagaaacgccatccaaggcttcggagcagataaggcacaagaggtccgtcgatcacctggagtggttcaatgactttgccagttccttggtgcgtccctcgccactgggcactagagcccagaagcagcagcgtgcatcagccaagccatcggcattcaagcgtcaggctgagctggaggagccggctcgtcgggaaccatggttcctggagcagtcagcttcgcgactgactcgccccgctccacttaagaaggatgcactctcgcggaagaacaagaagagtcctttgttccgaaagagcgccaagagcaaggcgtccaaggagcagtcgcgcaagcaaccggagcgagagattcggccactccgcgatgccttgcaggtggtggagcggatacccaaggtgcttcaagatacggtcagtcatctgtcctccgatccacgcactggggatgtctttagcctgaatattagaaacgaggatgtgccgcagaaaaaggatcgccagcctgaggatcgtgtgccacgcaggcctagcgccaccttccgtggtttccggcgcaatgagatcatccccgaagccgtcaccctggctgccccaatggaccttgccccacgagctccacttcccggccagcgtccaggtggactcctgctgccctggctgaggcagcggcgactgatgcgtttgcagcaggcacagggaaatctgtag

SEQ ID NO: 36336 - protein, 407 aa, DROSOPHILA
MMTEKIRKSSLSGYTVILLLAAIQFQASVVSSTTTKPPSTLATSTKASRNVNPLTESKLEKNCKALCEHCGCLGFYCGEECLCECNDDQSDTECIRTMQMNAKTLNLPFEIVIQGPSSNRFVRNAQQFEQKRDLVARSASTSMQSPRNRRSNITIYKPSTKLVIQRTANGLETPSKASEQIRHKRSVDHLEWFNDFASSLVRPSPLGTRAQKQQRASAKPSAFKRQAELEEPARREPWFLEQSASRLTRPAPLKKDALSRKNKKSPLFRKSAKSKASKEQSRKQPEREIRPLRDALQVVERIPKVLQDTVSHLSSDPRTGDVFSLNIRNEDVPQKKDRQPEDRVPRRPSATFRGFRRNEIIPEAVTLAAPMDLAPRAPLPGQRPGGLLLPWLRQRRLMRLQQAQGNL

SEQ ID NO: 36337 - DNA, 2228 bp, DROSOPHILA
acgaccgttacatcccatctaattcttaaacgaattattaaatttttcatgaccagcgatatttgctgccgttgactgttttaatggaccacaaaattgcgtgtgtcggcaaaaaccaaagcccaaggaataacaaacaaataacattggcaaacagtgcaaaatatcgacagtaaaaaccgaaaagcaaaaacagaacccaaaccgaatccaccgaatccgccgcatccgcattcagccaaaagtgatagccgaaatatttcgtgtttgtgttttggcttccgccccaccaaccagaagcccaaaacatcccccccccccgtcctccacatgccacgcccattttcgcattgattttaaaatggaaatgtttaaagtgccgtcggcgaatattttcgcatttaagttaatttctcgcactgctgatggtgctgctgtaattggataattaaataggcgccacaaaatttgttctccagcaatccgaacaacaagcacgaatatatgaatttcaataatatgcattttcaaaaagtttttaatggaatttactgtaaaaaatccgcaacaattaaatcgccaatgaagtccgttcaagtggaataaatgtttctgtttccgtttgtgcgtggatgaatcattcgatttcgtattcgatttcaagtgggcgggtgggcgtcgcaaggttatcagcgggtcagggcgtgaaacaaaaacaacactttttcgaattaattttcaaattacagcgtaatttaatagattaaccaatcgaaagcttttggctaaaacaatggtgttaaattaagttgaaaagcgataagcgcaacaaataatgcagttatcaaattacctttcagcaaagttatttacttaaaccataacattttgaaacccaaatgagcctttaagctcccagaaaaaaaaaacatttgattgcagtgtacctatattttccattgctagcatatccggtggtcaaaagggttcatcaaggtttttaaagaggcgggttttcccagtgaaattgggatgtatacctggtacacctggtacttccaatccctggacttcgcttccggctcgttgcacccatcttctgctgccgcttcttcctatgcgtcttggcatttccacgacagattctacgcttacttgactgaacatcagagcgcgtcctttgcactgtgacctgctgaggcgacaggacattgacggttaacctcattgccgactcgatggatggtccgaattgggccatcaaataggggacttcctcgaacaaggactgctcctggtcactgagtgcgtgccaagcgttgcgggcttccttaaccagtgtgacagctggtatattcttacaatcgcagcctaggcggtattcccgcagaaagttgtacggggcacatttgctgatgaacactggcgacttggagccaatgctatagctgtagtccatcggaatgccgggaatggaggcgaattttatgcggcacgggcgagatgatcaggaaactcaataattttggtaaagtcgtggcactgggaaatgtgttttatcaaatatttaacatcacatctacgaatcggtgtatttcgaaatacaagcgctgctgacatatacgaaaacaaatttcggattacttgtttcgtttcgaaatcgattaggtacatatatgtgaattttttattaccagaagttaactaacaatttgctgctctgcatagtaaacaattgcaattgaaatgccgcactgaaccgctttgcattaatcgagtaatctttggcatattcaggactttatccgcatatccttattacgacgtgtccattgcggagtgaaaaactgtgcaaataattaaagccaaagtgcgatacgtatgacagtgagtgcaacaattatttgattactgtcgccgggactgccagttcccagttcagttccctttgccacgtaattggcggagtgatatatgcacatatacatatatatacatttatatgaatatatatcccaacccccggtaatcgatgcaggaatttcatgggaacagcttgctggccattatgcagcgagttattcataattgttgttgctgcccaagtggcaggaaaatgcataacaaactgaaaaatattcaagccatttttattgccacaccagacgaaccgcacactacatatacagatatactatatatatacacacacatatatatatatatat

SEQ ID NO: 36338 - DNA, 459 bp, DROSOPHILA
atggactacagctatagcattggctccaagtcgccagtgttcatcagcaaatgtgccccgtacaactttctgcgggaataccgcctaggctgcgattgtaagaatataccagctgtcacactggttaaggaagcccgcaacgcttggcacgcactcagtgaccaggagcagtccttgttcgaggaagtcccctatttgatggcccaattcggaccatccatcgagtcggcaatgaggttaaccgtcaatgtcctgtcgcctcagcaggtcacagtgcaaaggacgcgctctgatgttcagtcaagtaagcgtagaatctgtcgtggaaatgccaagacgcataggaagaagcggcagcagaagatgggtgcaacgagccggaagcgaagtccagggattggaagtaccaggtgtaccaggtatacatcccaatttcactgggaaaacccgcctctttaa

SEQ ID NO: 36339 - protein, 152 aa, DROSOPHILA
MDYSYSIGSKSPVFISKCAPYNFLREYRLGCDCKNIPAVTLVKEARNAWHALSDQEQSLFEEVPYLMAQFGPSIESAMRLTVNVLSPQQVTVQRTRSDVQSSKRRICRGNAKTHRKKRQQKMGATSRKRSPGIGSTRCTRYTSQFHWENPPL

SEQ ID NO: 36340 - DNA, 2297 bp, DROSOPHILA
cgcgatcgggattgagttgcagatatagatggagattgatgcctggcgccgacagaacatgtaattgagtgtcgtggacaattatagccgcatctcaagtccccaattggccaaaaagccgctcgagcatctcgccggagcgccaagagatcggagagagagtaaaaccagcagcagcagcagcaatacatatcgcaccgcagcagcaacagcgctgccggcagcagcaacagcagtaggcagcagcagcagcagcagcagcagcagctagcagcagcacatacgaatcctcaacgttagcatttccactcccagtcgcaaagagaccgccctgcaatctagacgtgatcagcagcccatcaataaaaaaaaatacaatagagatatactcgcggtgttcgacaaacaaacaggcaaatacaaaattttttagaagattaattccgagcatcggcgatctatatacaagcgggtcagaaggtctagcagataggaggaggcggaggagtagcagctccagctctagctccagttctccatatcccagccgttaagattcgatacgatcgatacgatcgatcgatcgaccgaacttaaccttaagtgcggtgcgcgtgtgttatttgaaagatctttcaaaagtagtgacagtgcggctttgaaatccgatgccagcggttcagagaatcaacgaaatcctgctggaaaaccgagctgccatggaaacccccgcacgcacgcatatgtgcgcctagtgggtaatttcccgagtctttcgtgttttccgagctgcctgctcgaacagttgataatccgccgtccgagcgaatgcaacgtgtcctggtctcgagccggaaaaccgtgatttgtgaactgtgaaccgaactgtgaactgagatatcgtagatagcgaaaaagtgtacatatacaaatatattattgctctggccaaagaattgtgaaatcgcattcaccgagtgactgagatcactctacgaaaatgacttccctcgtgtacaccgtctttcacctggcctcgctgcaatgttccgtgcgtccggagatctcgccctgcacctgcgaaacgggcaaagcctggaatcatgtggagctctcctgcgagaagttggaatccttcaacgccgtcgtggacagcctggccaataagctcaatgccgacaccaatatcgacctaaagatcacgcactcgcaactcgacgacctggaaatgcgctcgtttacggatatgaacttcaacttgtacaagctacggatgcagtggaacagtctaaagtgagttgagtcatcgattcggtttgcaattttggagagcaggagccaaatagctctataaggggtttcccagctgtggtgtagattctatacaaattcctttgctgaatcactagatttttagaaactgactaaaaagtcgctactttacatttgccaagtatagatagattccatatattgctcacaagaggaacactccttttcatatagcatacatttatgtaagtacagtacagatatatcgttggtagcgtgtgccaatttgtgtagatcgaggtataatgatgtattggggaaattttcctgctatagattcaatcaaaatttctttactgtggcggggagttcaaggccaacagccaagttccgcagaaaggcagaattttccgctcggccggctatcaatttaggttccttaaacccaataaaaaccgagagaaaaataataatgcaaaatgtacacaaatttcaatacgcttatgtaaatgcacgaaaaaatgtgctccacagatcggttcgggtggccagatcttgtttacagccatatacatactacatagatactaaaacaataacaatgtcgtttgtttacgtcaaagagcccagtgccgcctcattatctatggctcaattgggcaaattgcgaaggagatggatggatgtggttggagatggtgcagtcgcatcttaattgccgcccagatgatttaatttttcaattaggaagtagcattgaattgccgctaattcccaactatgggatgtgctgccgtagcttgagtctcgtcgtcttcttcttctactacatcttcttcttgttcaattgataactgataacgcttatcacctacgaagtatttatataggattccgcctatgtacttagccgtatggctgactggaggtatacgacgtatacttaatgcgtacacaaaattgataattgcagtttgttgaaggcgtcttttcaacggcgcctgcacgttttccgactctgactc

SEQ ID NO: 36341 - DNA, 297 bp, DROSOPHILA
atgacttccctcgtgtacaccgtctttcacctggcctcgctgcaatgttccgtgcgtccggagatctcgccctgcacctgcgaaacgggcaaagcctggaatcatgtggagctctcctgcgagaagttggaatccttcaacgccgtcgtggacagcctggccaataagctcaatgccgacaccaatatcgacctaaagatcacgcactcgcaactcgacgacctggaaatgcgctcgtttacggatatgaacttcaacttgtacaagctacggatgcagtggaacagtctaaagtga

SEQ ID NO: 36342 - protein, 98 aa, DROSOPHILA
MTSLVYTVFHLASLQCSVRPEISPCTCETGKAWNHVELSCEKLESFNAVVDSLANKLNADTNIDLKITHSQLDDLEMRSFTDMNFNLYKLRMQWNSLK

SEQ ID NO: 36343 - DNA, 5165 bp, DROSOPHILA
atgttatataaaaaatatacattttcttaagtacctaactaaaatttcatttatgatatttcgaaatgaaagtaaaagtagtagatttgagcaatcttctcagttatttacggcagtaatttcgtgtataaatttattttaataaatatataagaatttcaaaagaattacaagctcaacatttgctattatcctcggtcatggaataagctagtttataagaaactcattgtagcaaatatcgcagcgttcgagggttttatgagtggcctgtggagtttccagagactccaccaattcttttggctttattttatggccaagagtgcctccgtaattctttctcataacccaaggagaggtacgtcgagaacttagtaaggaggctgtataggtgtgcctgccaggactgcaggatcttagggagtgcaatgtggccgttgatcctctcaagatttccagtctggctagcgcagcctccaaatcgcaatcttcatagccttccataacaacttgatccggtgactgagtaaaggactttatactaggtgtattcagactgctcattggtcggattatcacatctaaattgctgctgtctgaggatttagcgctggaagccctggaaatcggtggtgataacatctttgatttggaaacaacagcttttggagtgtctgtctttttaggtgattgaggtgcagaggattgattttgatttgttgaagtttgagttgcttcactcggactgcgatctctgtgcggtaattgctcctttggaatattgtttgatttggtgagattctgaggtagtttcggggcttcatctgattgcataggtagagaagttctaaaaggactcgtttgtgctttataggaatcaaattcatggtacgaatgctctcttgagcgtaccattttcttttccatagcttgtgatttccgaggacttttatcctccttgaaagaatcaaattctatgtaggatggctctctagatttaacagtctcctttactgaaggtttgtgtagcctaaaaggattgtgattggtttccaaagactttagtggtactacggccttagtaaagggcttttgtccttttaagggcgtcctttgagctttaatggaatcaaactcattcaaagatggttctctggaccgtactacatcctttggtaaagtgttggtaatccttagtggactgcgaggatcgaaatccaaataagatgactctcgcgaagaaataatcctggaaggctgcttcttagaagacttttcccttgtcggggttatgggttttactgcccggcgacttccagtgcctagaaatttctctcttccggctatcaagggttgttgaataactccagtgctcattctgcgtccgtatccaggttcctccaccaagggagccggccttcctctaccccaaccggaaacccgttcggcaggagatctttgaataccggaaccaatgcgagtggccagggaaagactgatgcgttcgcgttggggattgaaatcgaaggtcctggaagtggcaggattcgagagcctggaactggaccgggatatactacccgcctgttcggaacccacgaatttggcaaactcccgttgccctctgcgagtgggggctggagttatgtggccgctggacaaatccgattgggaggcactctgtgagttttcaccgctaaaatgaccatcgtagtgattcggcttatccctcagactggtgtgatcctggtaaacggagaacttgttttgaccgtgggcgaagctttcgtagggcttaaacttcttgcttttggctaactgatctgcgaatttctcccactcggtggtgctgggtctatgctcctcatcattcgttttattcgttttgaccaatttgcggcgcactttacgacttctgggggattagtattcagtgtataaaaatttaagtgtggatggtcttttagtgtattaatttttttttttaaatttttggtggtgtgtttagttttttttagtatataagtgagattgtgtgtgtgtaaaagtggtatttgcaaatctttaacgatctcaaaacgatataattgttaatgtattttaggttttaatattatggtcattagttctgcaattacgcacttattcgacaaaccgaataaaatattaatgaacgtataaaatatatttaaaatattaccacaatactacgcacatgactttgctgttgatgttcttgttagttatatttgctgaggtcgcaagtaaacaaaggcagggtatatgatatgtacatagaagtagagtaagtttatttacaatttacatacaagtcaagaaaagagagaggagaaagtatgttgattaggccataataaatgtaaatatcgggatactacgacggaaactacgaatcataagcgaacgttgcaggtacaaactacgcgaaaacttcagggtgcagtggcgctacaggttacggatttgcgatggggctacgggggttacgggttagcgattacggatttgcgatgcttcaggtgctctctaggcttacttactccacggcagcggaggattcggttgcttctgttgctgtagctgatgaaggctcggcagtcgaggcaggtgcatccactgcaggcgcatcagcagcagttgcctgcgagacttcggcacttatcagaaccatctcctccagcgagggtttcggagtcggtgggctctcctcctcgttggccagagcccgttcgatctccggctctggagtggaggtcttcaggctatctgtatcttcctgcattttgggcgtcggtgctcgggaactgctcatcgttgcctctaccggatctgttttcgattcggaaacctggggctcttccaggtgaagaccctccattaccttgtgcttggcctcgtccagagcctgagtgccctccttgaaggcgttgcccagctcagtggtaattcccgccaccgccgtgccaacggtctccttggccgtgtccaaagtggtggtcagtgtttcagaggcgtctgcaaggaaagcacgggaatgaaagcactttcagttgtcgattccgacaggggagtgcttatatataagtagtatataaatgtgcagtaagaaaataataaatgtaataacaccacatttgactagtttaaagaaaaaattttaataattttttaaacgagacatgaaacgtgaattggtgtcgaattttcatttaaaaaaacattatattcgaataattgaagccaatttgcacagtttagtccgcatttaataatagtactttccctcagtgcacatgtaagtataatatttttaagtcaatgtttttgctctaattcgttgacgtctggtcacgcaaccaagtcgtttttcttcatatgcgttaaataaatgtataaaaatatggtcgggtgatggcaatggagccagctttcacttgcgaccctctgaaaggcggccaaatggcgaaaaatcaggccaaaaaaggctccgcggcacgcattgcgctggccaattgtcctttattacgtggcttgttattataataatgtgaagtacgaccaaatttattacatacattgcggctggatgtatcgaatttctttttggcattaagtgggaatttactagattgttggtggccggtaattagatggatttaatattgatttgggccaggggtcaaggactttagtttatcgaagtaggagtagttgctcaatgccatccatcattgttgaactactagtagttgtagtagtatgagtagcacatttagtgccaactaaaaataatccaatgcaattctagaaaccttaacatcaaataattgactttagatctaagactgtccttcgccgaaaattaagtatccgctcgaaatatcaagtatacgccgactgccagcttgcaactgcccttcgaccgcacactcctaaatgtcatctgctggccaacacttaaactaatggccagcacggattggtaacacacacacacacacacacacacacacacacacactaaagcacaagcacacacaccttccacgacggcctcgcccttctgtttgacatggctggcggctttcagcatttcgctgcccgccgttgcaaccatgggagtgctgctggcacagcccatgacttcttctcaattcgagccagacaatcgcggaaccatgccgatcggagcgggaatcgatgtggattgctttagcaacagccgaggatttatttatatcgaatatgaatatgattatgaattgggtataagaaatacgcccgcctttggtcacgaactcaacgcaactgagcactgacccaaaacattcgctgctaaagtgaagggtcagttcggcactcgaccaccgccgacaatccccattcacatccctaccattgccatttactgggcacgcaacaggaccggaccgttctgagctggactggtcaaccggacccatggagcacttggagccccacagtttgcatgtgcgtttgcacttcaagtgaagtgaaattgctgaggtcatgcgcgttgggcgcacacttaccatagtcatagttaaggtagttataggccaaaagctaaaagggttctaggtctgcaacaaaataaggtggggcaccgacgagcgagagcttagaccagcgagtacctgttactgagatgaattatacaaaatttagttcagatgttgaccaatcagtgtaatcagtttgcttgaacacatgtatatatttatttactgaactatatataagatggtttatctaacatatttaggatataatcatagagcttcaatatttagttcaatgttcagtcccatttagggctgcctaaatataacatacttaaaggttatatgtgtaatcgaatgtttaccgatcctgagcatcacttaatggctggcataccctggtagcctatgagtacccgtcaccaaagtgaaaacacaacaagggaaagtgaagaacaaggcttcagatacgaaaatctgtgtgtgtgtgtgtgtgtgtgtgtgtgtgtgtgtgtgtgtgtgtgtgtgtgtgtgtgtgtgtgtgtgagggggtagcgtgtcgggatacgcccagttcgcccgataggtggcgtgcattcgcttgctaacattcctgac

SEQ ID NO: 36344 - DNA, 1359 bp, DROSOPHILA
atgggctgtgccagcagcactcccatggttgcaacggcgggcagcgaaatgctgaaagccgccagccatgtcaaacagaagggcgaggccgtcgtggaagacgcctctgaaacactgaccaccactttggacacggccaaggagaccgttggcacggcggtggcgggaattaccactgagctgggcaacgccttcaaggagggcactcaggctctggacgaggccaagcacaaggtaatggagggtcttcacctggaagagccccaggtttccgaatcgaaaacagatccggtagaggcaacgatgagcagttcccgagcaccgacgcccaaaatgcaggaagatacagatagcctgaagacctccactccagagccggagatcgaacgggctctggccaacgaggaggagagcccaccgactccgaaaccctcgctggaggagatggttctgataagtgccgaagtctcgcaggcaactgctgctgatgcgcctgcagtggatgcacctgcctcgactgccgagccttcatcagctacagcaacagaagcaaccgaatcctccgctgccgtggaaagtcgtaaagtgcgccgcaaattggtcaaaacgaataaaacgaatgatgaggagcatagacccagcaccaccgagtgggagaaattcgcagatcagttagccaaaagcaagaagtttaagccctacgaaagcttcgcccacggtcaaaacaagttctccgtttaccaggatcacaccagtctgagggataagccgaatcactacgatggtcattttagcggtgaaaactcacagagtgcctcccaatcggatttgtccagcggccacataactccagcccccactcgcagagggcaacgggagtttgccaaattcgtgggttccgaacaggcgggtagtatatcccggtccagttccaggctctcgaatcctgccacttccaggaccttcgatttcaatccccaacgcgaacgcatcagtctttccctggccactcgcattggttccggtattcaaagatctcctgccgaacgggtttccggttggggtagaggaaggccggctcccttggtggaggaacctggatacggacgcagaatgagcactggagttattcaacaacccttgatagccggaagagagaaatttctaggcactggaagtcgccgggcagtaaaacccataaccccgacaagggaaaagtcttctaagaagcagccttccaggattatttcttcgcgagagtcatcttatttggatttcgatcctcgcagtccactaaggattaccaacactttaccaaaggatgtagctacacaaaccttcagtaaaggagactgttaa

SEQ ID NO: 36345 - protein, 452 aa, DROSOPHILA
MGCASSTPMVATAGSEMLKAASHVKQKGEAVVEDASETLTTTLDTAKETVGTAVAGITTELGNAFKEGTQALDEAKHKVMEGLHLEEPQVSESKTDPVEATMSSSRAPTPKMQEDTDSLKTSTPEPEIERALANEEESPPTPKPSLEEMVLISAEVSQATAADAPAVDAPASTAEPSSATATEATESSAAVESRKVRRKLVKTNKTNDEEHRPSTTEWEKFADQLAKSKKFKPYESFAHGQNKFSVYQDHTSLRDKPNHYDGHFSGENSQSASQSDLSSGHITPAPTRRGQREFAKFVGSEQAGSISRSSSRLSNPATSRTFDFNPQRERISLSLATRIGSGIQRSPAERVSGWGRGRPAPLVEEPGYGRRMSTGVIQQPLIAGREKFLGTGSRRAVKPITPTREKSSKKQPSRIISSRESSYLDFDPRSPLRITNTLPKDVATQTFSKGDC

SEQ ID NO: 36346 - DNA, 5682 bp, DROSOPHILA
gcagacgcccagaatgaaagtgaacgacgtgcatccattaaatgtgtgccactcatgtggcaccaccaccatcaccaacatcgcggtggtgcattgactcggtgcactctgcaccacggcagtcgcattcgcagctgtccatcagagaactttcgatttcgattgcgtagtgcgtcaactcgaagactttccattgtggcgtttgttgaaccgatctcggctacattgagaaaaagaaaatctgaaaaattggtccctgcaaggagtgttacccaaaacactcaaccaacaataaaaccaaccttgaggatataaattctggtttctggtaagaaaaggatatagtcttagtatacagactctatttttttttctctctgtgctagcaaagatagcagacgtgaggagggtcaggaactgggactgggactggacctggcactgggactcggacaacaactgccacagatcgcacaagaaacacatatttcgtagctttttcgttcgggtttgaagtctctgtgagtgacacacaattgcgttttttgcgcatagttccgtatttggtcaaagataatgatgtgaaatgcagcaacaacagcgtatcccccccaaaaaaaaaacaacaacggcgaaacgacagcgacaacaaggcaatcacccactcaaaaatcgttgaggaaaaattgccaggccgacgcgaatcgtccatgtaaatgagtgaaaatgtttcaacttaattctgtttatgtgcgttcacgttggggccaagagaaactccattcagcccctagcttcgcactaacaaaaataaaaattaaaggtttacggaaaaatgtaacttttgttatgaaaaagtaggcaataaaatcatttagctgatttctgcgcatgctcccggattgccatgacagaatcgtcgcttgtcagtagaaataaaacatataaacaaactaatcggacgacactttatcaaaaggtatagaaaggctcactgaccatgtcgaccacggatatcgaggtcccgggaaaatctgaaatagatggtgacttagaaggtttgccgatcgattcggaggttaccgatgttgcggcacctttatcatccaggcgaagcaagccctacttcaaaaagttcaaggagccagactccgacgaagatgtcgctgatccgcgacagctgttcaatgtccaggaatcgtggcgaaccctcatgtctctctccagctgccaaaaggtcatggtctcgtaagttatgtagagaacttatgaagcatttaatacccagctctattttgatttttatgcagtgagaaagctcaaaaggccctgaagattgaagtgggcatcaatgtgacgcaggagtttccatggaaacaggtgcaatttaaggaccttagagatgtgctcttcgacgaactggagaattcagctgagctaatgaagaagttcaagaactttaatccggagcactttatcctcattggtttctgtccattgttgaccgaacaggaagatgatccgccggagggcgaacccttcatcttctactcgtccatcaaggagtccaaaatggccatgagtatcattcagaatatggagcacttcgagcgttggcgaatgcagcgacgtctgagaaaaaagccccgtcgatgggtgagccatggcaccgatgaggagatgaccatcatggtggagcgattcaaggacgaacccatcgatgtggagatccagagtgtatatcccattcagatgccgcggcatgtggccttcgattaccggatgacaagggatgtgcgggatggagtgctcgagcttttgcccaacgaaaacattaaatgggaaaacgtgaccaaaaaacgggttaatgtgtcggtgcagtctgctcctccaaaaatcgaaagagagcagcaaactaacccgacttttccgtcgaacgcctggtcccaatatctttatgagattgatgatgaaggtaggtcgcgtttgtttaaaagtataacattatacaaaatatatctaaagaccttgagctggatgaaacggatgtggacgaggaggaggagaagaagaaggcccaagctaagccgggaacctatgtggaaccggaaaagaaacccccggaaatgtccgcccagattgaaatgctgctcaataccctggaattcaatcagatcgatagctatcggtgggtatagtatagatttagtttgatttaaatttatctgaagggaattctgtacagcgatgactattccttgatatcatcccgacaagtggtgcagtacaccaatccctatctgcaggagttcctctgttttgccaacatctcgaagagcaacaagcgctttgtggctggctacgattggtatcccaaactatccggactcatagcggtttcatatgcattcagtactccagctaccgtaaatgaggcaactaaccgggtggactatgtgcagcgtgcagttctcgagcccaatccggtgctcttgtggagcttttcggataacctaaactataagttggaattcgaggccccaatcgagaccaccgccttgacattttgcccttttaatggggatatcttgctgggaggtagtaagaatggtcaggtggtgttgtgggatcttcaaggtcgctgtgagaagctggatgaggaggagtacttgacggcggctcaggccaaataccgaattatgatcggggaattcctcaattggaccattgacatcgaggacaatgtcatcgtgccggccactatttccttgttggattgctcaccgaaaggcgccataacagcattttattggctgggtcgttccatatatttaagtcaatttggaaaggtttacaatgaccctgatattcgaaaccatcacaagttctttgtaacgtgtgcattcgatggcactatcagcttctgggacttggatggcaaaggggggaaaagtgctaaggataagatgcgcaatcggatgctgcctaaggagttgacccagagtgaatccgcttttaaatccatggtcattaagcccacctacaacctttactttccggaaccgataactggtatcatagcggacacctcgtgtttgtcgtgcctaactcctgttgccaaattgatacaagccaatccctcgaattatcctatcaagaccatagccaaggatccacccactatgcgccagagtatgatagtatccacattttatggccatgtcagccggattgattggcagggtacatatacggagggtgaggccacggaggttattaacagttcgattccctttgccatggtccatgatggacctgtggtgatggtgaagaagaatcccttctatccggagttgttcgcttccattggacggaccatcctggccatttggaaggaggactataattattcacccatcttttggcggaaaagagcctgtgaccttaccgccgtggcctggagtgaaacgcgtccggctgttttgtaccttactagaatcgatggaattctcgaggcgtgggatatactgggtatatatatacatgtacattaacgtgtggaccaaaggtatttacaatatctctgaacagcccgcgacgatgatgcttgcctcaccgaaatccttggcggtggtatcattacagcgataacggagcatcgaccctcgcttccacataagatcttgggcattggtgattataacagtagtataagaatggtaaagctgccccattccttcgatgtgcccctgcccaatgagctcgatcaactgataaagtacgtgctgaaggaggagcgccgcaagatgggaattcagtcgtgggaacaaaagtactatgaactcaacaaggacattatagaggcaaagcgggaggctgccgcggaaatccgcaaggaaatggaaaaaaaggaaaaggaggagcagcttgccagcaggaaaaagggacaaaagtccggagaagatggtggagaaggcggcgaagagatcaagtaggtatcaatattatcgccagctaatattcaatctatttttgtactacccagaggtaagaagaactacagcggcttgaactacaacgaaaaaatggctgtcaagtgggacgaacttaatcttaaccggatgatgactattttgatgtcccgcaagcaaatggatcccgagaaattggccagggagacggcactggagaaggagcgtcacgcctacgaggctgccaagaaaaagtcccatttggatatcctggccacagtggaaaacgatatcgctaacataaggtccagaatcctgccgttagagcttcaggacatgcagcgcagtgagatgatcgcggagagggtaaaacgagaggttgagaacgcggactcctatgaaaaggtgtgcgaagatgccttcgagatgctgaacaacttcaaagaattcgagccaatcgattatattgagtttctggaacggggtcgcaagaggcgtcaacttttggatcaatccttgggtggaaatacggatcgactgcggtggtacgaggaaagggtcagattgggcgaactgggcgagtgccagttcatctacgaacccattagtggatctcagggggaggagtccagccatcccgaatttgcggcacctcagaaaattatgtccaaatcaaacagcgatattattgtggacgatttcgagggttaaagtttgtaatgcgtcagtatagttggtaaatttcattaaatactctgctatttaaatttcaattgatttcgttatggaattttacgagtattaatgacggcgtgaaaatacggaaaataagaataggttggcatatattcaaaaactgttcttttaaattataatcaaccgtcctgtttgcaagtagaaagttaaaattcatgaacggaaacttaatcatactattgaagacaaaatcaatttttatgtattgactttcaacgccattttaatgttcgtttttatgctaagtttttagataaatgtgcaatggcatttcagatggtgttttccctctatttttaactactctgttggccattcaaagtgacccacccatcgtgctaaacggttgactgcctctggccgtttgccaaataaaattcggctctcaattaggggcccattgaaccttgaagagccgcttccgcttgacggccagctggcgggttcaagtttatgacatttctaggcattatgtttggtttgtgtgcacaaatgaagtcatcccgtggacgaggcgtctcccgagtttaatgaacctgcccccataacggagaaagaaaacaccatggtccgtctccaagccgagctgggggaattcccacggccatgcaacctctggtcaatccgctccaaagtactccaggtaaacgccattgaggtaggggtaaatttgaatgcaaaccgacagcggcagtccatcattttcgcaagcagataatgatatacatttcggaagcaatgcatctgaactttaccataatttcgagtgcattattattggcccgctctgggcagttgaatgcaaagttgcagatacattttacgttgcatcatcatcatcgacgtcgaccacctgttgtccttaaagcgataagtattaagtgatttctggacagccgctcgcgagttttccttttttttcccccatttatttattaatacaattttcgtgcgc

SEQ ID NO: 36347 - DNA, 3399 bp, DROSOPHILA
atgtcgaccacggatatcgaggtcccgggaaaatctgaaatagatggtgacttagaaggtttgccgatcgattcggaggttaccgatgttgcggcacctttatcatccaggcgaagcaagccctacttcaaaaagttcaaggagccagactccgacgaagatgtcgctgatccgcgacagctgttcaatgtccaggaatcgtggcgaaccctcatgtctctctccagctgccaaaaggtcatggtctctgagaaagctcaaaaggccctgaagattgaagtgggcatcaatgtgacgcaggagtttccatggaaacaggtgcaatttaaggaccttagagatgtgctcttcgacgaactggagaattcagctgagctaatgaagaagttcaagaactttaatccggagcactttatcctcattggtttctgtccattgttgaccgaacaggaagatgatccgccggagggcgaacccttcatcttctactcgtccatcaaggagtccaaaatggccatgagtatcattcagaatatggagcacttcgagcgttggcgaatgcagcgacgtctgagaaaaaagccccgtcgatgggtgagccatggcaccgatgaggagatgaccatcatggtggagcgattcaaggacgaacccatcgatgtggagatccagagtgtatatcccattcagatgccgcggcatgtggccttcgattaccggatgacaagggatgtgcgggatggagtgctcgagcttttgcccaacgaaaacattaaatgggaaaacgtgaccaaaaaacgggttaatgtgtcggtgcagtctgctcctccaaaaatcgaaagagagcagcaaactaacccgacttttccgtcgaacgcctggtcccaatatctttatgagattgatgatgaagaccttgagctggatgaaacggatgtggacgaggaggaggagaagaagaaggcccaagctaagccgggaacctatgtggaaccggaaaagaaacccccggaaatgtccgcccagattgaaatgctgctcaataccctggaattcaatcagatcgatagctatcgcgatgactattccttgatatcatcccgacaagtggtgcagtacaccaatccctatctgcaggagttcctctgttttgccaacatctcgaagagcaacaagcgctttgtggctggctacgattggtatcccaaactatccggactcatagcggtttcatatgcattcagtactccagctaccgtaaatgaggcaactaaccgggtggactatgtgcagcgtgcagttctcgagcccaatccggtgctcttgtggagcttttcggataacctaaactataagttggaattcgaggccccaatcgagaccaccgccttgacattttgcccttttaatggggatatcttgctgggaggtagtaagaatggtcaggtggtgttgtgggatcttcaaggtcgctgtgagaagctggatgaggaggagtacttgacggcggctcaggccaaataccgaattatgatcggggaattcctcaattggaccattgacatcgaggacaatgtcatcgtgccggccactatttccttgttggattgctcaccgaaaggcgccataacagcattttattggctgggtcgttccatatatttaagtcaatttggaaaggtttacaatgaccctgatattcgaaaccatcacaagttctttgtaacgtgtgcattcgatggcactatcagcttctgggacttggatggcaaaggggggaaaagtgctaaggataagatgcgcaatcggatgctgcctaaggagttgacccagagtgaatccgcttttaaatccatggtcattaagcccacctacaacctttactttccggaaccgataactggtatcatagcggacacctcgtgtttgtcgtgcctaactcctgttgccaaattgatacaagccaatccctcgaattatcctatcaagaccatagccaaggatccacccactatgcgccagagtatgatagtatccacattttatggccatgtcagccggattgattggcagggtacatatacggagggtgaggccacggaggttattaacagttcgattccctttgccatggtccatgatggacctgtggtgatggtgaagaagaatcccttctatccggagttgttcgcttccattggacggaccatcctggccatttggaaggaggactataattattcacccatcttttggcggaaaagagcctgtgaccttaccgccgtggcctggagtgaaacgcgtccggctgttttgtaccttactagaatcgatggaattctcgaggcgtgggatatactggcccgcgacgatgatgcttgcctcaccgaaatccttggcggtggtatcattacagcgataacggagcatcgaccctcgcttccacataagatcttgggcattggtgattataacagtagtataagaatggtaaagctgccccattccttcgatgtgcccctgcccaatgagctcgatcaactgataaagtacgtgctgaaggaggagcgccgcaagatgggaattcagtcgtgggaacaaaagtactatgaactcaacaaggacattatagaggcaaagcgggaggctgccgcggaaatccgcaaggaaatggaaaaaaaggaaaaggaggagcagcttgccagcaggaaaaagggacaaaagtccggagaagatggtggagaaggcggcgaagagatcaaaggtaagaagaactacagcggcttgaactacaacgaaaaaatggctgtcaagtgggacgaacttaatcttaaccggatgatgactattttgatgtcccgcaagcaaatggatcccgagaaattggccagggagacggcactggagaaggagcgtcacgcctacgaggctgccaagaaaaagtcccatttggatatcctggccacagtggaaaacgatatcgctaacataaggtccagaatcctgccgttagagcttcaggacatgcagcgcagtgagatgatcgcggagagggtaaaacgagaggttgagaacgcggactcctatgaaaaggtgtgcgaagatgccttcgagatgctgaacaacttcaaagaattcgagccaatcgattatattgagtttctggaacggggtcgcaagaggcgtcaacttttggatcaatccttgggtggaaatacggatcgactgcggtggtacgaggaaagggtcagattgggcgaactgggcgagtgccagttcatctacgaacccattagtggatctcagggggaggagtccagccatcccgaatttgcggcacctcagaaaattatgtccaaatcaaacagcgatattattgtggacgatttcgagggttaa

SEQ ID NO: 36348 - protein, 1132 aa, DROSOPHILA
MSTTDIEVPGKSEIDGDLEGLPIDSEVTDVAAPLSSRRSKPYFKKFKEPDSDEDVADPRQLFNVQESWRTLMSLSSCQKVMVSEKAQKALKIEVGINVTQEFPWKQVQFKDLRDVLFDELENSAELMKKFKNFNPEHFILIGFCPLLTEQEDDPPEGEPFIFYSSIKESKMAMSIIQNMEHFERWRMQRRLRKKPRRWVSHGTDEEMTIMVERFKDEPIDVEIQSVYPIQMPRHVAFDYRMTRDVRDGVLELLPNENIKWENVTKKRVNVSVQSAPPKIEREQQTNPTFPSNAWSQYLYEIDDEDLELDETDVDEEEEKKKAQAKPGTYVEPEKKPPEMSAQIEMLLNTLEFNQIDSYRDDYSLISSRQVVQYTNPYLQEFLCFANISKSNKRFVAGYDWYPKLSGLIAVSYAFSTPATVNEATNRVDYVQRAVLEPNPVLLWSFSDNLNYKLEFEAPIETTALTFCPFNGDILLGGSKNGQVVLWDLQGRCEKLDEEEYLTAAQAKYRIMIGEFLNWTIDIEDNVIVPATISLLDCSPKGAITAFYWLGRSIYLSQFGKVYNDPDIRNHHKFFVTCAFDGTISFWDLDGKGGKSAKDKMRNRMLPKELTQSESAFKSMVIKPTYNLYFPEPITGIIADTSCLSCLTPVAKLIQANPSNYPIKTIAKDPPTMRQSMIVSTFYGHVSRIDWQGTYTEGEATEVINSSIPFAMVHDGPVVMVKKNPFYPELFASIGRTILAIWKEDYNYSPIFWRKRACDLTAVAWSETRPAVLYLTRIDGILEAWDILARDDDACLTEILGGGIITAITEHRPSLPHKILGIGDYNSSIRMVKLPHSFDVPLPNELDQLIKYVLKEERRKMGIQSWEQKYYELNKDIIEAKREAAAEIRKEMEKKEKEEQLASRKKGQKSGEDGGEGGEEIKGKKNYSGLNYNEKMAVKWDELNLNRMMTILMSRKQMDPEKLARETALEKERHAYEAAKKKSHLDILATVENDIANIRSRILPLELQDMQRSEMIAERVKREVENADSYEKVCEDAFEMLNNFKEFEPIDYIEFLERGRKRRQLLDQSLGGNTDRLRWYEERVRLGELGECQFIYEPISGSQGEESSHPEFAAPQKIMSKSNSDIIVDDFEG

SEQ ID NO: 36349 - DNA, 2802 bp, DROSOPHILA
tattgatcgtttctagcttgaagaggatgcagagctaatcgccctttgcatcctttgagccttttgcttggcctccactgccgcacaagccgccttataggcagccttcttggtcttgtcgtaatcctgcctggcagcgaccacttgtctggagatgctctccactctccgattggccgcctccaacagctgccccttctcatccatctccaattgggcaccattagcgaaagtttcaatgttggtcatttgagcggtggcctcagccaaaaggactttcagttggtccagctgaatcttggcttcggaaaacgctaacatggcagattctgcgttcacctgtgtgctgtggagtgagttcttaacctcgtccacaacggccaccgcctccttttcctccagctccagttgctccatgatctgttgcttgccagcaagagctgcctccgcggctcgagcagcttggaccgccttctcggccagatcctgtttcacttggagtgaggctgcctctccggcggccatctgggcgtcattggccgccttggcgtcctgggcggccttaattgcaatgctggaagccttgctcttggcattcttttggctaaggccacaagaattttgcacagcagaacttgtttcacacccttccgatgatcctccacttgcagtctgcttcttttcgcttgctggctcatacaatcgagccacaacaggatccttgttcaatggcgatgagaaaacaaattatagactaggactttacccacagattcgagggttaggactcaccgagtcgcttatcatgattatgtggctccgcgaaacgcaagcaaggctaagcaggaataagcacattgcctggcaatagagcataatctcgatttccggatttgacaggcatggcatctccatccgattgacagtcggaaaaatgctcgagacaacggaaaatgcggatagacactcagatcatgtggctaataattgtgttatcctcgctcccggcatccgctactggcaatcattatcgaacccgccgaaagccaatgcagacggaggactcagacctgatgaggagtttcgctggtgggctcggtggcggtggtcctggtgatggaaccgtgtgcgacatgtcaggggaggatagcaactcgccggcaaagaagacgcgaaaccatactaatgccaaacagcgatcctccggaatcgccgtccaggcggccaacgaggctaaaaaggcaaacgatgatatgaaaaacgccgttaaggaggccgctgataaaatcaaaggtgaatacgcagacaaggcaaacgctgcggccaaagctgccgaagcagtgctgttcggaaagagtcaggtgctggagcaattggaagcggaggtcagggaggccgaaatggtggtgcaggaggaaaaccaggagctgatcaccgccgagtcgaatgcacagcttgccgccaagacgcaccaattggtccagcaggagctcaagacactgaccataagcctcaagttggccaaggacattaaggatgcctcagatcaagtatacacagtgtggcaacaatcgctcgccgacaagacggcactattagaggctgcccagcggcgggttaatgtcctaatgcggcaacttagcgaagctcgattagattacgataagaccaagaaggcggcactaagtgccgccaaagcagcgcaagaggccaaacagcgtatagatcaatcggagtgtgaaggcggttctcgtggcagaagggggcgacgagcgtggctggagtacaaggaacaccattgatataccatatattttgcatattacaagaaaacaacaagaataaatcaatttgaattttaatctgtagtttattaaacttttttctttagggaataaaaatataaaattcctcgacagcgtgcaaaaagtgcgcgcgtcttgaatggctgccaaaaaatgctatggaactttgcctgtacaagtctgaccgatcgccccgataggaatatacatatctgcctgctgtgtgtgtgtgtgtgtgtacaattttggacaaataccagagcggactaattgctagtcttaagcgaaagaattgttaaactagtagaatacaagggagccgaactaaagataggcgttacaaattatgattacgcttgagcttcaatcaaggcaaacaaacgttcacaaaaatgtacatgattttataacttaggtgtaaaataataaatatgcaatcaatggagttagtacaattacaattggctgctgttgttgtggttgcctgttcacaatacaataatttcaagggtgatgcttggtttcgttctctaaatatatatatatatgtatatatataagcatgtggttgcggatattattcttagttcaatcaattaatcagtaggttaattggtaacaaacataaatacgcagagctctacataaaatagtttcttcttacacaatcctggtgacttaaggttagttaatttctcattacagtagatatataatatagatatttataattcgtatgcaatatatgtacaatctaacacaagcccctgtaagtaattgtttttaatgtctcccatcgtttatctgttattcgcctaagcccaacaatgttatatttatcagcttagcttagttatttgtatttgtttatagaatctgtggagccttagtctagttagctaactgatctgcatatcattatccgtatgtggtaggtagctagtacgtaacatatttaatttacaattattaattatctccccttgaatactgacgt

SEQ ID NO: 36350 - DNA, 802 bp, DROSOPHILA
gctcccggcatccgctactggcaatcattatcgaacccgccgaaagccaatgcagacggaggactcagacctgatgaggagtttcgctggtgggctcggtggcggtggtcctggtgatggaaccgtgtgcgacatgtcaggggaggatagcaactcgccggcaaagaagacgcgaaaccatactaatgccaaacagcgatcctccggaatcgccgtccaggcggccaacgaggctaaaaaggcaaacgatgatatgaaaaacgccgttaaggaggccgctgataaaatcaaaggtgaatacgcagacaaggcaaacgctgcggccaaagctgccgaagcagtgctgttcggaaagagtcaggtgctggagcaattggaagcggaggtcagggaggccgaaatggtggtgcaggaggaaaaccaggagctgatcaccgccgagtcgaatgcacagcttgccgccaagacgcaccaattggtccagcaggagctcaagacactgaccataagcctcaagttggccaaggacattaaggatgcctcagatcaagtatacacagtgtggcaacaatcgctcgccgacaagacggcactattagaggctgcccagcggcgggttaatgtcctaatgcggcaacttagcgaagctcgattagattacgataagaccaagaaggcggcactaagtgccgccaaagcagcgcaagaggccaaacagcgtatagatcaatcggagtgtgaaggcggttctcgtggcagaagggggcgacgagcgtggctggagtacaaggaacaccattga

SEQ ID NO: 36351 - protein, 250 aa, DROSOPHILA
MQTEDSDLMRSFAGGLGGGGPGDGTVCDMSGEDSNSPAKKTRNHTNAKQRSSGIAVQAANEAKKANDDMKNAVKEAADKIKGEYADKANAAAKAAEAVLFGKSQVLEQLEAEVREAEMVVQEENQELITAESNAQLAAKTHQLVQQELKTLTISLKLAKDIKDASDQVYTVWQQSLADKTALLEAAQRRVNVLMRQLSEARLDYDKTKKAALSAAKAAQEAKQRIDQSECEGGSRGRRGRRAWLEYKEHH

SEQ ID NO: 36352 - DNA, 2903 bp, DROSOPHILA
ctcgtccaatctcagctgggagtcggtgaggaaggtttcgtcagacacgcaataccaaccactgtaggcggccgaatatatgtggccgcgtgtgtgaagtgtgcgctgaggattaagatttaaaaataattctataaattaataataattcttggccagcattgatagcagcagccccattcttacccagaaattggccactgcccgcttgtggcgatcctccgtggtgcgaataaagtcatcctgctggatgctggcactgcggaagacctctcgatatcgctgcgatatatcatcacagtatttggcaacgggcaccccgtgaagagatgccgcctgctggatctttgtgccgtgctcatccgttcccgtgcagagtcgtacatcctgctctggataccttagcctctggtagcgacagtgggcatcggctatgaccgctgagtacaggtgtccaatgtgaggagctatttgttaaaaattatttctttttattatccgtaatattgactgatttggtctaaaatgcttacctgcatttacatagaaaattggagttgtcacatagtgcgaactgttgtagcgagttcccaaatatctgaggcacttaattcttctaataagcatcactttaaaagctattttaatatacaaataagtaaaaaaaaaaaacgtctaaacaatttgccggttgattttataacattgaacagctgtgccaccagtgctgcccatcactcggctaacagtgcacgtaacagtctcatttgacatagatgcacacttaacagcgtagacgcaaaatttaacggcttaaaattttaaattaaattcaaaagaataaatcaaatatttccatgcaaattaaacttatttaaatatatttatttaatactaacaaaattatcgtgaaacattttaatttttagttataaaaccattatcttttaataggaaacttattaaaccgaaatcgaaacgtaacaaaatatagaaaagatcagttgatccccgaattcggtgctagattttggctgcctgcgccggaaaactttccggccatcttgcgcggaccccagcgcacctgctggcggtgggtcattcgacgagacctctgtgccttctgcttggcctccactgcagcacaggccgctttgtaggccgcctgcttggtcttctcgaagtccgtcttggcctcggtcatctggcgggttagattctccacccggtgcttggcagcctccaggagctgcgtcttctcggccagctcctgctgcgctccactggccacgttctcgatattggccagattggacgtggcggctatcacaaggttcttcagctgattgagttgcgattgggcctcgtgggcagccgatgcggcggcattggcattcgcttgggtgttttgtagggacgaggtcacctcagtgacaaccgcatccgcctcggtcatctcctgctgcagctgttcaacaatctgctgctttccggccagtgccgcctccgccgcacgagcggattgagctgccttggcggccagttcgtttttgacctgggatgcagccgcctcggcagctgccatctgcgaatcgctggctgccttggcctcctgggcggctttttgggcaatgttggaggccttctgcttgggatctccgcgaccaaagacgccggttccgctgctgcagccaacccctttcttcgaattaggttccccacagccttcggatccgcctcccaaaccgcccgccccaccagttccatcgatgctggcatcgccgtacaatgcggacaggcattgcttgtcattcgtttcggcgggtcggtagtggtagctctccagtcgagggaacgcacgcagcagtagcaggacgaggagcagcgctttcgtgccaggcatattccgatcaaatatttggaaacactcgacgctgactccattcggaaagcctggtttgactgaaaaattaccttctcttagcaaaaacaattcggaaaaactacctcggatatttgcctttcattaatttcattgtttagatggatacaacatatatgtatatcctacatccagcagctatgaatagtattatgcatctatttaattacatgctcgcagtatattttttattatattgatataatatattatttttaaaaaagtagcattataaactttacaaaaatatatatatatgtataaaatttaagtgataatggctaatattgatcgtttctagcttgaagaggatgcagagctaatcgccctttgcatcctttgagccttttgcttggcctccactgccgcacaagccgccttataggcagccttcttggtcttgtcgtaatcctgcctggcagcgaccacttgtctggagatgctctccactctccgattggccgcctccaacagctgccccttctcatccatctccaattgggcaccattagcgaaagtttcaatgttggtcatttgagcggtggcctcagccaaaaggactttcagttggtccagctgaatcttggcttcggaaaacgctaacatggcagattctgcgttcacctgtgtgctgtggagtgagttcttaacctcgtccacaacggccaccgcctccttttcctccagctccagttgctccatgatctgttgcttgccagcaagagctgcctccgcggctcgagcagcttggaccgccttctcggccagatcctgtttcacttggagtgaggctgcctctccggcggccatctgggcgtcattggccgccttggcgtcctgggcggccttaattgcaatgctggaagccttgctcttggcattcttttggctaaggccacaagaattttgcacagcagaacttgtttcacacccttccgatgatcctccacttgcagtctgc

SEQ ID NO: 36353 - DNA, 903 bp, DROSOPHILA
atgcctggcacgaaagcgctgctcctcgtcctgctactgctgcgtgcgttccctcgactggagagctaccactaccgacccgccgaaacgaatgacaagcaatgcctgtccgcattgtacggcgatgccagcatcgatggaactggtggggcgggcggtttgggaggcggatccgaaggctgtggggaacctaattcgaagaaaggggttggctgcagcagcggaaccggcgtctttggtcgcggagatcccaagcagaaggcctccaacattgcccaaaaagccgcccaggaggccaaggcagccagcgattcgcagatggcagctgccgaggcggctgcatcccaggtcaaaaacgaactggccgccaaggcagctcaatccgctcgtgcggcggaggcggcactggccggaaagcagcagattgttgaacagctgcagcaggagatgaccgaggcggatgcggttgtcactgaggtgacctcgtccctacaaaacacccaagcgaatgccaatgccgccgcatcggctgcccacgaggcccaatcgcaactcaatcagctgaagaaccttgtgatagccgccacgtccaatctggccaatatcgagaacgtggccagtggagcgcagcaggagctggccgagaagacgcagctcctggaggctgccaagcaccgggtggagaatctaacccgccagatgaccgaggccaagacggacttcgagaagaccaagcaggcggcctacaaagcggcctgtgctgcagtggaggccaagcagaaggcacagaggtctcgtcgaatgacccaccgccagcaggtgcgctggggtccgcgcaagatggccggaaagttttccggcgcaggcagccaaaatctagcaccgaattcggggatcaactga

SEQ ID NO: 36354 - protein, 300 aa, DROSOPHILA
MPGTKALLLVLLLLRAFPRLESYHYRPAETNDKQCLSALYGDASIDGTGGAGGLGGGSEGCGEPNSKKGVGCSSGTGVFGRGDPKQKASNIAQKAAQEAKAASDSQMAAAEAAASQVKNELAAKAAQSARAAEAALAGKQQIVEQLQQEMTEADAVVTEVTSSLQNTQANANAAASAAHEAQSQLNQLKNLVIAATSNLANIENVASGAQQELAEKTQLLEAAKHRVENLTRQMTEAKTDFEKTKQAAYKAACAAVEAKQKAQRSRRMTHRQQVRWGPRKMAGKFSGAGSQNLAPNSGIN

SEQ ID NO: 36355 - DNA, 2903 bp, DROSOPHILA
cctccaggagctgcgtcttctcggccagctcctgctgcgctccactggccacgttctcgatattggccagattggacgtggcggctatcacaaggttcttcagctgattgagttgcgattgggcctcgtgggcagccgatgcggcggcattggcattcgcttgggtgttttgtagggacgaggtcacctcagtgacaaccgcatccgcctcggtcatctcctgctgcagctgttcaacaatctgctgctttccggccagtgccgcctccgccgcacgagcggattgagctgccttggcggccagttcgtttttgacctgggatgcagccgcctcggcagctgccatctgcgaatcgctggctgccttggcctcctgggcggctttttgggcaatgttggaggccttctgcttgggatctccgcgaccaaagacgccggttccgctgctgcagccaacccctttcttcgaattaggttccccacagccttcggatccgcctcccaaaccgcccgccccaccagttccatcgatgctggcatcgccgtacaatgcggacaggcattgcttgtcattcgtttcggcgggtcggtagtggtagctctccagtcgagggaacgcacgcagcagtagcaggacgaggagcagcgctttcgtgccaggcatattccgatcaaatatttggaaacactcgacgctgactccattcggaaagcctggtttgactgaaaaattaccttctcttagcaaaaacaattcggaaaaactacctcggatatttgcctttcattaatttcattgtttagatggatacaacatatatgtatatcctacatccagcagctatgaatagtattatgcatctatttaattacatgctcgcagtatattttttattatattgatataatatattatttttaaaaaagtagcattataaactttacaaaaatatatatatatgtataaaatttaagtgataatggctaatattgatcgtttctagcttgaagaggatgcagagctaatcgccctttgcatcctttgagccttttgcttggcctccactgccgcacaagccgccttataggcagccttcttggtcttgtcgtaatcctgcctggcagcgaccacttgtctggagatgctctccactctccgattggccgcctccaacagctgccccttctcatccatctccaattgggcaccattagcgaaagtttcaatgttggtcatttgagcggtggcctcagccaaaaggactttcagttggtccagctgaatcttggcttcggaaaacgctaacatggcagattctgcgttcacctgtgtgctgtggagtgagttcttaacctcgtccacaacggccaccgcctccttttcctccagctccagttgctccatgatctgttgcttgccagcaagagctgcctccgcggctcgagcagcttggaccgccttctcggccagatcctgtttcacttggagtgaggctgcctctccggcggccatctgggcgtcattggccgccttggcgtcctgggcggccttaattgcaatgctggaagccttgctcttggcattcttttggctaaggccacaagaattttgcacagcagaacttgtttcacacccttccgatgatcctccacttgcagtctgcttcttttcgcttgctggctcatacaatcgagccacaacaggatccttgttcaatggcgatgagaaaacaaattatagactaggactttacccacagattcgagggttaggactcaccgagtcgcttatcatgattatgtggctccgcgaaacgcaagcaaggctaagcaggaataagcacattgcctggcaatagagcataatctcgatttccggatttgacaggcatggcatctccatccgattgacagtcggaaaaatgctcgagacaacggaaaatgcggatagacactcagatcatgtggctaataattgtgttatcctcgctcccggcatccgctactggcaatcattatcgaacccgccgaaagccaatgcagacggaggactcagacctgatgaggagtttcgctggtgggctcggtggcggtggtcctggtgatggaaccgtgtgcgacatgtcaggggaggatagcaactcgccggcaaagaagacgcgaaaccatactaatgccaaacagcgatcctccggaatcgccgtccaggcggccaacgaggctaaaaaggcaaacgatgatatgaaaaacgccgttaaggaggccgctgataaaatcaaaggtgaatacgcagacaaggcaaacgctgcggccaaagctgccgaagcagtgctgttcggaaagagtcaggtgctggagcaattggaagcggaggtcagggaggccgaaatggtggtgcaggaggaaaaccaggagctgatcaccgccgagtcgaatgcacagcttgccgccaagacgcaccaattggtccagcaggagctcaagacactgaccataagcctcaagttggccaaggacattaaggatgcctcagatcaagtatacacagtgtggcaacaatcgctcgccgacaagacggcactattagaggctgcccagcggcgggttaatgtcctaatgcggcaacttagcgaagctcgattagattacgataagaccaagaaggcggcactaagtgccgccaaagcagcgcaagaggccaaacagcgtatagatcaatcggagtgtgaaggcggttctcgtggcagaagggggcgacgagcgtggctggagtacaaggaacaccattgatataccatatattttgcatattacaagaaaacaacaagaataaatcaatttgaattttaatctgtagtttattaaacttttttctttagggaataaaaatataaaattcctcg

SEQ ID NO: 36356 - DNA, 651 bp, DROSOPHILA
atggagatgccatgcctgtcaaatccggaaatcgagattatgctctattgccaggcaatccaaaagaatgccaagagcaaggcttccagcattgcaattaaggccgcccaggacgccaaggcggccaatgacgcccagatggccgccggagaggcagcctcactccaagtgaaacaggatctggccgagaaggcggtccaagctgctcgagccgcggaggcagctcttgctggcaagcaacagatcatggagcaactggagctggaggaaaaggaggcggtggccgttgtggacgaggttaagaactcactccacagcacacaggtgaacgcagaatctgccatgttagcgttttccgaagccaagattcagctggaccaactgaaagtccttttggctgaggccaccgctcaaatgaccaacattgaaactttcgctaatggtgcccaattggagatggatgagaaggggcagctgttggaggcggccaatcggagagtggagagcatctccagacaagtggtcgctgccaggcaggattacgacaagaccaagaaggctgcctataaggcggcttgtgcggcagtggaggccaagcaaaaggctcaaaggatgcaaagggcgattagctctgcatcctcttcaagctag

SEQ ID NO: 36357 - protein, 216 aa, DROSOPHILA
MEMPCLSNPEIEIMLYCQAIQKNAKSKASSIAIKAAQDAKAANDAQMAAGEAASLQVKQDLAEKAVQAARAAEAALAGKQQIMEQLELEEKEAVAVVDEVKNSLHSTQVNAESAMLAFSEAKIQLDQLKVLLAEATAQMTNIETFANGAQLEMDEKGQLLEAANRRVESISRQVVAARQDYDKTKKAAYKAACAAVEAKQKAQRMQRAISSASSSS

SEQ ID NO: 36358 - DNA, 2534 bp, DROSOPHILA
acttctttttcccactcacaacttgtgaccccaataaaaaaaaaaaaaaacgcctaaactcttcgcttatccgaggctgtcaggctgatccgattcaatcaaaagtcaatttgaggcaattccacagaaattactgtgtaaaattacaaattagacgagcagcaacaacaatcgaaagttatgcgggctcatggttaattaatcaaacatttaacaaatcaacaaagagcaaacataagcgaacagaaaacaataatgttaaggtcccagccctgagatgattaattcgattttaatagcagcgcccaataatttttcaacacaacataatattccgcttaaattacaagccgcggcaaagaaaggaaagaaatgttttaaaataaaaacaaaagctgggcgagcaaaatatttctcactcgccgaaatgaaaagtgaaactcgtaatgcagttttcgtttcgatttcgtttcggggcaatgaatttgctgacagttgttattttataaaataaatcaacatacgtggcggcggtctcctggctctgacttgaaacaaaactgcaatcgtcggtactgattttttcacgcccattaattggttttgcgtgttcccagtcgacagccaaattgtcgacgatttgtagcccctctctcgagaaggttaacctttttattttttggcagagcctggcgccctgaaaagggttagcattaaccctctttttgccaaaggtgtgggttttcagatttatatgttttaatatttgccaaaaataacgttcagatatccgttaaggaacaattaatattgaaaccataactttttcaaaaatgtacaactttgggccttagtgggttaaattgatacttttgctgccaaatcggtttacatgtaaggcggaaacgaggtgctcaactttctcgactttccttctgtgcagccttgaacctgctggccaatctctggcagccactttgccacccacatcctggactccttacctggccgccagcatggtgcgatagtattcctgcggacacttgctggttccagatccgccggatcgaccctgacaacgctggccccaataccgatgagggggcgtggtgcgatagttgttgggccccagacccagacccatgcccagttccattcccattgcaatttcctgcggcgctgattgcctggcccctaaatcatatgcgtttcgattaaaatcctcagagcgctgcgctgctggttgctccacatcggacaggctaaattttccagaatccatgggtccattgccattgccattgccgttgtgcatcatatcgcgcagtgcatcggcggggctgtcaaacaggacgcgtgcatcctttttctgatgctgctgctgctgcttctgctgccgttggtggctcaaggccgccttcgtggccgtggcgataagcgatggtggcaaagataggaccacattgccatggccatggccaccgccgcaataaatcgccaggcagaggctgagccaggccaacgtgagcctcatgctgtctgccgccttggtcggaggatcgaggagcgactttggacacagcaactccaactccaactttagtctctcgaagttgtgccaatttttatttcactccactccagcctcgtcggccactttgaagaagccagttagccaggcggccagtccgcggcatccgctgcgtttttggctcttagaaaaacggagagactgaaactgaaagttgctggtcagcggtccagctttttatagcacgagaacgagatccaaaggccaaaggagcggaccgcggagttttgggaatacgcctgcttgtcgcgctcgaaagacccctggtcacatatgacaacacttagagaaattggaattagaaatgaaaagggcctttaaaagatccaggaactcattcatatcaaaagaacaaatattatgttttcacagtgcatgattccttggcattgccaattgtttgtcatatgcgtcctagcatgaaattaataaaaagaaattgcattgtacggcgtcgaactgggaaatatggcgacccacttgagatgtccccaagccaactctctcatacgtcacaagttgagttcgaaatcaactgaagtcagttgaaccaaactcgattggtgtgtccggctctgtttgcctaacctgtgaacccagaaccgccttcacaaattagccagccaacttctcgccaatgcccgagtggcccccgtcgataagatcttagagtatgcggctttctttcaagcccccagaagcaatagactacctctgagaatttattgcctgctaatgctcgatcgcatttgtctgtgagttgcccttctggcaacaggagcagccacgaaaaaaagggagaaaattgtggcaaaagggggaaaaacaagggctcgcaaacaaaaacacaattgttgagtaatgagcactgcacgttattaatgtcactggggatgcgggaagaagggtcttcggaaagggttctatggcaacagggaccagt

SEQ ID NO: 36359 - DNA, 534 bp, DROSOPHILA
atgaggctcacgttggcctggctcagcctctgcctggcgatttattgcggcggtggccatggccatggcaatgtggtcctatctttgccaccatcgcttatcgccacggccacgaaggcggccttgagccaccaacggcagcagaagcagcagcagcagcatcagaaaaaggatgcacgcgtcctgtttgacagccccgccgatgcactgcgcgatatgatgcacaacggcaatggcaatggcaatggacccatggattctggaaaatttagcctgtccgatgtggagcaaccagcagcgcagcgctctgaggattttaatcgaaacgcatatgatttaggggccaggcaatcagcgccgcaggaaattgcaatgggaatggaactgggcatgggtctgggtctggggcccaacaactatcgcaccacgccccctcatcggtattggggccagcgttgtcagggtcgatccggcggatctggaaccagcaagtgtccgcaggaatactatcgcaccatgctggcggccaggtaa

SEQ ID NO: 36360 - protein, 177 aa, DROSOPHILA
MRLTLAWLSLCLAIYCGGGHGHGNVVLSLPPSLIATATKAALSHQRQQKQQQQHQKKDARVLFDSPADALRDMMHNGNGNGNGPMDSGKFSLSDVEQPAAQRSEDFNRNAYDLGARQSAPQEIAMGMELGMGLGLGPNNYRTTPPHRYWGQRCQGRSGGSGTSKCPQEYYRTMLAAR

SEQ ID NO: 36361 - DNA, 3170 bp, DROSOPHILA
ggctatgaccttcaatggtcatttgttcaaaaacaaagcgagctggcaaaaggtccgctggcttaccaaaaatacaacaccaaaaaaatgaaaaaaaaaagaaaaatattttgacgttgatgtcgatgtggtcaatgtcaatgtcagaaatcggttgaagtggaaaatttcagttcacagtggcttacaaattcagtgcttctcccgctttttgtttaaggttcaatgcttggctaataagctaaactcgcgtgattgatgtgcgttttggggattacatggcccttgtggggctgacctttgcagtcgctcagcagctgttttcggttttcttctgccggacttacaaacggctgcagttgttctacaatatctgtgtatctgtatatctgccagcatatctctgatgtggcatcaactgcgtgccacgcccgactgtctgcagctgggtttcagggtttctgctgcttcaacggagtcaagactcgatgctgggcacaatactgattgcatttagcgataaattaaccaatgaatacaattaaaataggaatactcgcactgcaacaactttgccaagggcaacggggcgagaccttcgcagagaacacgggaaaaaatacaagtcaatcgattttagaagaaattctaatacgaatatgtgtgataaaaatataaatatataaaattaaattaaataaatattttttttttaggttaaaggctttaatcaaaacttaagtgctgacctaaggactcctataccaagttaaaagattttctctcagtgtggttctgaaaaagcgtccccaagggcaatgtagccgatcaaccttcagttcgctacgaatcgatgcgatttctctcaaaatcaattgcatgctgtactttattgtgtgccatatagttgtgtctacatgagtcgaggaaaacagtgccccaagccgaaaactgaaaagccaaataaatccaatccgaaaacgaaattcgctcgccgcatttaaatgtttaggttgtccgtatcggtgaccaaatgtggattagccgggtgcgatagcgttaattgtgtctcgtgggcatcgtttgattcgcccggggccaggatggatctccggaggcgctcctctgcctgccaggatgaggttttcacctgatgctgctgctgctgctgctgctgctggcgcatgttcggattgccaatgaagcggacatgtggcaagagcaattgctgccgcagatcggctgacattgatcttgtcgagtgcaatctattagcgggcagtcgccaagaagccaacgatgcagcagcatcctccactgacagtgatggcctgactgattgatcgtaaccattaattttatgcgttgacattcttagcggccagtagttgttgctgtcatctggccattttccaccacccgccatcgtctcacccaatttcccggcactggctgtcaagtgccgcttgccgcgattcggaacgaatggatcgtcggcgttgtaaagatcccggagctgcagcttcttgccccgggtggcaaagaagggatcgtccacttggaagaggttgcgatgctttttgccgcgatgcggatagaacaggtcgtcatacttgaacagatccttgaccttgtcgcgcttgccgcgattgggcacaaagggttcgtaccggttcatcagggcgtccagatccagcgatccgctgtgcttgcgacctcgaggcggtatgaagggatcgttctccttgctcatgtcttctggaaaaagtcagtcgagttatagtagattatccatagtgatagcagtttctaaaatacactcacctccaaattgatagccatcgaaaagcttttcccttcgtaccagcacatactggggctcatccacaataagtgggggttccagatggcccgaaagatttagtttcttccagagaaacattcctggatagtagttctcggcagctccatcgctcagattgcccaaaggacgttcaatgggatacaggacctgcatggcccagtgcagaaacttcatcaaatcctgttcgccagttagcagcatgaagacctcgttgttgctctgctcctcatcgtcgacatgttcctcctcggaatccgaggaggagctggccccagaatcggaatcctgcatcgaactcagctgcatgtggaggcgggacagcgcctctttgttcctgatggtgaggaataataagggcttacggtttctatactctgattaatgccccatcatttgttcgctttaaggaacagcacattttcacatttttctctttggtcttgagcgtgggttgctggccatgggtttcaattacccttgttggccagagtttctcttttcaagaaattaactgaagccgacgacaccaaattgatgaacttctttttcccactcacaacttgtgaccccaataaaaaaaaaaaaaaacgcctaaactcttcgcttatccgaggctgtcaggctgatccgattcaatcaaaagtcaatttgaggcaattccacagaaattactgtgtaaaattacaaattagacgagcagcaacaacaatcgaaagttatgcgggctcatggttaattaatcaaacatttaacaaatcaacaaagagcaaacataagcgaacagaaaacaataatgttaaggtcccagccctgagatgattaattcgattttaatagcagcgcccaataatttttcaacacaacataatattccgcttaaattacaagccgcggcaaagaaaggaaagaaatgttttaaaataaaaacaaaagctgggcgagcaaaatatttctcactcgccgaaatgaaaagtgaaactcgtaatgcagttttcgtttcgatttcgtttcggggcaatgaatttgctgacagttgttattttataaaataaatcaacatacgtggcggcggtctcctggctctgacttgaaacaaaactgcaatcgtcggtactgattttttcacgcccattaattggttttgcgtgttcccagtcgacagccaaattgtcgacgatttgtagcccctctctcgagaaggttaacctttttattttttggcagagcctggcgccctgaaaagggttagcattaaccctctttttgccaaaggtgtgggttttcagatttatatgttttaatattt

SEQ ID NO: 36362 - DNA, 1104 bp, DROSOPHILA
atgcagctgagttcgatgcaggattccgattctggggccagctcctcctcggattccgaggaggaacatgtcgacgatgaggagcagagcaacaacgaggtcttcatgctgctaactggcgaacaggatttgatgaagtttctgcactgggccatgcaggtcctgtatcccattgaacgtcctttgggcaatctgagcgatggagctgccgagaactactatccaggaatgtttctctggaagaaactaaatctttcgggccatctggaacccccacttattgtggatgagccccagtatgtgctggtacgaagggaaaagcttttcgatggctatcaatttggagaagacatgagcaaggagaacgatcccttcataccgcctcgaggtcgcaagcacagcggatcgctggatctggacgccctgatgaaccggtacgaaccctttgtgcccaatcgcggcaagcgcgacaaggtcaaggatctgttcaagtatgacgacctgttctatccgcatcgcggcaaaaagcatcgcaacctcttccaagtggacgatcccttctttgccacccggggcaagaagctgcagctccgggatctttacaacgccgacgatccattcgttccgaatcgcggcaagcggcacttgacagccagtgccgggaaattgggtgagacgatggcgggtggtggaaaatggccagatgacagcaacaactactggccgctaagaatgtcaacgcataaaattaatggttacgatcaatcagtcaggccatcactgtcagtggaggatgctgctgcatcgttggcttcttggcgactgcccgctaatagattgcactcgacaagatcaatgtcagccgatctgcggcagcaattgctcttgccacatgtccgcttcattggcaatccgaacatgcgccagcagcagcagcagcagcagcagcatcaggtgaaaacctcatcctggcaggcagaggagcgcctccggagatccatcctggccccgggcgaatcaaacgatgcccacgagacacaattaacgctatcgcacccggctaatccacatttggtcaccgatacggacaacctaaacatttaa

SEQ ID NO: 36363 - protein, 367 aa, DROSOPHILA
MQLSSMQDSDSGASSSSDSEEEHVDDEEQSNNEVFMLLTGEQDLMKFLHWAMQVLYPIERPLGNLSDGAAENYYPGMFLWKKLNLSGHLEPPLIVDEPQYVLVRREKLFDGYQFGEDMSKENDPFIPPRGRKHSGSLDLDALMNRYEPFVPNRGKRDKVKDLFKYDDLFYPHRGKKHRNLFQVDDPFFATRGKKLQLRDLYNADDPFVPNRGKRHLTASAGKLGETMAGGGKWPDDSNNYWPLRMSTHKINGYDQSVRPSLSVEDAAASLASWRLPANRLHSTRSMSADLRQQLLLPHVRFIGNPNMRQQQQQQQQHQVKTSSWQAEERLRRSILAPGESNDAHETQLTLSHPANPHLVTDTDNLNI

SEQ ID NO: 36364 - DNA, 3166 bp, DROSOPHILA
caagaaaaaacgtggaaaatacggcatgttgctcaagcttgcattctgtataatcgtcggtattttcgaatggtttacgggccatgaaaataagttgtatatttgtatacctattaactagtacaaatcgacgaatataacatttgtttcccctgcatcttcatcttataatatatgccacattgcattatcgatttgctctaagttttatggcccaaacttggatcgagttgtgtcaatttatttttcgtgtccagctgggcaaacgaaactggcctagcaacctttaaacagcgaactacctgctttcagctgctcagctgtttgcttaacttggcttaaatttatgcatttagtcaaggcatttatcatgcgaaagatacagcgtgaaattagcatataacgcacagcgtgccaatatttttcttgggccctccaaacaaaagcccaactatcgaaacaattgctttgattagttgacaaataaactaacctacctttttctggctttctctttgcagtttagagtttggagtcgcccgaatattttgcatgaaaattgcagcaaaaaaaggtatgtaacaaatttcttaattaactaaaaagctaaactttcccagtgccgagcaaatatgccaattaagtcaataaatatttgccagctgctatttacgttttgacaccgagcagcaatacagatttccaaaaatgcttttacattttacaaatggcagacgaacaggcttttgagccgcacagaaatcatttatgttaatcaacacatgttttttttcggagtcattggctctgggggaattcttttttttttttttttggttttttgcctgacttgagttgttgtagctctggtctggctttttctatatattataaaaggcccaaaaacgcaaagcaaaataaatatatacggaaaacgtgtttgtgagtgtcgcacaaaaagcaaaattcaaattcaaattgtgccccgttgaaatttgcgctaatgttgccatttgtgttgctgctgctgctgctgggcaagtttgaggttgctcgtgtgctgctgctgctgcggttgttgctgctgctgctgctgctgctgctgctgctgctgctgatgtgatgttgctgtatgccgagttatttttggtatggggcatgccgacgctatatggccgccccatgctgaacaagatttctgcgccagcgcaaaaaaaaaactccagtcagatattcagcgtttcttgtttctaattcccatgcaaatatgtactgccatgtcatgttgcttctgttgttgctccccaactgtttgcatttcaataaacgtacacacgatttcggaatatctcagttctttcgggcaataagtgattctcgtgaactgactgtgactcaaatcaaagtcaaatatttccaaatcgaattcgcattaatgtatctaaagcgggtggtgccaaaaatggtggagaaatcaacaaaagcaacgacatttctgataactaatactttggaaagagccataaaaatgaacaaagagagataacgagtttgtttctgcccaggtagaacggaaatcgtcagtttggaaagagaaacgagagcaactgcagagaagacagctttagccgtcttaaaatattacgcatacgcagagttagtgactcacgaagacagtcattgaaagccgtactcaaaaccatgctgattcaaatttgtttgtcatggagtcttaactgaaatccgtcagagatacccgccctctaaaaccgaatcacaaaagcgcaatcagtcggaaacatattgcaaaatactgtcattgctgggatttccccaatgcgaaaaaaatataatctaaactataaagcatgtagatgtattatattaatagttaactttaaagtgagtataacattttgcgcagtgcacgatgatcaacaatcaagctggttttaacagcctgattatgcctaaattgccactcaaagggcttctaaagtgtcggttgcgctgttgttcatctactcaccagttgaccataaagccaatccaaacaagtgcctagatggccagatttgctttaatcttctgatttgtttgggttatgcttatgctgactttcataatgcagaaggcaaagagatcccgacgatcccccagattcattaccgatcccggcggggaatccgagtgcccagcgttaattcgtatgcgctgcttatgaggttgacatgccgaacgaattcaatagggccgggcattattttatgggatcccttttatccgggcaccgcataaactcacacttaaaatcaataaacgtagactggcccgcccaacggcaaattgcattcgacatatgtaagcgataaaactataaaatagcacaaacttatgcccacaataaacataaacaattccgggcgagagatgagccctaaaaccgatttgccaaatacaaaaatgtagaaccaaaaccgcagataccgcaggcgaattaccaagccaggattcagttgctatggccatagagtatagagttgttggtacatgcgtaaacaagtatttttatggggctccggccatggggcataaaaggatgccccacggctgtggaccagcacaggatgatgggacacggccataaaggcacttaattgccattttattaccacagctattaggccacagtcggcaaggcttggccagacattcagacattcagccagtccgtcagttagtcattcagtcattcagtctgctggactttcattagaagctccgagcgaggaactcctgccagcggattgcgcttcactttcgcgtcagaaattcgccattcgcagtgaggcatattgcaccacatttgcatcaacaacaacatccgctgaaatcactgtttcttgttgtttctctgtacactgagtagtacactgtacactgggtagcagatagtcggaacaatgtttttagaagttaacttggtagatgattacaattgatttctattgaatgaattaattcctataaaaaaattacttgctgaactaatttctatgtatgtatgtacatatgtgcgtagttttctttcagtgcacgccagcttttgctctttgtctgccacatgcaaagtggctcccttcagcgactgcagtgccatccggcg

SEQ ID NO: 36365 - DNA, 162 bp, DROSOPHILA
atgaatctgggggatcgtcgggatctctttgccttctgcattatgaaacagcagcagcagcagcagcagcagcagcagcagcaacaaccgcagcagcagcagcacacgagcaacctcaaacttgcccagcagcagcagcagcaacacaaatggcaacattag

SEQ ID NO: 36366 - protein, 53 aa, DROSOPHILA
MNLGDRRDLFAFCIMKQQQQQQQQQQQQQPQQQQHTSNLKLAQQQQQQHKWQH

SEQ ID NO: 36367 - DNA, 2418 bp, DROSOPHILA
ctgtgccaaaccaactgtgcacaaagcacacagccacgcccacaccgcagccgcacaccaccaccgcccacattagtttcagtagagcaacaggtgcggttgtcggtgtcttgaaactttcacatgccaacgtataaattttaatgaatgcctcataaaacaaaaacagggaaaacgaagaaaaataagtaaaacgactataacataagctgacattgccctgccgcacagagagtccttttggcgaacatggaaatgaaataagcatcatcaacatgacagttattcatttatttatttatttgttcgcccgtggccctggccaactaaccacagaaaataataataagcgattgcggcgccgataactctatgttatacgaggctcaggatgtagccctttccaacgaccattttcggcaaacaatacctttgggcccttgaagaagcacgagaagaacggcagctgaaatggcagcagcaaaagcaggagcaacagaacagaacagaacggaacagaacatccatgttgctcatacgccccgttgttcatacgccccgtgcgcccgttttgttcgctcgctcgtttccgttgcttcgggcggacgatgagaaatcgtgcggtcggctcgccattttctgatgggaaaaaacgagccccgttgcaaattcattagtgctcttacaggcgccgtgcacggttgtcgattctcgtggccgcagcgagtggaaaactcgggtggagcgcgtcgacgccgccgacttaaagccaaaccaaaacacaaatatcaaatcaaaataaatagctttgaaaaggaagagagcggatgctcagattatagtgtgcattgtgtgcttgaaatggagtgcattttagtgtaatttttttaacaaacaatacaagaaaatccgcccgagacggttgttagttaattattttcgctcgaagtaatcacttttgctggtacttttcaaaacggcgctgccgaaactggccaatatgcaacgtcgcatgtccatcaccatacgcgagtacaagttcttcaggagcttctcgcagaagttcgagaactggccaaaacgcaaggccgaggcgttatggcggaaaatgcgcgaacgcaagattgcaggtgagcagaaattggcatttgctgaccaccaagttaacgcactgacccaaattgaagggttgaaatgcatcgcctttaaagttattgtacctatataacaatacccaatcataaaaatagcattttctgttcaatgaaatcagtctaatgaaatagtttttataactatcgccatgccttgttcattccatagttacagcctttgtagtagctgcagttttctccatacagtcactattttttccagtgttgccctgcgtcaagggcgattttgtttggccccattgaaagttattaaatacattgtttacaataatggaaatatgcgagtctggatcattgtgtttctaatggcaggaatgcgcgcgcgccactcgcaccgccagcaattggctgtttatggtttttcggcaccccacaaggggatcctcccactccttcgggcacccagaatccccacattgattttggccgtttatttttggtaatgggaatgcggggcatggctatttccagtgcgcagcttgtacttatcagtcgacgcctcgcatttaaatcgaattattcgcatcgcccgttttgggattatgtgtatcaatatgatgggagatatggcaacaagtgctacgccttctactctgtcactagcattctgtcactgagtcaaccatcattcggtcatccagtcagtcagtcaatgtccccgctatgtgcatatgatatatccatgtacattccgccactgaccatcggtcgtcatcatcataatcatcatcatccaccggtttcgccgttttctttacactctagtgaaattgcgcgccagtcaagcaaagccattcatttaaataaagaaaattgtttgcgtgtagtaataaatggaaaaaaattattatacaattaatatgtatgtacgtgaacaagtaaaaaatgcgggaaattgttttaattataactcgtacctgcctccacgcttcgtgccttaaaaaaaaaaacaaaatttatgaatatgatgcttaaaatgtatatacaaaatgaaatggccaaaatggagaagcatttttatgtttgatacaatttctctgttctttaattcgatcccttggggaaatctcataacgaaccacctgtaagccaccagcattttccgctgctcagtttccattccattttcctttgccatttttgggttataacaacgtataaactttccattcttgttcgccgctttattttgtttttcttaattcggttattgtttgattatttttcttgcgaatgcgaaatt

SEQ ID NO: 36368 - DNA, 171 bp, DROSOPHILA
atgcaacgtcgcatgtccatcaccatacgcgagtacaagttcttcaggagcttctcgcagaagttcgagaactggccaaaacgcaaggccgaggcgttatggcggaaaatgcgcgaacgcaagattgcagtgttgccctgcgtcaagggcgattttgtttggccccattga

SEQ ID NO: 36369 - protein, 56 aa, DROSOPHILA
MQRRMSITIREYKFFRSFSQKFENWPKRKAEALWRKMRERKIAVLPCVKGDFVWPH

SEQ ID NO: 36370 - DNA, 4261 bp, DROSOPHILA
ttcctggttttttttaaggccgtggctcgaggcataaatacacatttttctctgccgataaatcatttaaatcaatttccgcctcttgccgctgcagccaggattttttctccaccaaatgagaaaaccaaattgtcaaacgcttgccaaaggcttgtaaatcgagttgacataacgcacttatcccccaataaaacatgaccgtgaatatagtagtagtatagtagtatagtagacatgcagctggtcaccgggttcttagaacggcgaatcggttgttatcacacgcggcttataaatcataagccgaaacaataggggaaatgtctgtgctaagtcggcttcattgagatgcctttcctcggaaataaagagaaaaaaacgaatgaaaagaaaaaactaacttgtcttggccaaagatttgcataaaatacgtaaattcctgcgcttcttgcgcgttccacttgacaatgtctaaaaattccgctgatgtttcctttttcgcattgtcccaggcttttggctttggctttcagcttgggcttcccaacaaggtagccccccgattggattggaatcggaggctggggccagccaggtccaccacgctcattatgcattcaaggtccttgcccgtagaggttgaggttgcggccctcgaaactgtcagcggcactcagtgtcgacttttctttattaaacctgactgactatattttaataagttaacttgttcttcttcctgctgcacttgccaaaagtcgtgcttcctccgcttgaaactcgagccaacttaaataaacatagtcttttgccctattaagaattatttataaacttaggtagtcgtgatatatattttataaatttctaaatatttttaaatcaattttctaagtgtattccctgcctcttccaggccaccattccattgcaatcgttttaccttgattgcggacgcaacgaggcatcgccggcaaccaaatcgaatgttgcctatatgcgcaccctgtcggcgccgaatggaggattcgccagcggcggaggaggaggagcagccagaggatctggtgctccagcactccccccgcagagtcagcgcaagagtctggcctgtcccccacttaatggccaggcggacacaataactccgacaccggcaactcataagctgacaaatttccaaagcgcattaaaaatcgaggagatggctgcggccaagggaacggcgatggcaacaggtgaatcgcaactggcgaccaccatcgaggatttgaaatctaggcgacagcgacaattgagcggcggcgacatggagacaatgctggcctcccaaccgatgtcgatgccaaaacgggtgggcattaatcatgcggtgctgacgagcagaaatgccataaccccgcccccggcgtccgcttcatccgcatcccaatcagcggcctccgttcactcggccaaaggctcctcctccgccggcaccacacccggttacctggtggatgtgaccaaaaaaggatccacatcgaccatttggacctcggaggagtccattctgcgcagcgttggcgccgtcgatgaagacaataagtgagtgccaacattgagacattacgctcggaaaaattgagggaagtgcctgaaaagtaacttagtatgcttgctgatcaaaaaccattacttttgaaagatataatctttaacttgagttcaaagcacgaggtcatgcttttatttttctcttatttaaacttacaagcaagcaatgcaatttgttccgagtgtaatggatatgcctttgaattgatttgtcactgccttgattcaccatcactttgcagctccacatcgtcttcctcggcctgcgaagaggcgacgggtgtcctcagttccggcaaatcgggcatttcgctggactcttctggactggacaacgataataatgagagcggcattggcacagccacgccaccaaaggatatgtctcactactggaagagccaccatttgcagcaccaccaccatcatcaccacaggaagtgcaccggaagtgcccaggacaacgagtcggtcagcagtttggaggcgctgcgcaagatgaagttccagaagagcggttcggtcgcctcctccgacgatcccgatgtcctcgaagtccttagccaatgcggcagtggtggcgaagccaatgaatcacaggatgacatgttggacgaggaaaaggataagatgagcaaatctcaagactatgacgagatatgggattgcgactgcacggatggcgatgccagtagtgccagtggtggtggaggcgtcaccgccaccccagtgattctgcgacgcaagtacactgcaccaccaccgattctggtgcccagaacacagaggagtcactccctggaccactaccattcaccgcaaccccttgtgcatcctcgaaaagtgctgcccatccaccatcatgccttgaagagcaaggaacgtggacagttatcgctggtcttgcgtcaggaaccattccagtcacttctgagtccttcggctactgccgcaaatcagttacaccactttgtggagttgccatcgcccagcagtgcctcgctgcacagcggtttgggtgattctggtggcatccaggagctgtgcaccaagtccaactcggcgccgatgctgctcaaggagcgcgaaatgagccggcgattcgataattttgaagctcagcatttggtgagtatctcgaattgaaagcaaaaacaactcgagggcagattgattgaatttttgaataggaataacctagcttcttctatcatggatcttggccatcaaagaaaaatgtttgttccaaagaagagtcaatctgtaatttaatgcagtcattgttgactttaaaaagctgtgcttatttgttaagatacattttgtagtcttttgtttagctacactctagttcgtaaatcgaatttaaaacttgtattctgatcatgctcaaaatctcagagttccacttaacttcttattcagttcaaggcaacttgtacaatttatcttgctttactcatgccaagttctgagaagctttcccggcaaagggcatcccaatccgcttatagatcctccgcagcacttatctacccgccctcgcatcaacttgattaccagacattaatggacattctctataccccgatccctctttttttcccacagacgctgcgctattctcgttcgcagagtgatcgctatttagcaggtgagtgagtagtgagtagtgaatagtgaatagtggtacgtggaacgaggagcccccaacgagttctctttggccacaaaaccagccgggctaaatgagttatttaaatggcctgaaccgggccgggacatcaaggctgaatggctgaatgcctgatttgatgcgccggtggtcctgccagcgaattagcggtctgttattaagcctgagtggtttataataacagtctgtccgatggggcttgattcataatttctataattatttgtgagcctgatctatatgtgatgggctgccacgagaaggaacatatcatacggttttgtttggggcagcaaatcaatttccaacttttgctttcatttcgagcaaacaattgaagggcggccgtcatttaaattactttcatgttcgctgtccggcaaacgtgaatatcaagagcaccagcaaacggctctttttgcgaatttccaacacttccgtcaacacttcactacaaatggcaccatcccaaacccaatccccaaccgaaaatggctgtcaatctgtcaattccgcgcaccatattgtccaaacatccaatggcggacgaacactgagaaaaaatagtgcaggagtccaaatacgatgtttatatagtcatgggaatcagagtgacgattcttagtaagaagattctgaaggtcagagaaatacatccccataagcttaatctaaaaattcatattcatatagaagttttagtaatatatatcattgaactacatctccaacttatggtggttctatttgaaagttcaataactggatcgaaataacatttgctgaatgttttcctttgtgtacatagacatatctatccacacatattgcctcttgaccaaagctcgacggttgatgatgatgatgatgatgatggtgtgatggcactctttgtgctaaaaatggcgtataaatgaatgggagaacaaaaattgaatcacaaactggacgacgaagtgtcctcca

SEQ ID NO: 36371 - DNA, 1527 bp, DROSOPHILA
atgcgcaccctgtcggcgccgaatggaggattcgccagcggcggaggaggaggagcagccagaggatctggtgctccagcactccccccgcagagtcagcgcaagagtctggcctgtcccccacttaatggccaggcggacacaataactccgacaccggcaactcataagctgacaaatttccaaagcgcattaaaaatcgaggagatggctgcggccaagggaacggcgatggcaacaggtgaatcgcaactggcgaccaccatcgaggatttgaaatctaggcgacagcgacaattgagcggcggcgacatggagacaatgctggcctcccaaccgatgtcgatgccaaaacgggtgggcattaatcatgcggtgctgacgagcagaaatgccataaccccgcccccggcgtccgcttcatccgcatcccaatcagcggcctccgttcactcggccaaaggctcctcctccgccggcaccacacccggttacctggtggatgtgaccaaaaaaggatccacatcgaccatttggacctcggaggagtccattctgcgcagcgttggcgccgtcgatgaagacaataactccacatcgtcttcctcggcctgcgaagaggcgacgggtgtcctcagttccggcaaatcgggcatttcgctggactcttctggactggacaacgataataatgagagcggcattggcacagccacgccaccaaaggatatgtctcactactggaagagccaccatttgcagcaccaccaccatcatcaccacaggaagtgcaccggaagtgcccaggacaacgagtcggtcagcagtttggaggcgctgcgcaagatgaagttccagaagagcggttcggtcgcctcctccgacgatcccgatgtcctcgaagtccttagccaatgcggcagtggtggcgaagccaatgaatcacaggatgacatgttggacgaggaaaaggataagatgagcaaatctcaagactatgacgagatatgggattgcgactgcacggatggcgatgccagtagtgccagtggtggtggaggcgtcaccgccaccccagtgattctgcgacgcaagtacactgcaccaccaccgattctggtgcccagaacacagaggagtcactccctggaccactaccattcaccgcaaccccttgtgcatcctcgaaaagtgctgcccatccaccatcatgccttgaagagcaaggaacgtggacagttatcgctggtcttgcgtcaggaaccattccagtcacttctgagtccttcggctactgccgcaaatcagttacaccactttgtggagttgccatcgcccagcagtgcctcgctgcacagcggtttgggtgattctggtggcatccaggagctgtgcaccaagtccaactcggcgccgatgctgctcaaggagcgcgaaatgagccggcgattcgataattttgaagctcagcatttgacgctgcgctattctcgttcgcagagtgatcgctatttagcaggtgagtga

SEQ ID NO: 36372 - protein, 508 aa, DROSOPHILA
MRTLSAPNGGFASGGGGGAARGSGAPALPPQSQRKSLACPPLNGQADTITPTPATHKLTNFQSALKIEEMAAAKGTAMATGESQLATTIEDLKSRRQRQLSGGDMETMLASQPMSMPKRVGINHAVLTSRNAITPPPASASSASQSAASVHSAKGSSSAGTTPGYLVDVTKKGSTSTIWTSEESILRSVGAVDEDNNSTSSSSACEEATGVLSSGKSGISLDSSGLDNDNNESGIGTATPPKDMSHYWKSHHLQHHHHHHHRKCTGSAQDNESVSSLEALRKMKFQKSGSVASSDDPDVLEVLSQCGSGGEANESQDDMLDEEKDKMSKSQDYDEIWDCDCTDGDASSASGGGGVTATPVILRRKYTAPPPILVPRTQRSHSLDHYHSPQPLVHPRKVLPIHHHALKSKERGQLSLVLRQEPFQSLLSPSATAANQLHHFVELPSPSSASLHSGLGDSGGIQELCTKSNSAPMLLKEREMSRRFDNFEAQHLTLRYSRSQSDRYLAGE

SEQ ID NO: 36373 - DNA, 3190 bp, DROSOPHILA
gtcacatatgacaacacttagagaaattggaattagaaatgaaaagggcctttaaaagatccaggaactcattcatatcaaaagaacaaatattatgttttcacagtgcatgattccttggcattgccaattgtttgtcatatgcgtcctagcatgaaattaataaaaagaaattgcattgtacggcgtcgaactgggaaatatggcgacccacttgagatgtccccaagccaactctctcatacgtcacaagttgagttcgaaatcaactgaagtcagttgaaccaaactcgattggtgtgtccggctctgtttgcctaacctgtgaacccagaaccgccttcacaaattagccagccaacttctcgccaatgcccgagtggcccccgtcgataagatcttagagtatgcggctttctttcaagcccccagaagcaatagactacctctgagaatttattgcctgctaatgctcgatcgcatttgtctgtgagttgcccttctggcaacaggagcagccacgaaaaaaagggagaaaattgtggcaaaagggggaaaaacaagggctcgcaaacaaaaacacaattgttgagtaatgagcactgcacgttattaatgtcactggggatgcgggaagaagggtcttcggaaagggttctatggcaacagggaccagtttgttgggttctctgggtcttgggccacgatttttaattaagtaattcgctgactttgttagccctgtgggctccatctgtctctgatcttctctggcgaccatacggagttctcttccagtgcttcttttttttttggttttggttcgtcttttttagctgtgtttaatctggctaacaaattgcttcatttcaatttatttgcattcgagtcgtgtttcgctgggagttcgtggctgcagttttctgtttggatgcgagtgtggaaaacctttttctgcctccgcggtcgtgttctaatttatttgtctttgattgtgcccatgtctctccgggatgtctcctgcggtcgtgtcctggcctttctttttgtccctgtttgcgggccaaattaagcaaacatacatcatagtcgggggccattagaagaaggtctttgtggacgcgaatgtggcgctttgggcgcgattaatagaccattgccttgatatatgtgcgcaattagagcgctaatcaaaacctaatctccgccacagtgcggaatttatgggtcttgcatacatggacagaaaactaacaacgaaggggattaataggtggactaggaactgctaaatgtaaaatagcatgtctaattgtttgtttaccgattgctatatagatgagccaaaacattacatttttaaagcaaaattaaatccctgatatccattatttctccatgtgcacctcactaacaactgccattctaatttcagcgggaaatcaacgaagtcttcgagctgcgcaaggtccagcgtttggagcagcagctccgtgagcaactggaggagcggctatcgcaggcaggagtccagcagcttgatgaattgtctcgttccacggaatcagatagcggctttgacagcagcagcaccacagcaacatcgggcacaccagcaacagcaacagcagcaggagctggagcagtcacatcgggcaagccagtgacaactaaactaagggcactcccgccgccgcccctcagtcccaccaaaaccacgacgaactccatgcccactccacctgtccaggcggacgatgttaacatttgggcctgcaagttcctacgtgatctggacagcctgatggccgccggtgataagctgcccccgcatttggcggccctggccgaaggatccggttccggttcggccagcagctcgcccacctccaggacggcgcccatcctcctgtccgcagctgcctcggcggccatacagagtcgactcggcaagggctcatcatccatcatggaacatcaactgcagcagcagcagcagcaacagaacggactcgtcttgaaaccagagaagcacgtgagtacacagttcaaaatactttgtaaataagatgtaagaggcagcagacccacatcttcagggataacatccttaaaaagtttcgtgtatcaaattcagtctacctcaatttcattcaagggatttaaaaaatattgaagctcttcgcataattagagctcagcagcaattttacatacacgtaatctatgcctatttgcataacttttaaattgcaaattaccatttgaaatttcgaagaaggttaaaccgctggtgtatgcatatgttctgcagcttacgctcagatttcctaatctcaaatctctgaaattcccgtgtaatctctggttgccttaatttcgacatgctagcgagcaaacagcgaagcatattttatgaatgtgggctagataaaatgcgctcaagacgaaggcatttaatctgaatcacaacaatgttgtcaacacacacaggcggcagcaacacaaactttgggggcccacacacacggcatgcccccaaaaagggaccaacttcccccagaaattcggtgagtgaggaatgtgttctttcaagaactgccatatgttccatccatccgtccatccatccatttgccggatgcgcaactgaggcgcgtgaaatttatgggcaacggagtagaggagtcggagatgatgatgaggatgagcagcaagatgaaagtgggggccactgaattggtctgttgatagacagtcgtcactcggtggctggcacttgaacgagttaaactttgaactgtttgaataagatagacaagtaggcaagttttataggagttgcattttcgggggcttcgcagcgccataaaatgtatcataaaatgctctaattagtgcagttcttactcagctttagattgaaagacaattggagattgattgccgagcatagagtcgtaaaatattctctaattggaatcgtagggtcgcggaggaaaaaagggcaaagtttatgaagatgctgcaagttcaactctgtgataacccaaaaggagctgttgctattagaatgccttggaaattaaatgatgacaacaggaaatctaatattaatattaatttcgtattaagctataaaaacttgtaactaaacttacactatatttttccaagtgcttcggttttt

SEQ ID NO: 36374 - DNA, 666 bp, DROSOPHILA
atgtctctccgggatgtctcctgcggtcgtgtcctggcctttctttttgtccctcgggaaatcaacgaagtcttcgagctgcgcaaggtccagcgtttggagcagcagctccgtgagcaactggaggagcggctatcgcaggcaggagtccagcagcttgatgaattgtctcgttccacggaatcagatagcggctttgacagcagcagcaccacagcaacatcgggcacaccagcaacagcaacagcagcaggagctggagcagtcacatcgggcaagccagtgacaactaaactaagggcactcccgccgccgcccctcagtcccaccaaaaccacgacgaactccatgcccactccacctgtccaggcggacgatgttaacatttgggcctgcaagttcctacgtgatctggacagcctgatggccgccggtgataagctgcccccgcatttggcggccctggccgaaggatccggttccggttcggccagcagctcgcccacctccaggacggcgcccatcctcctgtccgcagctgcctcggcggccatacagagtcgactcggcaagggctcatcatccatcatggaacatcaactgcagcagcagcagcagcaacagaacggactcgtcttgaaaccagagaagcacctcttcgcataa

SEQ ID NO: 36375 - protein, 221 aa, DROSOPHILA
MSLRDVSCGRVLAFLFVPREINEVFELRKVQRLEQQLREQLEERLSQAGVQQLDELSRSTESDSGFDSSSTTATSGTPATATAAGAGAVTSGKPVTTKLRALPPPPLSPTKTTTNSMPTPPVQADDVNIWACKFLRDLDSLMAAGDKLPPHLAALAEGSGSGSASSSPTSRTAPILLSAAASAAIQSRLGKGSSSIMEHQLQQQQQQQNGLVLKPEKHLFA

SEQ ID NO: 36376 - DNA, 2714 bp, DROSOPHILA
aagcgctttttaaccgtttcacttgcccccgaccagaaaaggcggaaaaataaaatagcataaaaaaggaaataaaataaacgtatatataaatagatatagacaaatgccggccggttggtggagttcttccgtttgacaaaagttcaaataaccttagcccctatgcgaaattcgattcgattcgctgggaattgattagcatttatgagggtctggaaagatgtggtcttttcgattaaagttatgaattttaaacttaagggtaaggatcttaacataccgagtgctatagaaatagcgagtgccttgtgatcgaaaatagctactttgaaatatcacatgtatcaaaattagtcatggtttgcccatatgaggtacaaatatcaaactgatggcgatgacccattttcaagcttcaaaagcgacataaattcaaaggccccatattcgttgggcgtgactctccagttccataatagaactccactgaagataaataatgggcaacactcgggaaatggttgagtttggtgtgagcaataaattcgtgcatgtaaataattgccggcaattttttcgagcccgtacgatattaattaaaacattcgcgcaggcaaacacatatgccatatgaaaaaggagttaagtccacacatgtgcggggcctgttgcaaaatttatgacaatttaaatggcacacatttggtggacaattcgcgtcgattagcgcagaaattttcgcgaattcggcttaagccacatgtgtcttgaattgctgctttttcattttcctttgcagttggaaaaactgttcggggtgcgccgtccatacaatgacagctttatatgcagatatatgttcaagattagccaagcttataatcttttgtgtgtgctttacttttcacttacagagcaacagcaggcagcgcggcaacatgacaaagtcaagaagttaactaaaatgcagtgcaatagcaatacaaatcaaaacaacatgacagcagaagatgtgaaaagtgcaattagcaacagcagcagcagcagcagcaaccaactacagcagcagcaacatcaaacgcttatcaacggccaggcagcgactgtgccggcagcaacagccgcagcaacaggaggagttgcagcagcaacatctggccgcacgtcagcaatcgccgctgacacgacgcgctacaaatcgggattaagtgatgtggcggccaacggagacgttgatggtcggccgacttcatctgccaccacatctgttgtggcaactggcgctccgagcgtttttagcaccggttgtgcaaccatgccgcgaacccgccaatacggaagcaatgttgccgctgcacttgcaacaggagcaacattggcaacatcggcaacatcggccacatcatcggcaacgggagcaacatcgccaggcagccacaccatgacagctgataagaaattcttaagccaggcggcgcccgttcaggggcatcatcatcataagctgcaatttgccgataaggccgactccgaattggccgcactggacaatctggacctggctcacagcctggatttattggacgtcgacggcgaggatccgtacggagctttgcaggattatctggagcgtgtcaaggtgagtgcctctgatgttgttttgttactaggtatgggaaatgcagagctgtttcgttcccaagttgcgtaatttgtgacttaaatggtggatactatttgggaaatgaagcaagggttgggtggctgctccacttgactcagtctgttgaatggtgtggctcgatttgtggcatttttacatgataataagcgaccatttctgtccccatcaaccaaacgcacacataagtgcagtgagaaaaatcagtgtggaaatgtatcaaatgtatcatgcctaggcatgaatacatttgattgtttttcattcacagatatattttacccatttctcttgttcttgatccttttttttcgctgtgtaatcacacaattgcctgagacccagcctagtgccagtctttcattcaacgcccctccccgcgtccgaaacccccgcccctgctgtcaacacggcgtgattttgcaaatgattattttgcgtgacagagaaatgtgttaaggcgatctcacacacagccgtaatatgtaacgcatacgccgtgttgcacgcccgactttccgctgccgctttggctgtcgtttgggttgtcgtcagcggtcgtgtacataaaattttatgtttctttaccggaaagcgcaatattacacatacacatcaacgatgacggcaacgtcaacggccggggctttaatttttcttttcttttattttttcctcgccttttccctcgtgctgtcttcttttataactgtttcgcatgaattttcctcatagctgctagattttgttgttattattatgtttatttgccgctcatggcggaagcataaacgcacgcacgcgcattttccccagcagtgcgtttacgattcgttcttgtggtcagtggtcggaaaaaaaggaaaaaagtgtgcaagtcgcactatgaatcggattatatcgattagattctaaattgcgttcctaaaacgtaacataccaggaaattcatgttatccgcttcccacaaagtggtttaaaagaatgctgtttaaatatctttcttaagatacttttttcgaatgcctca

SEQ ID NO: 36377 - DNA, 714 bp, DROSOPHILA
atgacagcagaagatgtgaaaagtgcaattagcaacagcagcagcagcagcagcaaccaactacagcagcagcaacatcaaacgcttatcaacggccaggcagcgactgtgccggcagcaacagccgcagcaacaggaggagttgcagcagcaacatctggccgcacgtcagcaatcgccgctgacacgacgcgctacaaatcgggattaagtgatgtggcggccaacggagacgttgatggtcggccgacttcatctgccaccacatctgttgtggcaactggcgctccgagcgtttttagcaccggttgtgcaaccatgccgcgaacccgccaatacggaagcaatgttgccgctgcacttgcaacaggagcaacattggcaacatcggcaacatcggccacatcatcggcaacgggagcaacatcgccaggcagccacaccatgacagctgataagaaattcttaagccaggcggcgcccgttcaggggcatcatcatcataagctgcaatttgccgataaggccgactccgaattggccgcactggacaatctggacctggctcacagcctggatttattggacgtcgacggcgaggatccgtacggagctttgcaggattatctggagcgtgtcaaggtgagtgcctctgatgttgttttgttactaggtatgggaaatgcagagctgtttcgttcccaagttgcgtaa

SEQ ID NO: 36378 - protein, 237 aa, DROSOPHILA
MTAEDVKSAISNSSSSSSNQLQQQQHQTLINGQAATVPAATAAATGGVAAATSGRTSAIAADTTRYKSGLSDVAANGDVDGRPTSSATTSVVATGAPSVFSTGCATMPRTRQYGSNVAAALATGATLATSATSATSSATGATSPGSHTMTADKKFLSQAAPVQGHHHHKLQFADKADSELAALDNLDLAHSLDLLDVDGEDPYGALQDYLERVKVSASDVVLLLGMGNAELFRSQVA

SEQ ID NO: 36379 - DNA, 3873 bp, DROSOPHILA
aagcccgctggccaataaggtagcagttagtcgagttcgcaaccggaccaaatgcaaatgcggaacggcaccgaaacaaaatattctaggataaacatagaagtggcttttttactattaaaaaccctttcctgatgaaaataactattgggtttatgtcaaaagtttaataatctgctataacttcctaaaatatttattcaaatcagacccagcactcaatattttctcaaaacatgaaatcgctagcatatagccatccttttcaattctatctacatagcatataaagcactcagtgattttttctctcggtgagcttcctgccacaacaaattaatcagtgagtgtcggagtggctaggtgcacttcggtgggcggcaaacggcactggggaactctgggatcttgtgagatcagcaagatttcggctacctgctgtcgagctgccctacggccaaaaatcgcgaatgcagcgaatgcaattaaatgcagtttgcggctcgcagggtgcaggttgcacttttctgttttcagttttctgttggctggtccgcacgggcagttaatcatgcatcgacagccggctttctgccggcaaaacagcagctcaacattttggcggtcacttagaagtggtgcccgtggaaagtgttgcgcaaaaaacggctggcaattaaaacacgttgtggctttgcctctgcttttcgctgggtatgtggatatggaagtggatgtggatgtggatgtggctcctgctgccatgacgcacagatggcgatgctggccaagagtccacactgtgatgtgcgcagcgaatcggctttcaacggagctgcaatccacaatccactccattccgcggcaggaatgaggaaacgttttggtgaaaagccgagacgcgttgagaaatgtggttaattgatttttgtttttttgtgtaattaatttatggtttccttttcgattcgcctggagaatcgtcgagtttattgtttatatgcgagacaggtgtgtgatggagttacagttgtgtaaattgaatattaagttcttcagaagtcttgtatattttagattatattaatgcttttttctattatcttacaatttagtgcaattattttactaatcgaatggcttctccaatctctgaatcttgcagaatcaccctgcatggctatacgacaatgtccaatgctcgcgagctggcattgatcgagaaatgggctgacattgcaacgccggcgacgccgaatcggccaacactatcgccaacatcgccgccagcactccatcgatccatcgttaagttctgctgctgtccgcagcggaggcgctacaatctgaagcaggccaagagccacgggggtagcaacaagttgaatgtgaacacgctgcatgccagaaatatattcgtcgatagcgatttcagctatattgatgatgtgccgcggcgacgccaagattgccacagcgattacgacgattgcaactacgactccgactgtggcggcgataaagcagatgatgaggccaatgatatcgctgctgctccaagagacgacggaaatgtggcgctgatattaatgaatcaacgaaatctttccgaacaatggcggcaggacaacaaaggcaacagcaacagcaacaaagcagcaactaaaacttgcgctgtcacaaagagcccgcaaagtggcaatgagcaacagcaacaccagcagcagcagcagcaacagcagcagcagcgacaaccaacccaaagactaagcaatagcttgcaacagcagcagcagcaagagcaacaattgcaacagcaacagcaacagcaacatagcaataaggaaaatacactaagctacgacaacaacaacaagccgcactgtaattattgtaaattacccgacaccgccgagccccaaacgaatagcaatagcaactcgaaaattgattcaccgaagtcgtcgcagaataaaatgacaattacgacagcgacagacacagaaacagcaacggcaacaacagcaactgcaactggcgagtgtgggctgccagcagcaacatcccaagagtttgtgggtgctgccacagaagtgctgtgcaacgataaagcaacattgacagcggcgacaccagcggcaactgcaacaactgcagcaacaacacctaagccccgcattgcagcgcgtccgaccacgcccagccgccttaagactgtgatcaaaacgacaatggtgaagcgaagtcctagccatgactcaacggcaacagcagcacatgtgttgctgccgcacagctgcagcagcaacagcaacagcagcagcaacaacattggagcacatgacgagcccagacgttcggttagggagcgcatcgccgcctttgcggcaggaaatggtaagtttcttcagttcgcccgcttaatcagctttggcaactaagtcgctttgtcgggcggggcggaaatgttgcacatatagtgtacacactgtgggaaatattggactgggctaggctcacactcattaggctattaactagacgcattcttattgttattaattgatggaagccggggctctgtctgggcaactgtgggatcataaaaagtatctaaaaaagtacataaaatatatggagcatataaaatacttatatggaaagcgcttgggttataaacttgtagtgatgaaactctagtgatgatattttacttccgtatatgcacatatgtgatatttaagggaagtcattgcctaaacgtgatttttatcgctatcctaagtgctttaatcatccccttagggcagccaagtcaccgaaggtcatcagaactgaaagccagctcagatcctcgtcatttcctgttctgagatatacctgtttaccgatccagagataatacataaataccagacatttgaattacatttcagagaatgaatctcaagcatctgaatcacttttgcacgaccaattacttgtgaattcagtgaaatcaattgaaggcaattaaatgcgctactaaaatacttggtaaataatttaagtattgacacgtaagggaaatttatagaaactttgggcgtgtacataacttttttttgttacttttcctttacattgttccgacttggaaaaaagtgcatgaattatgcatgacgtggagcctttggatttccgttaacatggcacacacctttggcatttaatataaagagtcgaatctattacaaatcaattaaatgccgcaatgtttaataaaaagccacttaaggcggcattaaaaacttacccacaaactgtctgccgcccattgtgggcattaataatgtgaaaaatgtttattataaatgcgtctgcataggaccggcaatcgggaaagtcgtaaaagtcgaacgcttgagcgtttgggtgcagctcaaaaacgcacttgcaggcggcccaaaaaaaaaaaaaaaaaaaaacaaaacgctgaaagaaaaacactccccggtcagcattgtcaccagccgcaaagtgcactccatttgattccagccacgccccataaactgcacttttgcacacaaaaaaaaaatggagaaataaaacagcaagacagcgacaaaaggcgcaacaggaaacacgtacacacggcaatcgacgtcatgagtgcgtattatatcattttgataggcaaatgaggcttgaaagccgccagagcccatcggttccaaagacccaagcccccaaggctcccagctccaagagccctgcccttagtttgccggaaaagtaggatgtcgaatatataaatacacttgaagtatctggaagtattcattaaccaagatgtgttgaataataaataatatattaacaagaagcaga

SEQ ID NO: 36380 - DNA, 1311 bp, DROSOPHILA
atgcgagacagaatcaccctgcatggctatacgacaatgtccaatgctcgcgagctggcattgatcgagaaatgggctgacattgcaacgccggcgacgccgaatcggccaacactatcgccaacatcgccgccagcactccatcgatccatcgttaagttctgctgctgtccgcagcggaggcgctacaatctgaagcaggccaagagccacgggggtagcaacaagttgaatgtgaacacgctgcatgccagaaatatattcgtcgatagcgatttcagctatattgatgatgtgccgcggcgacgccaagattgccacagcgattacgacgattgcaactacgactccgactgtggcggcgataaagcagatgatgaggccaatgatatcgctgctgctccaagagacgacggaaatgtggcgctgatattaatgaatcaacgaaatctttccgaacaatggcggcaggacaacaaaggcaacagcaacagcaacaaagcagcaactaaaacttgcgctgtcacaaagagcccgcaaagtggcaatgagcaacagcaacaccagcagcagcagcagcaacagcagcagcagcgacaaccaacccaaagactaagcaatagcttgcaacagcagcagcagcaagagcaacaattgcaacagcaacagcaacagcaacatagcaataaggaaaatacactaagctacgacaacaacaacaagccgcactgtaattattgtaaattacccgacaccgccgagccccaaacgaatagcaatagcaactcgaaaattgattcaccgaagtcgtcgcagaataaaatgacaattacgacagcgacagacacagaaacagcaacggcaacaacagcaactgcaactggcgagtgtgggctgccagcagcaacatcccaagagtttgtgggtgctgccacagaagtgctgtgcaacgataaagcaacattgacagcggcgacaccagcggcaactgcaacaactgcagcaacaacacctaagccccgcattgcagcgcgtccgaccacgcccagccgccttaagactgtgatcaaaacgacaatggtgaagcgaagtcctagccatgactcaacggcaacagcagcacatgtgttgctgccgcacagctgcagcagcaacagcaacagcagcagcaacaacattggagcacatgacgagcccagacgttcggttagggagcgcatcgccgcctttgcggcaggaaatgggcagccaagtcaccgaaggtcatcagaactgaaagccagctcagatcctcgtcatttcctgttctga

SEQ ID NO: 36381 - protein, 436 aa, DROSOPHILA
MRDRITLHGYTTMSNARELALIEKWADIATPATPNRPTLSPTSPPALHRSIVKFCCCPQRRRYNLKQAKSHGGSNKLNVNTLHARNIFVDSDFSYIDDVPRRRQDCHSDYDDCNYDSDCGGDKADDEANDIAAAPRDDGNVALILMNQRNLSEQWRQDNKGNSNSNKAATKTCAVTKSPQSGNEQQQHQQQQQQQQQQRQPTQRLSNSLQQQQQQEQQLQQQQQQQHSNKENTLSYDNNNKPHCNYCKLPDTAEPQTNSNSNSKIDSPKSSQNKMTITTATDTETATATTATATGECGLPAATSQEFVGAATEVLCNDKATLTAATPAATATTAATTPKPRIAARPTTPSRLKTVIKTTMVKRSPSHDSTATAAHVLLPHSCSSNSNSSSNNIGAHDEPRRSVRERIAAFAAGNGQPSHRRSSELKASSDPRHFLF

SEQ ID NO: 36382 - DNA, 2477 bp, DROSOPHILA
tgacggtggggtcggcggtgcaggtcaccgcctcgctgctcctcaataggcaggctgccaggacgagaatggcgaagatgatagttgctgctctcatagtggatttgttgattggggattgttgattgatggtgatgtcggattttggttaggcttttatagtggcttgatcgaggtcaaggggcgctcttcctatctagcgattttcgctaatatgtacgcagctgtttctatacgatcatataaaatattagacattgtttgctgccaaatcgtaaactatcggctgtgaatccaagttgagaaatgaactagtttcacctatttactcaagaatagaaaatgagtatattttaatttatctgattgaagcctggtttgacttgtattcatatatgataaaactctcatcagttcgaaatatacatgacttaaaatttgtcaaaaatggtgaattttttcctaagtgtatgtatgttattagaaatggatgacttcttctttaatatttgccttgtacactatttgctattgaatgtgtacccacaagatgatcaatgccatctgtggatagttttttgcttttcggttgaaggttgtgtttgtttgttgtacaatacaattagtttaaatggtttcaaaattattttagaatagaaatagacttgaacttatttgtgaaatagattttctttatacataaaacaaatgattttatcaaaataaagttttaattattatgtatttctgaggtgaaactattaactacccaataaaaattttttcaaagagatatacttcacgttgtcgttaaagtaccaattagaagagatatttttaatttttgtaataatattttttctcctttgtttgaagacaatatacttatttctacacagcgaactcttaaaaatttgttcaaactatttttgttgttggatgctgaatataggttttatttagtatttttttttaaattttataaaatcgaatgttggctttagcccgattggttttgcctcctgcgcctttgggccctcctcctcctctggtccctcctcctttgtgcacgcctcctcctttgagcgcgcctcctggccgccatcctcctcctccttctggccacagcagccgcgttgtttgaagtgggtgtggagtcgctgggcgacgtggagtcactaggtgagctggtcggagctggagtgacagtgccgcttggcgaagtaggcgttgtagatcccgccggggtcgcatcggtgcttcctcctgtggtgggtgtcgtggtatctgttccatctgcgggtttcgtagtggtattagcggcctcagccacgcactccggatcgcttggactggtggtgcagtcgatgcatccagtgacattggggtcggcggtgcaggtcaccgcctcgctactcctcaataggcaagcgaccaggacaagaactcctgataagatgatcgatgtggccctcattttcagattgatggtgtcttcggatggtagcacggtcttatataccgctgtgatgattccaggtgacttataaaaccaaagaatatatgcaaatttacccaactggtgctatcaaatgattgtttttttttgatatctattgtatctatataattgtacaagaagatgatagctaaccaattgtcatctgctggtggggacttttgttggaaatatatacttgttcaatacgtttatcttatacaaataattgccaaatttattcagctgttcctatcgacttttggcttatttctccgaattcttcactcagaacttaccctgatcggcgtagttattaaagttattaaaggtacatcacagggatgtcccatcttcagagtccattaaatatctcaatcatttgggattgttaagtgcggcggatgcaagtccataaatagttaatatgctatttgtttaggtacaataatcccctgttttagattcatggcttttatggcataaatccaaaggttttctttttataatacataattgaatgctagtttatgcagctttccatttgccaggcacaaaataaaggcagatattaatgcagaaaactaccaggcagaaagttaatagcagtattttgcactttaagctcgcactgggttaatttcccttatttgcgggtatcaaaattttatttgagtacaaaatatgtttaaattttagattcgcgtgtaagatttactttatgacttcccaattgtttggttgttttgttttattttataattatcatgacgtcacatcttacatccaagcgaagcgagaacaatgagcgtgaatattttaaattcatatttcgcaatttaacgtagatgcgctgaccagctctgatttttcagttagtttcgcttttagctgatcagcgaacggttgagccatggatttgtttagctctctgctgctgtgcctgggaattatttcattacccaatgtggtaagtact

SEQ ID NO: 36383 - DNA, 477 bp, DROSOPHILA
atgagggccacatcgatcatcttatcaggagttcttgtcctggtcgcttgcctattgaggagtagcgaggcggtgacctgcaccgccgaccccaatgtcactggatgcatcgactgcaccaccagtccaagcgatccggagtgcgtggctgaggccgctaataccactacgaaacccgcagatggaacagataccacgacacccaccacaggaggaagcaccgatgcgaccccggcgggatctacaacgcctacttcgccaagcggcactgtcactccagctccgaccagctcacctagtgactccacgtcgcccagcgactccacacccacttcaaacaacgcggctgctgtggccagaaggaggaggaggatggcggccaggaggcgcgctcaaaggaggaggcgtgcacaaaggaggagggaccagaggaggaggagggcccaaaggcgcaggaggcaaaaccaatcgggctaa

SEQ ID NO: 36384 - protein, 158 aa, DROSOPHILA
MRATSIILSGVLVLVACLLRSSEAVTCTADPNVTGCIDCTTSPSDPECVAEAANTTTKPADGTDTTTPTTGGSTDATPAGSTTPTSPSGTVTPAPTSSPSDSTSPSDSTPTSNNAAAVARRRRRMAARRRAQRRRRAQRRRDQRRRRAQRRRRQNQSG

SEQ ID NO: 36385 - DNA, 2459 bp, DROSOPHILA
gccaaaaaaaaaaatgtaagaccatatttttctaaattctcatcaaacaacaggagaaaacaatgcaaaaagtcgaaacagctgtgtcaataattcgatttaattgatatgctatatgatatatatatatatattatatatatacatatataatgtcgatgctaacacttaaatcaactacattgcaagagtagctttgatcttctattctggagtcttgatcctggcagcttgcctgctggaaagcatcttagcggtcccaccgtcgtgggatgcatcgactgcaccatgatgcatgaccttctccaccaacaacgtggaaggcttagccgagggattcagctccaaagtcgtttgaatcgcgaatcccttgaactcggaatgcgtggctggtggtaccactttgaagtcccccaccgcaaatggtggtcagtgaacgtttccctggaaaaaggtcaagtgttgttcattttcaaatagattacagctttgattgttaaataaaattctgcgctatttctgaaagatccctttttattccaaactgcccttcctagaaggttttcttgagttggtatttaatttttgtgattttgtgttgatcttttagtagtgcttaatcgtagaactgttcaaggcaagacatatagcatactttttggatgacgctttttgactcaacttgaattacccattattttagtagatcagacgtcgacttgtaaatttgaaataagagatattattaaattaaaagatcagtttatcattggttcttataaaaatataattttttatttatatcatcatgaaatatctacatatgtatatatctttattcaaataggaaaacaaccatttcaattgtaattttattttaataaaatctaatcactcgattgggtttctcagttttacaataatagacaaacgtttgatttaattttcaaatatatttatttgataaacagttttacaattgtaaacattctaaccatttttaaccaactactacgcgaacgtttccgcgactgctcctggagttgccttgcctggcgttgttattcctgcgcctgcggttcctgttggtgttggtggagcgcctgccagagcggccgttggagctggtggatcgagcggtggtgttgatccgaatgcgacggttgacggagtagcgcaggttgctaacgcggacgatctttcggcttccggttccggttccgcttgatgtcgttggcgcagtggtggtggtcgcaacggtgctcgttgctggagccactgtggttgtggtggatgtggcggcggctgcctcagccacgcactcggaatcggttggattggtggtgcagttgatgcatccagtgacggtggggtcggcggtgcaggtcaccgcctcgctgctcctcaataggcaggctgccaggacgagaatggcgaagatgatagttgctgctctcatagtggatttgttgattggggattgttgattgatggtgatgtcggattttggttaggcttttatagtggcttgatcgaggtcaaggggcgctcttcctatctagcgattttcgctaatatgtacgcagctgtttctatacgatcatataaaatattagacattgtttgctgccaaatcgtaaactatcggctgtgaatccaagttgagaaatgaactagtttcacctatttactcaagaatagaaaatgagtatattttaatttatctgattgaagcctggtttgacttgtattcatatatgataaaactctcatcagttcgaaatatacatgacttaaaatttgtcaaaaatggtgaattttttcctaagtgtatgtatgttattagaaatggatgacttcttctttaatatttgccttgtacactatttgctattgaatgtgtacccacaagatgatcaatgccatctgtggatagttttttgcttttcggttgaaggttgtgtttgtttgttgtacaatacaattagtttaaatggtttcaaaattattttagaatagaaatagacttgaacttatttgtgaaatagattttctttatacataaaacaaatgattttatcaaaataaagttttaattattatgtatttctgaggtgaaactattaactacccaataaaaattttttcaaagagatatacttcacgttgtcgttaaagtaccaattagaagagatatttttaatttttgtaataatattttttctcctttgtttgaagacaatatacttatttctacacagcgaactcttaaaaatttgttcaaactatttttgttgttggatgctgaatataggttttatttagtatttttttttaaattttataaaatcgaatgttggctttagcccgattggttttgcctcctgcgcctttgggccctcctcctcctctggtccctcctcctttgtgcacgcctcctcctttgagcgcgcctcctg

SEQ ID NO: 36386 - DNA, 459 bp, DROSOPHILA
atgagagcagcaactatcatcttcgccattctcgtcctggcagcctgcctattgaggagcagcgaggcggtgacctgcaccgccgaccccaccgtcactggatgcatcaactgcaccaccaatccaaccgattccgagtgcgtggctgaggcagccgccgccacatccaccacaaccacagtggctccagcaacgagcaccgttgcgaccaccaccactgcgccaacgacatcaagcggaaccggaaccggaagccgaaagatcgtccgcgttagcaacctgcgctactccgtcaaccgtcgcattcggatcaacaccaccgctcgatccaccagctccaacggccgctctggcaggcgctccaccaacaccaacaggaaccgcaggcgcaggaataacaacgccaggcaaggcaactccaggagcagtcgcggaaacgttcgcgtagtagttggttaa

SEQ ID NO: 36387 - protein, 152 aa, DROSOPHILA
MRAATIIFAILVLAACLLRSSEAVTCTADPTVTGCINCTTNPTDSECVAEAAAATSTTTTVAPATSTVATTTTAPTTSSGTGTGSRKIVRVSNLRYSVNRRIRINTTARSTSSNGRSGRRSTNTNRNRRRRNNNARQGNSRSSRGNVRVVVG

SEQ ID NO: 36388 - DNA, 2525 bp, DROSOPHILA
ctcggtttcctctataaaagcggtcttctatgcgccgtgtttgctcagtttggaacaagtgtttcgagggaaatgcagtccgtgaaagtgatctttgttctgtctgtgaccctggcggttgcctttgctaacgtgagttcgagctgatattgttattatttgatatttgcctgacttgtcaaaacaaaagccgaggttgccgcccggtgccccgaagccgctggatggagatgacttatccaaggctaaggagctcttggacacaacgctcgccaaacttgccacaggagatggtcccaattatcagtaagtataaggtaattaattttggaaaaatttcgatgataaacggcaacagaacaagtgtaatcttatcaatataattaaagcatgacgtgatttatttttgattagaaataacaaaagaatgagagattttaaaatagtgttcatgctcgtttcagggtagtgaatgtgatctcggcatctagccaactggtggctgggtcgctctacaaattcgaggtgaagctgtccaacggagccgagaccaaggagtgcaacgtaaagatctgggacaggccatggctgcatgagcagggggaggccaccaatgtgaaggtccagtgcaaggatgaagatgtgctcgagaagacctggtagggcgtcattgctgtgtttaaccatacaatttgcaatacaataaaggtgcaatctctggtgcttgagaaatgggacaataatttttcgaagcttgcctactccggtgactcccagaaatgattgtgcttatatcatgaactgtgataattaatttgtgcggattgtgcagtaaccagtttttctttatatttaaaacaaaatgttatcacgtctgtgtgaataactagctagaaggcaaaaaccaaacccaagacgtcttaaccgatcttttggcgatacttgcgaactttctttaggatatgcaatttatttatacatttattttgtaggcacaaaattaaatgctattggttctgcttagcctgttattcctgttattgcgacggttcctcctgcgccgagcctgctgagcccggcgacgtcgagcgcgttgagcccgctggcggcgcctccgacggttgttccgcttgttgttgccgctgttgttgctgctgccgcttccggaatcgggggtgctatctggcgatcctgttgaaggactagtgttatcgcctgttgaaggagaggtcgatggggaggtgcttccatcagtgggcgtggtgcttccatcagtgggcgtggtgcttccatcagtgggcgtggtgcttccatcagtgggcgtcgtgcttccatcagtgggcgtgttgcttccatcagtgggcgtcgtgcttccatcagtgggcgtggtgcttccatcagtgggcgtggtgcttccatcagtaggcgttgtgcttccatcggtgggatcgtcttcggcaaaactgtagctggaaaagcacaggaccagaaggccaaggctcaaaagtagagtggtcgtcctcatagctggtattgccttgaatggatgggcttggatgatgatctcgagatgattgctatgcttttatacctcttgtacagtctttggtaccattgtaaggatggtcgacagctgtgacaacaaatcgattgaaaagaagtttttcgtattaccgaattccgacagctgcccaaataccacgcgaattagacaaaaagcttttatttaataaattcgttctttcgttcctattaagacattggttagccaaatacaggcggcatcgcgtatttcatatcggacaacatcaagatctagtacaatatcgcgttgatcgaaagctgatcggtacacaactaagaagttagttagtagaatggcgctgttttcacagctggattttaggcgctttttaaaataggcttctattaattaattctcaatactcaatatttggcaaaacggtcatgaaatttttgattattatttttcttgccatttcctatggattaggaccgcattccaaactgtcaaaatgatggctaagcagaaaagagtttctaaccaaattgccaaaggacaatttgtagttgttgttgttaattcattataactgcgtaaattcatgactatttttaaaataaaaagaaattaataaataaagatttattctccttttaaagagtcgttatcaatcaatttttctgccccataggtggcgctgtaccactgttcttcttttagctgagtaacgagtatctgttagtcgagaaaatttagtatagtccaccatgttcttttaaattatttcgtgattcccaatatactctggaaatccgtaatagttaaaaaaatttgtattcctaaaaataattgcatttattaaattcggtatttgaacttatttcattcagatttgtaaagccaaaatcgttatacgcagttatgttgtatgtatcattaatacatgtatcattaatacatctgtacgaagtataagagtgtattgctccagcccatcgtt

SEQ ID NO: 36389 - DNA, 525 bp, DROSOPHILA
atgaggacgaccactctacttttgagccttggccttctggtcctgtgcttttccagctacagttttgccgaagacgatcccaccgatggaagcacaacgcctactgatggaagcaccacgcccactgatggaagcaccacgcccactgatggaagcacgacgcccactgatggaagcaacacgcccactgatggaagcacgacgcccactgatggaagcaccacgcccactgatggaagcaccacgcccactgatggaagcaccacgcccactgatggaagcacctccccatcgacctctccttcaacaggcgataacactagtccttcaacaggatcgccagatagcacccccgattccggaagcggcagcagcaacaacagcggcaacaacaagcggaacaaccgtcggaggcgccgccagcgggctcaacgcgctcgacgtcgccgggctcagcaggctcggcgcaggaggaaccgtcgcaataacaggaataacaggctaagcagaaccaatagcatttaa

SEQ ID NO: 36390 - protein, 174 aa, DROSOPHILA
MRTTTLLLSLGLLVLCFSSYSFAEDDPTDGSTTPTDGSTTPTDGSTTPTDGSTTPTDGSNTPTDGSTTPTDGSTTPTDGSTTPTDGSTTPTDGSTSPSTSPSTGDNTSPSTGSPDSTPDSGSGSSNNSGNNKRNNRRRRRQRAQRARRRRAQQARRRRNRRNNRNNRLSRTNSI

SEQ ID NO: 36391 - DNA, 4156 bp, DROSOPHILA
accggtttttccttaataaaaatcgactctattccagctttcttgccacttttattacaattgtcttccgtaaacattcagaccttctggattatataattcaacaatacagataggaaaacttagccaagagctacacatatcagatacaaatatttatatgaataatattaaatatacggtttattactgggggagtttttagagttatgtccctgattaacttatacaacgaaatcgaacgaatatatagactctagtacaggcttaattgatacaaaatatatatatttacaatcttctacgtagtttgtgacattggaccatttcagttgtagttctacgatcgttcgttccatcctccgtctgttttatagacatatcagacttatccttggcttcgtaactctcattcttctatatcctggggaaaaaatcgatctctatcaaatgcaaaaatgtaaagcattccaagtcctgtgcgttctgaatgggtgtcttactaaaatatatacttgtaaatctatgtaaatctatattgattcggtttcgcattccgtgtgtgtgtataatcacctaatccttagccattctcagcttactgtatcgagtatatctttattgggttctaggcttaacatgtacaatatataatagtataaataggtattaatgtatatataagtacttattgagtttgtacgatatgtttgtcctagggagaaaactttgcaagtgaagatacaagatacgagatacgagagtatgcagttagggacggtttctaggttcgtaaagcgatcgcactagtggaaaaactagccgggcaaagggtggagtgtgtttatataaatagttatacaagaatatatagatgcccctgtgcagcgggcaagaaatcaaacatcattctgtaagcaaatcgtcagcactatccacaccaaaagaatttctgcacagttttgggattgagtatatacgagtatacacatatatggttttagtaggtctcatctgacccaccaccggatacgccgcacttagagcgcaggatggccgccaggcgttgggtgagcggttctgtcggggattctgagtcgctgcaggaggcggagggtactttgttgcctgaaatgaaggaattaaagaggtcaatgtacggaaatactgattaatcacacatataccattgctcacgtccaggtcagctgcggtgttctcctttaggccaaagttaaggcttacgggcacgatatcgtcctcctcctccaggagcaaactggagtaggaatgtgtggtgttgtcgctgcgtccaccaccgccgctcgatgaattcctcgaggatccagaatcgttgtgggaatgggagtgcgagtgggtatgggaatggtgtacgtgaactgctagagcagctggatcctgacctgcatcgtcgatgggcaaatcgaagtcatcgccactgctgctgctctcctcctcgccatccatcacatccacgttgtcaatctcatcatcgccccatccattatcctcctcctcggaacaattgttgctgctctcgctgccatcgccatccgcatcagcatccccatcctcgtcagcatctcctgcctcatccccgtccacgtcagcctccacatccgatgcatgcagatccagagccaagtcgggcgatgaagatttattgtagttctcatcgctgtcgctggatgtggccactggggcaacgagataagtattaattgactgaccacactgttcatctgcccacctacctgcccgcaacttgtccaggatgaggggatagaactctttggccgtggcgttgtcgggctcgtattgcaggactgcatcggtgcgtataaaaatataaattataaattaaagaaattattacattaaagtcccaaaaaaagcgatttctctgtcatattcgaacaaaaaaaagttgtaattgcaactctcggaagcatggtgacatactttggaagctgattttgtattctactcactcaatttgcaatatttcaatgcctttttgtagtcctttagcatcacggcggacaggaactgcaggagaatcgagaaacgcacaatataatacgctgcattgcacaatacacgtttaagggaatgccaacaaatccttttgaaattctcataacatctcaacaacaaaggcttatatatgtatctacacccccttccatctcgatctactggcccacatagtgggtaggacaaaaaagttgactctgctgaaagttgaatgcgctcgaaagcaatttattagcaatcaataagctggccaagtgcgctcggtgccgtaatccttccgaaaggactttaacttaaatccgcaatctccgctggcagcacagcaatttgcatttgcataagttcccctcaaggatcctcgtcgtttttggtgtcgagcaacaaagggtaactgtgccacgctgggataaggataatgagtgaaatctaatggattttttgtaggcaaacgaaacagttgggcaaacataagcttatataagcttatggttttgtaaatacaactttgacatgctatagaaggctcaaaatgttgtttttaatacttcaaaagctttttactcctttccaaatccctattatctttcatcttaaacacttccactgaccatccatttaattgataagctggaattgctgccacctttaaatatgtataaacccttaaaaattcactcgggcggaagttgaaactaaaactttggctgtttgcactgaagctttagctggctaacttggtggcaagtttagaaggacttggtgaacctaaaatgtttttacctcggctagaaactcagtgggcgcggatacgctctcgtcggcatctgtgtactcggacaggctttggctgaggtcctcgctggatgcggaagtgggcagaccggaagcggaagctgcggctgcggcagcagctccgttcattatgtttatgttgttagctgtggccatcagggctgcacctgctgcagttgctgttcctgttgtggtggaggtggtagcaggagcacctgacccgtttaggccattatcgttgtccatgtggccattgctgctgttgggcctaaccgcatagacgccattgccattcgacttgtccatgtagaggagctggaaaaagtgatttcaattcatgcccctaggtactcagctctctgcgatatactcacgtttgacatgatctccgatagaaatttgaaaattgtgctatcttcaatttagcattttcattgccttgtctgaaatggcaattagaagaagtgaataaatttgaattgcaattgatctagattgtaagtgactgcagtgcagcaacgctatcgatttcgatgcttatccgtaattggattgccctaccttcgaccttcagtttctaggcaagttggtaagaaaaaagcaggcaacaaagagcgttgaaaattcgttaaatgtcaaatgctaatttcacttcccgtggatgagcgcagacattcgccagccagctaaccgtaaagataaatttagcccaagtgcactgtatgaaaatttgatactacaatatatgtaaaatatgaactctagctcttattgttttaatgaggcttaatttatgggattaaggttgaaaattatgtattcattttagatttattttagtaaacatgaaaaaagcctctctctccccaatagcagattctttacactttactaaataatttatgaatttcgttgtaaaattcaaatttgtttttatatacccaagtaattttaactaaggcaattaaacgtattttcctgcagtgaactttttacacaagaagcgaaattcaatgaagcggctgatagaggttttgggggaatattgccggcggcttctctttttggccaactagttgaataggccaactcgacacgcgaacatacgagtattcgccggctgcgaaagccaagtgcgaagagggcaaatgagcgaaattgttggcgttcttccttgcaaacgggcctttaattggcgaacgacatgcaccacgcctcgaggtatgcaatgaatttttcggttatttatgcagcatttgcagacagccatcgaagtgcaagtgtgtgtgcgtgagtattactgtgt

SEQ ID NO: 36392 - DNA, 1107 bp, DROSOPHILA
atggacaagtcgaatggcaatggcgtctatgcggttaggcccaacagcagcaatggccacatggacaacgataatggcctaaacgggtcaggtgctcctgctaccacctccaccacaacaggaacagcaactgcagcaggtgcagccctgatggccacagctaacaacataaacataatgaacggagctgctgccgcagccgcagcttccgcttccggtctgcccacttccgcatccagcgaggacctcagccaaagcctgtccgagtacacagatgccgacgagagcgtatccgcgcccactgagtttctagccgagttcctgtccgccgtgatgctaaaggactacaaaaaggcattgaaatattgcaaattgatcctgcaatacgagcccgacaacgccacggccaaagagttctatcccctcatcctggacaagttgcgggcagtggccacatccagcgacagcgatgagaactacaataaatcttcatcgcccgacttggctctggatctgcatgcatcggatgtggaggctgacgtggacggggatgaggcaggagatgctgacgaggatggggatgctgatgcggatggcgatggcagcgagagcagcaacaattgttccgaggaggaggataatggatggggcgatgatgagattgacaacgtggatgtgatggatggcgaggaggagagcagcagcagtggcgatgacttcgatttgcccatcgacgatgcaggtcaggatccagctgctctagcagttcacgtacaccattcccatacccactcgcactcccattcccacaacgattctggatcctcgaggaattcatcgagcggcggtggtggacgcagcgacaacaccacacattcctactccagtttgctcctggaggaggaggacgatatcgtgcccgtaagccttaactttggcctaaaggagaacaccgcagctgacctggacgtgagcaatggcaacaaagtaccctccgcctcctgcagcgactcagaatccccgacagaaccgctcacccaacgcctggcggccatcctgcgctctaagtgcggcgtatccggtggtgggtcagatgagacctactaa

SEQ ID NO: 36393 - protein, 368 aa, DROSOPHILA
MDKSNGNGVYAVRPNSSNGHMDNDNGLNGSGAPATTSTTTGTATAAGAALMATANNINIMNGAAAAAAASASGLPTSASSEDLSQSLSEYTDADESVSAPTEFLAEFLSAVMLKDYKKALKYCKLILQYEPDNATAKEFYPLILDKLRAVATSSDSDENYNKSSSPDLALDLHASDVEADVDGDEAGDADEDGDADADGDGSESSNNCSEEEDNGWGDDEIDNVDVMDGEEESSSSGDDFDLPIDDAGQDPAALAVHVHHSHTHSHSHSHNDSGSSRNSSSGGGGRSDNTTHSYSSLLLEEEDDIVPVSLNFGLKENTAADLDVSNGNKVPSASCSDSESPTEPLTQRLAAILRSKCGVSGGGSDETY

SEQ ID NO: 36394 - DNA, 3711 bp, DROSOPHILA
tggatgacttcttctttaatatttgccttgtacactatttgctattgaatgtgtacccacaagatgatcaatgccatctgtggatagttttttgcttttcggttgaaggttgtgtttgtttgttgtacaatacaattagtttaaatggtttcaaaattattttagaatagaaatagacttgaacttatttgtgaaatagattttctttatacataaaacaaatgattttatcaaaataaagttttaattattatgtatttctgaggtgaaactattaactacccaataaaaattttttcaaagagatatacttcacgttgtcgttaaagtaccaattagaagagatatttttaatttttgtaataatattttttctcctttgtttgaagacaatatacttatttctacacagcgaactcttaaaaatttgttcaaactatttttgttgttggatgctgaatataggttttatttagtatttttttttaaattttataaaatcgaatgttggctttagcccgattggttttgcctcctgcgcctttgggccctcctcctcctctggtccctcctcctttgtgcacgcctcctcctttgagcgcgcctcctggccgccatcctcctcctccttctggccacagcagccgcgttgtttgaagtgggtgtggagtcgctgggcgacgtggagtcactaggtgagctggtcggagctggagtgacagtgccgcttggcgaagtaggcgttgtagatcccgccggggtcgcatcggtgcttcctcctgtggtgggtgtcgtggtatctgttccatctgcgggtttcgtagtggtattagcggcctcagccacgcactccggatcgcttggactggtggtgcagtcgatgcatccagtgacattggggtcggcggtgcaggtcaccgcctcgctactcctcaataggcaagcgaccaggacaagaactcctgataagatgatcgatgtggccctcattttcagattgatggtgtcttcggatggtagcacggtcttatataccgctgtgatgattccaggtgacttataaaaccaaagaatatatgcaaatttacccaactggtgctatcaaatgattgtttttttttgatatctattgtatctatataattgtacaagaagatgatagctaaccaattgtcatctgctggtggggacttttgttggaaatatatacttgttcaatacgtttatcttatacaaataattgccaaatttattcagctgttcctatcgacttttggcttatttctccgaattcttcactcagaacttaccctgatcggcgtagttattaaagttattaaaggtacatcacagggatgtcccatcttcagagtccattaaatatctcaatcatttgggattgttaagtgcggcggatgcaagtccataaatagttaatatgctatttgtttaggtacaataatcccctgttttagattcatggcttttatggcataaatccaaaggttttctttttataatacataattgaatgctagtttatgcagctttccatttgccaggcacaaaataaaggcagatattaatgcagaaaactaccaggcagaaagttaatagcagtattttgcactttaagctcgcactgggttaatttcccttatttgcgggtatcaaaattttatttgagtacaaaatatgtttaaattttagattcgcgtgtaagatttactttatgacttcccaattgtttggttgttttgttttattttataattatcatgacgtcacatcttacatccaagcgaagcgagaacaatgagcgtgaatattttaaattcatatttcgcaatttaacgtagatgcgctgaccagctctgatttttcagttagtttcgcttttagctgatcagcgaacggttgagccatggatttgtttagctctctgctgctgtgcctgggaattatttcattacccaatgtggtaagtactttgtgtaaattgtttttgcaccctataattttttaatgcatttttagtttacgatttgcattccgcccaatcactgcattgaagatgtgagtatgatactggtctatttaaaaacacaatttaacttgaactaacacaatctatagttgctagtcctcctgattaaacacactttattttctgttccacagatggaggaaagcgatgcgaaagagcgattcgactatgtacttggcaaatatgaggaggtggaaatgaatattcccggaaaaccagttgggtgagatgaactttagcgcgtgtttggtgttccactaattggcttttcatttccaccgccggcagtttgtatgggaaagtggttacgcatggcgaggcggaggagcagcacttggtgttccagtacatggacaatacgctgcatgacatcatccagacgtgtgcgtttgtggtcaagcggaatcccggtgagtgcgagaacatccgcacctactgctcggcctttctgagccgcctgccacgccccctgctggagcgcaagcccatcaacgtgtgtgacgatgggacgcgagtggcggaggacgagccggaaacggaagcggaagacaatccggatgcagatgctgagggggagactgatccgcagcaggagcagggagttggtcaagcggagaccacaacagcggagccggctagctccaaattaagtgaattttattgagtggggtgcaatgtcatccggcggtttgttcattcatctcgacatttaaaagacaattaaacgcacaattgtaaaataagtgcataagtaagtgcaattgagattaattttctttaacattcaattatccgttttaaatatctcaactcttataaattttcacgtatttttatgttttaagtatttaaaaactaaattatacaaataaacgagtaatgcaatttgtacgttgcgtatacgacttgttggcttgctgtagatggggttgataatgtttattataaattaatgagctttacagagaaagtgcactctttttaaaaaagtaaaaccatctgatttatatcatcggagaacttgtaaactaagtattactcatatttgactacaagtcaaacaaacagcgcctaaaattatgcttacttccaatgtctactaacatttccccttggctactcaatgtcacggcttccccagattgagttaggaagctctgacagcaacaactatgcggcttttagttcaacaactgacggccaaaagactagaccaggccaagtccggcgcctgcgccgatcccacgctgcacagtgggcatattacggcaaaaatacaaaaatcaagttattcaattaaaattgttctccacctattacaaactttttaaagctatatggatcaaaccgcagacagattgcaaacaaaaataaaatttattgacaactaaatattttacacgtattcaatacaaaatactgtatagtaactaactagcacttagtacttagtactttactaccgaaaacttaaaaaaacgccaacattggatattaagccactgtactcaatgctgacagagaaaactctctttccgacagaaagagagcgagaggcttgtgccaaataacagtaaacaaagcccagctgctgctgctggcggtataaattcggttttcagttgttaacggggcgccaaggcgaactggagcagcgaaatcgg

SEQ ID NO: 36395 - DNA, 543 bp, DROSOPHILA
atggtgtcttcggatggtagcacggtcttatataccgctgtgatgattccagatgcgctgaccagctctgatttttcaatggaggaaagcgatgcgaaagagcgattcgactatgtacttggcaaatatgaggaggtggaaatgaatattcccggaaaaccagttggtttgtatgggaaagtggttacgcatggcgaggcggaggagcagcacttggtgttccagtacatggacaatacgctgcatgacatcatccagacgtgtgcgtttgtggtcaagcggaatcccggtgagtgcgagaacatccgcacctactgctcggcctttctgagccgcctgccacgccccctgctggagcgcaagcccatcaacgtgtgtgacgatgggacgcgagtggcggaggacgagccggaaacggaagcggaagacaatccggatgcagatgctgagggggagactgatccgcagcaggagcagggagttggtcaagcggagaccacaacagcggagccggctagctccaaattaagtgaattttattga

SEQ ID NO: 36396 - protein, 180 aa, DROSOPHILA
MVSSDGSTVLYTAVMIPDALTSSDFSMEESDAKERFDYVLGKYEEVEMNIPGKPVGLYGKVVTHGEAEEQHLVFQYMDNTLHDIIQTCAFVVKRNPGECENIRTYCSAFLSRLPRPLLERKPINVCDDGTRVAEDEPETEAEDNPDADAEGETDPQQEQGVGQAETTTAEPASSKLSEFY

SEQ ID NO: 36397 - DNA, 6626 bp, DROSOPHILA
caaacagcaggcaaaaggctcgtggccagatattccaagaaaatgccaacccaatcaacagacagacagacaactgcaatctggataatctgtaaacaaatttctacatatatctaagcggacacactgcgttttaaaaccacaagttaaagagaaccataaatagaattctcatttcattaaattatagacataaacacctatttattatatttgacagctgattaaaacaaacgactcatatcgatgttgttgtcatccattgcgtatgcgtaattttattaacctctttgagaagcaatctcaagcactaacttttcatgtgtggaaagttgtaaatacagttagagtatacattttgcaaatcataaacattctaaagtaactgcccaggcgtatacttaattttcgatgccataaaagacaggtgctttcttttattggcagataacgagtatgaattgcaaatatatgatctttgatcacagtatatcgttcgttgaactgcatgccataaagcgatttacaactctgaaacgcactgcccctggctatctatcgcatatggcgcagatttatttatctgtatctgtgtatattctgcgggagcttctttaatggctgtgcgaattccaaagcaatgattaattaacagtttgccgaggccctaatgaaaaacaaaaagccagagatatacatatgtatgtatgtactgaaacacgcaatcgaggcgacacacagatatatagacagacagacagacagacagacagatatgtgccccagtgcgtatggttcaacaatcaatccatggcgattaccaattatcgttggaatgcgaaaatgctgttgcctgatattgaaattgagtttcgcaaataaacagaaggaagacgacgacgttgtcatcgtcgtcatcggtttaggattttttcgttatggctatggttatacatatatacttttgtccgctggttttgttttgctttcttgccgcactatgtatgcgagttatggcctcgataagattagacgtttgccagcggcatttggcaacaacaaacagagcgcagacattccgccgcatggctgcggcaaaaattggtatttctgcgacactcttggccgtccgccggagattgttttgcccacttttacccaaaatgcacacaggaaataccggctaatcttatcgaaattccaagcgctaactgccgtgggaaagcttcgagatatatctttcggaatgttagcgtgtaactcttagatatattcttctataacttgtaactaactatatacttaattatatccttacagctacacaaagccgcagactttcgaggattgtgtgggcgatgagctgccaatgggctgggaggaatcctacgatccgaacatcggaccctactacatcaatcacctggcgcagagcacccaactggaggatccgcggcaggagtggaagactgtccaggagcagatgctcagtgactatctgtccgcggcgcaggatcaattggagaacaagcgcgagatgttcgatgtcaagcagcagcgactgctttgggcccaggaggagtacaatcatctgaaattggcagccagtcgaagcagtcgtaagtacctattacaatctctttaaacacacctggtgcgatgatattttgatttcggattaactagcacttttggaacacttttctaatcgcttgtatcacgttatgccaattattaaacaaaacataatctttcaatgaatggcaaacattgatctgagaagaaacaagaactgaaatcgatatctttaaattgaaatcagagatattagccataaatcaacaaagcacttaatgtgctattattctgaaaacctaatattatttttcttaacgtggaactaataaatttcctttacttccagtgtgctcttcctccagttcgatgagtcgccacgatccggaactactaagagccgatctgatgttggcacgtgagcgagtccaccagctgaagcaggagctaacccacattaccaatgacatatcctacacggaacggggcatgaacacactgtattccgtgggcgaaaagatcaatgctcgggaaaatggttgctacgacatcgccgaggttcatgcgattcgcgaggagatgctcaaggtgcacaagtcgttggtttctggcgaaaaggtgcgcgaggagctgatgcgcagtctggtgcagatcaagaacgagctgggtcgccagcagatcagcgaggagaactcggacctagcctcgcccttcgaccgggtgtgcgtggccagtcaaacggatctgtgtggatcatcaggggagaacctgaacggaggagcccgtttcgcagaaatggccaagaccaaatggcagtacgccgagtggcgcaagcacatcaagaaactgcagcagcagctggccgatcatgtggagcgcattgagcccggtcaactggagtcggacaaggatcgtattctgctcatccaggagaaggagaagctgttgaacgatctaaacagcatatcgctgaagtcacgcagcgaagaggagaagcgggtgatccaccagacgcgccacaaactagaggaggacctcaaggaggcctacgaagcgaacaacacatgcgtggccaatcgattgaggttccacgaagagaagcagctactattggacaaactgcaagaagccctgaagtccaccaagttgctggaggagcgtctcaagtccttctcctcggagagcaccttctccattagcagtggcagcagtctgggctccttgtccacggccagcagtaagagcgccttgagcttcaccgacatatacatcgatccctttgcggtggactcgcccatcgatgtggtggatctgagacgtcgctcgcagagattgttccagcagcaccagcaacagcgtctgcatcccgtgcatcccgtcctgcagcaacagcaatccgcggaggtaacgctatcgcctagaagcagcctatccatggaaacgccgcccgcatcgccgatgaagtacaatgcgggagcggaccagacgccacaggccctcaaggaggagcccacctatgccaatgctctgcccgcacctcctgcctacacagccccacccccagttccgatttccggagtaagagcacgaccctacgatctggactccacagtgctggactgcatgatgctggaggccaagctacagaagctgaacatgggtacaccgctcaacctggctgttgctcccctatcgcccatttcggagaagccctcgttgctggatctgccgcaggagatgctcagccgatcgtcctccacatccaatacgcgatccgtttcggcggcggtcagcaatgaatccgtggccggcgattctggcgtcttcgaggcgtcgcgtgcccatctgcctcgaaaggagctggcacaagtccagattggactgaagtatctgaaacaggaaggagtacttgtcgtctccctggagcgggccaacaatcttctggccctgtggactgcctcggcggacaactcacaggtgtaagtatataattattataaatgaatctatagcatgtacttataccatccttgctcacattttagttatctccgtgctgcgttgctgccgaattcgctgacctccataaggaccaaggcattgggcgatttccagaagcctgtttttaatgatacattcgccgtgcccatcacgctggacaagctgttgaccaagagcctgcaggtgactgtggtcacaatgactggacaaaaggaggagattattgtaagcataattagacccaaaactttacttattattgggatctaactattgtatattttcaatattttagggcaccgtgcagatcagcatggccgagttcaacccggaagattccacattgaagtggtacaacgtgctgagctccaaattcattccgagctttgagtctctggacattccctccaccagcgcagctgcagcggcagcggccgttgccgccagcaatgcaccaaaccctggcaacaaccgggaggagtcgtcggatgagtccaccattacatcctcccagacatccacactgaccagaaaccaagcaccctgcatggagctgcaggagcaaatggccgccgagttattggggctgggaccgctaaatgaaccagagtgcagcgacgacgacgatgatgatgaagaggaggagttggatgacaagcagttggtcagcgatgttggcctaatgaactgtaagtccaagatgtttatttaaattttatttatttaatttatttaaatattttatttatcattaccaacagcaagcagcatgctgcatgcctacctacaaaacatgaagcaggaattcgccgataaggagacgaacacagatcgcgcctatttgccggaaaaatcccgtggccagtcccagctgatggacgacaggcccgtgaagcgatcccagaccttcacgccatccgaagcgtttagcaagaatcgctacaactgccgcctcaaccgtagtgactccgactccgcgatgcactgcggcgtggcgccccacaccttccaacgcggcgctgccgagcgacgatccttgcgctttcacagcaaggcgcccaagtcagtcacaagtaagtactaggaatacaccgcttatttcgatattttcaataatttggttcgttttttatagaactgcatcatactcacataccccgcacgagtttggacttggagctggacctgcaggcccagcatagcaaactctacttcctcaatgatcaaatcgccaagctgcagaacctcaaagaagtgtaagttttaaaatatacatagatccaaaaagtgaaatttataactaacttttttattatccaacagtttgcagaaggcctgcgaaaataaggatcccttggtggccgcctgggctattgaaaacgaggagttccaacgcctggtggcccgcgccgatcctgccaaatgccccgaggagcgccaactgcagaagttgctgatgaagaccgccaaagagatccacaagctgcggaagaccaaggtgcccaaaggctgtcccgatttggtgtcgttcaagtaagttctatttgcacataggttataaaaaacaggtattttaatttcatatgcttacagggagaagatcactttcttcacgcgcaagggcctgtcggtgcccgagttgcccagtgaatttaccttgccggaagctaatcccatcgaagaagaagaggaggaagaggatgagaatgagttctacaattcagctgagacggcaattgccatcaacacggcgctggtggctagcagcaaccgcaataagaatctcagtgagcaccctcatagagccaccagcggggcagtgcctaagataccagcaccagttgtaactcctgctgccactcctgctgctactcctgctgctactcctgctgccacttctgctgctactcctgccgccactcccgtagtatcccctgctgcccaacctgatgccaaaccagcagatgctccaattccagttgcatctaacgatgccgagcaacaacgcttcgactatgtggtggatcgcaactacggcgtggaggtgtagccccttccacaacaccccatcttcgctgtacatttttgtaattaatttagtatttattttcactaagcaacaagtatttatgtgtataaacaactgatgtaacaaatatctgtgccttatagagaacgtgaacgtgagagaacgacaagaaccatgctagaatgatatatccacgcatagctatgcactagacctaagcccattattgtaattagattagccaagcagctaagcagcctagccctaactgcacccaaagtcagttgtacaaattgacccccactgatgaccatatgaaagcaattaagagataaaaaccaccaaccaacccgccccaaacaatttgccccgcccaaaacaaaaaaaaaaaaaaaccaagaaacaaggaatatcaacacaataacgcgcacattgtgcgttcaatgccttcaaattcatattgaaaccaactgtattcttaagacttgagcaaaaattatacgaatgtttatgaatatttttatacgcagctagttaggatagttaacccaagccacatatacacaaaacgtgaggagaacgtaaaatatttattatactgatggatcgatcgacgtcgcgctcgaatccagtcgtttaggttagttagcttgcgtttttgttaagcttaaaacgaattcttatactgtaattttttttataaaaaaatcctatgcaaaaaaaaaaacaaaccacacaaaaaaaagtgaatgtaccatattagataatcgtcactatgttaactataagagcgcccttaacccccgacaatgccaccattgaaaggcgcataaaagtgagagaaaatataaaattaaaccttgttatgctttcccaagcggacctgttaaaactgttgactttgaaactgtgccgtggtgcactgagtttgtatgaaatgaaatgaaatgaaattacccacagctctagtttagtttaggttttacacgtgtgtgttttcggctcattgcaaacttttgct

SEQ ID NO: 36398 - DNA, 2030 bp, DROSOPHILA
atgtatgcgagttatggcctcgataagattagacgtttgccagcggcatttggcaacaacaaacagagcgcagacattccgccgcatggctgcggcaaaaattggtatttctgcgacactcttggccgtccgccggagattgttttgcccacttttacccaaaatgcacacaggaaataccggctaatcttatcgaaattccaagcgctaactgccgtgggaaagcttcgagatatatctttcggaatctacacaaagccgcagactttcgaggattgtgtgggcgatgagctgccaatgggctgggaggaatcctacgatccgaacatcggaccctactacatcaatcacctggcgcagagcacccaactggaggatccgcggcaggagtggaagactgtccaggagcagatgctcagtgactatctgtccgcggcgcaggatcaattggagaacaagcgcgagatgttcgatgtcaagcagcagcgactgctttgggcccaggaggagtacaatcatctgaaattggcagccagtcgaagcagtcttatctccgtgctgcgttgctgccgaattcgctgacctccataaggaccaaggcattgggcgatttccagaagcctgtttttaatgatacattcgccgtgcccatcacgctggacaagctgttgaccaagagcctgcaggtgactgtggtcacaatgactggacaaaaggaggagattattggcaccgtgcagatcagcatggccgagttcaacccggaagattccacattgaagtggtacaacgtgctgagctccaaattcattccgagctttgagtctctggacattccctccaccagcgcagctgcagcggcagcggccgttgccgccagcaatgcaccaaaccctggcaacaaccgggaggagtcgtcggatgagtccaccattacatcctcccagacatccacactgaccagaaaccaagcaccctgcatggagctgcaggagcaaatggccgccgagttattggggctgggaccgctaaatgaaccagagtgcagcgacgacgacgatgatgatgaagaggaggagttggatgacaagcagttggtcagcgatgttggcctaatgaactcaagcagcatgctgcatgcctacctacaaaacatgaagcaggaattcgccgataaggagacgaacacagatcgcgcctatttgccggaaaaatcccgtggccagtcccagctgatggacgacaggcccgtgaagcgatcccagaccttcacgccatccgaagcgtttagcaagaatcgctacaactgccgcctcaaccgtagtgactccgactccgcgatgcactgcggcgtggcgccccacaccttccaacgcggcgctgccgagcgacgatccttgcgctttcacagcaaggcgcccaagtcagtcacaaaactgcatcatactcacataccccgcacgagtttggacttggagctggacctgcaggcccagcatagcaaactctacttcctcaatgatcaaatcgccaagctgcagaacctcaaagaagttttgcagaaggcctgcgaaaataaggatcccttggtggccgcctgggctattgaaaacgaggagttccaacgcctggtggcccgcgccgatcctgccaaatgccccgaggagcgccaactgcagaagttgctgatgaagaccgccaaagagatccacaagctgcggaagaccaaggtgcccaaaggctgtcccgatttggtgtcgttcaaggagaagatcactttcttcacgcgcaagggcctgtcggtgcccgagttgcccagtgaatttaccttgccggaagctaatcccatcgaagaagaagaggaggaagaggatgagaatgagttctacaattcagctgagacggcaattgccatcaacacggcgctggtggctagcagcaaccgcaataagaatctcattgcatctaacgatgccgagcaacaacgcttcgactatgtggtggatcgcaactacggcgtggaggtgtag

SEQ ID NO: 36399 - protein, 193 aa, DROSOPHILA
MYASYGLDKIRRLPAAFGNNKQSADIPPHGCGKNWYFCDTLGRPPEIVLPTFTQNAHRKYRLILSKFQALTAVGKLRDISFGIYTKPQTFEDCVGDELPMGWEESYDPNIGPYYINHLAQSTQLEDPRQEWKTVQEQMLSDYLSAAQDQLENKREMFDVKQQRLLWAQEEYNHLKLAASRSSLISVLRCCRIR

SEQ ID NO: 36400 - DNA, 3868 bp, DROSOPHILA
caaatttagttaacacatcgcatctaatgtatgtatgtacagtttggtatactatcttattatgtatgtattctatttaagtcgaaaggcaattgtaataggctctatctatcatgttatcacgaaactgcgtttactacatttataaaaccaacagacatagaagtgagggaaaccaacatttatgattcatattaaagctaataataatatattcaaaaggcagcaaatgtagacatgtatccatttcaacagcaaatgtaattgataaacacataaatgaaaaaaaaaaacactaaaataaaaattataaaaaatacatgagtgcttgattttttattaaatccgttggattactgcggtaagttttgcgactatgtatatacattttttagctatcttttaatattttcaatcaacatataatggcgagacatacttttactttgacacacttacatatatatcaatcaaaatcaatccaagttaaccctcagactgctgggctgcttttcaatggccaagtggcataaattgaagttaattgatattcaaattttgtaaatgcagtgcaaaatttcaagccgcctttttcaagcgaaacgtgaccgagtgtcatttttcaaatttcgcataattgaataagagcgttaaagagttcggagaaaggtatattgggctctcgtgtaagcaccgctctcttattgccgccccagtggagcagttggtactcgagactgagtctcaggctcaaccagttggctatgtgcgctccctgtcagcggaacatacaaatccggaacgggtttcgcctgcgttcagtaaccccggacccttgaaagcgtttggcttgggactaataaaccgatattgagaacccgctggcgattagttgactccccaaacgcctccataaatgtcggatttctcagatatgcgtttatcatagcactgcgaaagccgctacaattggggaccgctaaaatctgataacgacagcatggatttcgaggagattctggccaagtgcggcaacagcagtcgttatcagtttgtactgctggcgctctatggctacctaatggtcgtcgtttcgatgcactatttctcacaaaacgtcatcagttttgtgcccgatcattggtgctatcacgagcagctggagaatcgcagtttcgctgaaatcgaaaagatatactctcaattcgagaagccctcttgcacgcgactggagaagatcgatgaggatgggcagaaccacacgctcagtagggagcgctgcaatcggtggatctataagtacgactttgggtacaaaagtatgaatacagaggtaagtgcgtgattataattttccgttttggaaaaactatgttagctttggttgttattgtgtttcagctaaactgggtctgcgatgaggcatataaagcacgagtgggtcagtcgcttttctttgtgggttcggtgtgcggaactctggcttttggtctgcttggtgatcgaataggacgcattagggctttgattttggccaactggtgtggcttcttgggcgatttctcaaccatattcgctgggagcctaacttctttttcgatcagccgttttatatctggattggcggctgatgccaactcctatctcatgtacatactgagtaagtaattgcatggagttcataacgcaatgactagttcaattgggtctttctggacagttctcgaatacgtttcaccctctttgagaaatgtgggtctcaatacagttttgggcagcttttattgtcttggcctgatcggagcctgctggctagctgtctgggtgggccactggcgcattttcctggcgtgctcctcggttcctctgctgctggttactctgttctacttcctcgtccaggagagcgcccaatggctggtcacgcgaaacgatgttgatggagccattaggcgattggagcgcgtggccaagatcaatcgccgccaggtggccgacaaagacttcaaggattttcgcatctactgcgagcagcactatcgcaaagataagaaccaggaggagcacgcaaagttgctggacatgctgaaaacgccgcgcatgcgcagtacggcatttaagctgctgctcatattgtaagtactaaatgaaatatattcaaagagttattttatttatttatttactttattttatatctgcagtataatcatcgttccctgctacaacaccatcgctcgcaatgttgagggtctcggcatttcgcctttcatcatgttttccctaaatgcgctgactctgccaccctcgggttatctacagggtttgctccaggatcggatgggtcgcaaggccaccgcggtcggttggatggccataacaggaatatttgccgtcgctgctggtctggtgatatcgcaaggaagcaatcgaaatgtactgctgctggtgggtctaacaatggcggccagatttggagtttccattgccgatggcgccagttcccagttctccacggaactaatccccaccagcgtgcggggaaggggcgtggccgtggtgcatgtggctggatttgccgcctccttcctttctccgtacattcttcacctgggcacctactacaagccagctccgtcaatcattttgggtcttctcttcctatccggagcctatgtgtgcctgctgctgccagagactcgcaataagaaacttccaatgtccttggccgaaggagaagagttcggtcgtggagaaggcatatttgattttcttcgtcatatgtttaggagggaaggcagtaaatcagaggtggaaatgggtcccacgattgttgaggaggacactctgattaataagccggtttagcagtaagtgctgttgttatatatgaaatagaagtaataaaaagtaaatcgttgattaatttgcatagcagcttaaaattcttagctacgaaatgccccgcactttgcataacccgatatgcagtcaaaaattatagacattgtatttaaatgtatttctcagctctaaattggtattgaaatgctctgaatagccacatgacattgttagctgggtgtaaagtctttagcatcaacaaaactgtctgcataaataaacagcaacatagttgtatattttgaatagaagactgccgattacagcgatgatatgggagcaacaaagacgcttatcaaccccaataattaaatcacaacatataagttatgatcgaatcgagcagttcagttcgctcacttgaatccggagacttatcagctgcggagaggaaacaccaagagtcgattcgactatttaactccaatattagtttaccgcagccgctttcacaaggcgctcttaactattcaactattcgatggaggcgttcgccgagcagagcggaccaacagcgctagctactgccagtggcagtacgtgcgtggcagcggaggagagcggaccgccgaacacagatactttgacggcacccacgtagcggtgcatctgcggacatggccatggactttgacgagatactggtcaaatgcggcgactcccatcgctaccagtacatgctattggctctctacggactattgatgttcattgtttcccggcactacttcgcccaaaacgttattggatttgtgcccgatcattggtgctatcacgaacagctggagaatcgtagctatgccgaaatagctgcgatatacgccccattcaagaggccttcgtgcacgcgactggcatcgatcaacatggatgggagcaatgccacggccagcagtgagccctgcaatcgatggatttaccactatgaccatggattcataagcatgaacgctgatgtaagtcc

SEQ ID NO: 36401 - DNA, 1671 bp, DROSOPHILA
atggatttcgaggagattctggccaagtgcggcaacagcagtcgttatcagtttgtactgctggcgctctatggctacctaatggtcgtcgtttcgatgcactatttctcacaaaacgtcatcagttttgtgcccgatcattggtgctatcacgagcagctggagaatcgcagtttcgctgaaatcgaaaagatatactctcaattcgagaagccctcttgcacgcgactggagaagatcgatgaggatgggcagaaccacacgctcagtagggagcgctgcaatcggtggatctataagtacgactttgggtacaaaagtatgaatacagagctaaactgggtctgcgatgaggcatataaagcacgagtgggtcagtcgcttttctttgtgggttcggtgtgcggaactctggcttttggtctgcttggtgatcgaataggacgcattagggctttgattttggccaactggtgtggcttcttgggcgatttctcaaccatattcgctgggagcctaacttctttttcgatcagccgttttatatctggattggcggctgatgccaactcctatctcatgtacatactgattctcgaatacgtttcaccctctttgagaaatgtgggtctcaatacagttttgggcagcttttattgtcttggcctgatcggagcctgctggctagctgtctgggtgggccactggcgcattttcctggcgtgctcctcggttcctctgctgctggttactctgttctacttcctcgtccaggagagcgcccaatggctggtcacgcgaaacgatgttgatggagccattaggcgattggagcgcgtggccaagatcaatcgccgccaggtggccgacaaagacttcaaggattttcgcatctactgcgagcagcactatcgcaaagataagaaccaggaggagcacgcaaagttgctggacatgctgaaaacgccgcgcatgcgcagtacggcatttaagctgctgctcatatttataatcatcgttccctgctacaacaccatcgctcgcaatgttgagggtctcggcatttcgcctttcatcatgttttccctaaatgcgctgactctgccaccctcgggttatctacagggtttgctccaggatcggatgggtcgcaaggccaccgcggtcggttggatggccataacaggaatatttgccgtcgctgctggtctggtgatatcgcaaggaagcaatcgaaatgtactgctgctggtgggtctaacaatggcggccagatttggagtttccattgccgatggcgccagttcccagttctccacggaactaatccccaccagcgtgcggggaaggggcgtggccgtggtgcatgtggctggatttgccgcctccttcctttctccgtacattcttcacctgggcacctactacaagccagctccgtcaatcattttgggtcttctcttcctatccggagcctatgtgtgcctgctgctgccagagactcgcaataagaaacttccaatgtccttggccgaaggagaagagttcggtcgtggagaaggcatatttgattttcttcgtcatatgtttaggagggaaggcagtaaatcagaggtggaaatgggtcccacgattgttgaggaggacactctgattaataagccggtttag

SEQ ID NO: 36402 - protein, 556 aa, DROSOPHILA
MDFEEILAKCGNSSRYQFVLLALYGYLMVVVSMHYFSQNVISFVPDHWCYHEQLENRSFAEIEKIYSQFEKPSCTRLEKIDEDGQNHTLSRERCNRWIYKYDFGYKSMNTELNWVCDEAYKARVGQSLFFVGSVCGTLAFGLLGDRIGRIRALILANWCGFLGDFSTIFAGSLTSFSISRFISGLAADANSYLMYILILEYVSPSLRNVGLNTVLGSFYCLGLIGACWLAVWVGHWRIFLACSSVPLLLVTLFYFLVQESAQWLVTRNDVDGAIRRLERVAKINRRQVADKDFKDFRIYCEQHYRKDKNQEEHAKLLDMLKTPRMRSTAFKLLLIFIIIVPCYNTIARNVEGLGISPFIMFSLNALTLPPSGYLQGLLQDRMGRKATAVGWMAITGIFAVAAGLVISQGSNRNVLLLVGLTMAARFGVSIADGASSQFSTELIPTSVRGRGVAVVHVAGFAASFLSPYILHLGTYYKPAPSIILGLLFLSGAYVCLLLPETRNKKLPMSLAEGEEFGRGEGIFDFLRHMFRREGSKSEVEMGPTIVEEDTLINKPV

SEQ ID NO: 36403 - DNA, 3853 bp, DROSOPHILA
taatccccaccagcgtgcggggaaggggcgtggccgtggtgcatgtggctggatttgccgcctccttcctttctccgtacattcttcacctgggcacctactacaagccagctccgtcaatcattttgggtcttctcttcctatccggagcctatgtgtgcctgctgctgccagagactcgcaataagaaacttccaatgtccttggccgaaggagaagagttcggtcgtggagaaggcatatttgattttcttcgtcatatgtttaggagggaaggcagtaaatcagaggtggaaatgggtcccacgattgttgaggaggacactctgattaataagccggtttagcagtaagtgctgttgttatatatgaaatagaagtaataaaaagtaaatcgttgattaatttgcatagcagcttaaaattcttagctacgaaatgccccgcactttgcataacccgatatgcagtcaaaaattatagacattgtatttaaatgtatttctcagctctaaattggtattgaaatgctctgaatagccacatgacattgttagctgggtgtaaagtctttagcatcaacaaaactgtctgcataaataaacagcaacatagttgtatattttgaatagaagactgccgattacagcgatgatatgggagcaacaaagacgcttatcaaccccaataattaaatcacaacatataagttatgatcgaatcgagcagttcagttcgctcacttgaatccggagacttatcagctgcggagaggaaacaccaagagtcgattcgactatttaactccaatattagtttaccgcagccgctttcacaaggcgctcttaactattcaactattcgatggaggcgttcgccgagcagagcggaccaacagcgctagctactgccagtggcagtacgtgcgtggcagcggaggagagcggaccgccgaacacagatactttgacggcacccacgtagcggtgcatctgcggacatggccatggactttgacgagatactggtcaaatgcggcgactcccatcgctaccagtacatgctattggctctctacggactattgatgttcattgtttcccggcactacttcgcccaaaacgttattggatttgtgcccgatcattggtgctatcacgaacagctggagaatcgtagctatgccgaaatagctgcgatatacgccccattcaagaggccttcgtgcacgcgactggcatcgatcaacatggatgggagcaatgccacggccagcagtgagccctgcaatcgatggatttaccactatgaccatggattcataagcatgaacgctgatgtaagtccctgctcgggcgccacttaagttcattgcatctaagagtaagctctattgtttacagctgaattgggtttgtgatgatgcgtacaaggctcgagtgggtcagtccctgttctttgtgggctccatgtgtggcaccctgttgtttggtctacttggcgatcgaatcggacgcatcaaggctgtagttttggccaattgctgtggcttcctgggcgactcggctaccatttttgcagagaccctgttgactttctcggccagccgatttgtatctggactggctgcagaggcaaactcctacctcatgtttattttgggtatgttatcgtttaacttatctatatagtcttaactttcctcccaaatataacagtcttggagtacgtgtctccgacgatgcgaagtgtgggcttgaacttgacaatgtgtgttttttacggcctgggaatgatatgtgcatcttggcagggcgtctggttgggtagttggcgttccttcatggtctggaccgccctgccccagctgttggtcaccgggttctactttctgattcaggagagcgcacagtggctggtcacgcgccaagacttcgatggagctgagttgaggctacgccgtgtggccaagttcaatcggcgcgatgtcagcgaggcggactatgagctattccgtcagcattgcaagacgaaggagtcggaggccagaagccagatgtccatgcagaagcaggcacgtctcattgactcattcaagctgccacgcctgcgtctccgcctgatctatgtaacggttgtcttgtgagtaaattaagaaatttatattttataaatatgatttatgtatataattattctagctcgatagtgacgctttgttacaacacaatgtctcgcaatgtggaaggtctgagcatatcaccgttcgtcatgttcagccttttcgccctgaccttgccaccatcaggcatcttccagacccaggtccagaagcacttcggccgcaagttcacctcggtggtcagcatgacagcaactggattgatgactgcgaccacaggcattctcttggctttctggacgcagcatagcgccacggtgatggtgtgccttctgctgatgtgccggttcgggatctccgtgactacgggatccaccatgcagatatcgactgagctaatgcccacctgtgtgagatccagtggtttggcggtaattcatgtcaccgcagcagcattgtccttcatttcgccatttatactccatttggacacatatttccgggcagcatcctcgatcattacctgcattctactcctagttagcgcctggatttgcctgctcctgtcggagacgagaaacaaaaagctgcctttaacattagcggagggcgaggagtttggcaagggcgagcggatgttcgactttatgagaagctttaaaaaggcagatcaacacgatctcagtgctgacaccatagaaaaactaatgggggataagcgtacttactaagtaagtgcttaatatatataaggaaggattgtagctgcctattgcatttaattgtgttcataataatttattttgagcaacgtgtttgtgagctttataatcaagctaacgaaagtgttgctattcaaattcatatgctgaatatttatagtctatttatctgtacttgcagactattataagcatatatatgactagtgtttaaagtacaagataatatagctgacaataagaaagccaagatgactgtctaataattattgttgtcggtggtttggataagaacgatttagtcataatatagttttgcttatcttgtggataataaaatatacgtatgtatgcaaaagaatggaacaacccgcatttaaacataattataattgggcttaaaaagccctgaattgtatagatctataaaatacagacagggtatatggtttttatgctggcgaatatgttctgcccttccagcattatctaaatgcactactgaactcatgtgtattactacacttggggaaaatcggcgattcgtttttttggttttattaagagtccactgaacttgttgttctgtggtcgcgccgtgtgtttatctagtccagagtaggctttcctcctcgtgagacgccggcgtttgtttagattggagtgaatgagtgaattcacttaaataataaagcgtccgcgtttgagcagcccgccatatagacgataggctgcctcaaaacaatcttatcgctgttggacgtagactcaatgtgcgaatccggccacctagcactctttacccgcgtctcgtttggaatcggaacgttttcgcctcggcacggattggcggggtttagtcttaatagaatctcagcgagagcacgtcatggatttcgaccagatcttggagaagtgcggcagtgcgggtcgctatcagtacctgatgatactgctgctcggctacatagccttcacgaccaccgtgcactattactcgcagaacata

SEQ ID NO: 36404 - DNA, 1674 bp, DROSOPHILA
atggccatggactttgacgagatactggtcaaatgcggcgactcccatcgctaccagtacatgctattggctctctacggactattgatgttcattgtttcccggcactacttcgcccaaaacgttattggatttgtgcccgatcattggtgctatcacgaacagctggagaatcgtagctatgccgaaatagctgcgatatacgccccattcaagaggccttcgtgcacgcgactggcatcgatcaacatggatgggagcaatgccacggccagcagtgagccctgcaatcgatggatttaccactatgaccatggattcataagcatgaacgctgatctgaattgggtttgtgatgatgcgtacaaggctcgagtgggtcagtccctgttctttgtgggctccatgtgtggcaccctgttgtttggtctacttggcgatcgaatcggacgcatcaaggctgtagttttggccaattgctgtggcttcctgggcgactcggctaccatttttgcagagaccctgttgactttctcggccagccgatttgtatctggactggctgcagaggcaaactcctacctcatgtttattttggtcttggagtacgtgtctccgacgatgcgaagtgtgggcttgaacttgacaatgtgtgttttttacggcctgggaatgatatgtgcatcttggcagggcgtctggttgggtagttggcgttccttcatggtctggaccgccctgccccagctgttggtcaccgggttctactttctgattcaggagagcgcacagtggctggtcacgcgccaagacttcgatggagctgagttgaggctacgccgtgtggccaagttcaatcggcgcgatgtcagcgaggcggactatgagctattccgtcagcattgcaagacgaaggagtcggaggccagaagccagatgtccatgcagaagcaggcacgtctcattgactcattcaagctgccacgcctgcgtctccgcctgatctatgtaacggttgtcttctcgatagtgacgctttgttacaacacaatgtctcgcaatgtggaaggtctgagcatatcaccgttcgtcatgttcagccttttcgccctgaccttgccaccatcaggcatcttccagacccaggtccagaagcacttcggccgcaagttcacctcggtggtcagcatgacagcaactggattgatgactgcgaccacaggcattctcttggctttctggacgcagcatagcgccacggtgatggtgtgccttctgctgatgtgccggttcgggatctccgtgactacgggatccaccatgcagatatcgactgagctaatgcccacctgtgtgagatccagtggtttggcggtaattcatgtcaccgcagcagcattgtccttcatttcgccatttatactccatttggacacatatttccgggcagcatcctcgatcattacctgcattctactcctagttagcgcctggatttgcctgctcctgtcggagacgagaaacaaaaagctgcctttaacattagcggagggcgaggagtttggcaagggcgagcggatgttcgactttatgagaagctttaaaaaggcagatcaacacgatctcagtgctgacaccatagaaaaactaatgggggataagcgtacttactaa

SEQ ID NO: 36405 - protein, 557 aa, DROSOPHILA
MAMDFDEILVKCGDSHRYQYMLLALYGLLMFIVSRHYFAQNVIGFVPDHWCYHEQLENRSYAEIAAIYAPFKRPSCTRLASINMDGSNATASSEPCNRWIYHYDHGFISMNADLNWVCDDAYKARVGQSLFFVGSMCGTLLFGLLGDRIGRIKAVVLANCCGFLGDSATIFAETLLTFSASRFVSGLAAEANSYLMFILVLEYVSPTMRSVGLNLTMCVFYGLGMICASWQGVWLGSWRSFMVWTALPQLLVTGFYFLIQESAQWLVTRQDFDGAELRLRRVAKFNRRDVSEADYELFRQHCKTKESEARSQMSMQKQARLIDSFKLPRLRLRLIYVTVVFSIVTLCYNTMSRNVEGLSISPFVMFSLFALTLPPSGIFQTQVQKHFGRKFTSVVSMTATGLMTATTGILLAFWTQHSATVMVCLLLMCRFGISVTTGSTMQISTELMPTCVRSSGLAVIHVTAAALSFISPFILHLDTYFRAASSIITCILLLVSAWICLLLSETRNKKLPLTLAEGEEFGKGERMFDFMRSFKKADQHDLSADTIEKLMGDKRTY

SEQ ID NO: 36406 - DNA, 4182 bp, DROSOPHILA
gaggagtttggcaagggcgagcggatgttcgactttatgagaagctttaaaaaggcagatcaacacgatctcagtgctgacaccatagaaaaactaatgggggataagcgtacttactaagtaagtgcttaatatatataaggaaggattgtagctgcctattgcatttaattgtgttcataataatttattttgagcaacgtgtttgtgagctttataatcaagctaacgaaagtgttgctattcaaattcatatgctgaatatttatagtctatttatctgtacttgcagactattataagcatatatatgactagtgtttaaagtacaagataatatagctgacaataagaaagccaagatgactgtctaataattattgttgtcggtggtttggataagaacgatttagtcataatatagttttgcttatcttgtggataataaaatatacgtatgtatgcaaaagaatggaacaacccgcatttaaacataattataattgggcttaaaaagccctgaattgtatagatctataaaatacagacagggtatatggtttttatgctggcgaatatgttctgcccttccagcattatctaaatgcactactgaactcatgtgtattactacacttggggaaaatcggcgattcgtttttttggttttattaagagtccactgaacttgttgttctgtggtcgcgccgtgtgtttatctagtccagagtaggctttcctcctcgtgagacgccggcgtttgtttagattggagtgaatgagtgaattcacttaaataataaagcgtccgcgtttgagcagcccgccatatagacgataggctgcctcaaaacaatcttatcgctgttggacgtagactcaatgtgcgaatccggccacctagcactctttacccgcgtctcgtttggaatcggaacgttttcgcctcggcacggattggcggggtttagtcttaatagaatctcagcgagagcacgtcatggatttcgaccagatcttggagaagtgcggcagtgcgggtcgctatcagtacctgatgatactgctgctcggctacatagccttcacgaccaccgtgcactattactcgcagaacataattgggtttgtgccccagcactggtgttatcatgaggcactcgagaatcgtagttttgaggagatcgccgccatctatgccccatttggcaaggaggcctcctgcacgcgattggataagatcgagggcgacagggtaacggtgagtaatgagacgtgccagcgttggatatacaactatgactttggatttaggagcatgaatgcagaggtgagtgtattcagatatgccaaagattttccaaattaaagtaatatcttctattgatcagctgaactgggtgtgtaatgatgcatacaaggcacggatcggacaatctctattcttcctgggctccctgatgggcaccttcacctttggcgtcctgggtgacaggatcggcagagtgagagccgtgatcctggccaatcaatgtggattcgtaggcgactttcttaccacctacgcctccaacttagtgcagttcgccatttttcgatgcatttctgggctcgcggctacagcaaattattatctgatgtttattctgggtaagcactgcgagatatcgctgagaataagtaaaaaatctgttacatatatacatacatacaacagtgcctactccttattacttcctgaatttccaacaatagcattagattaggcttaccagatgataccaaaaaatacttaataactatagactataagttatcttatatatcataaaaatacatttggaaggcattctatttgttcaggttttttcgtaggttaacattgcttttaaagatttctttttaagctaaaaataatttgtcacaaattaatgccctttctattgtagttctggaatacttggcgcccaaactaaggaatatggccattagtggaaccctgggcatttgcttttgtctaggagctctggtggccccctggctttccgtactggctggcaactggcggatctacctgacctgctcggctttgctccagttggtggtggctttgttctactttgtggtccaggagagcgctcagtggctaatcacacggaccaatgtggagggggccattgccagactgaagcacattgcccacttcaatggcatggaggtgaaagcagctgactttgaagccttcaggaggaactgcatcgtcaagaggaagctttcaaaccaaccggaacaaacggcaggaattttcgatttattgcggactcctaatctgaggaaagtatcgctgctggtggttttcactttgtaagtgaggtttgtaattaataattttgtctatttaatatttggtatttccatatttgtcttcatagtatgctgacttcgctgagcttcaataccatctctagaaatgtggagggcatgggactttcaccttttgtggtcttctcgctctttgcggtggtcgttcccccgtctggatttattcagggcctactgcagagccgagttggccgcaaagccactgcatttctggccatgctctgcaccggactcctgtcctgcgctttgggcgtggccctctccacggagggcgctcaaaagaacgtgaccttgctgctggccttcgccctgcccatgcggctgggcatctctatgtgctacacggtcacctcgcagtttgcctccgagctgctgcccacttgtgtgcgctcgcgcggaattgctgcagtgcatctggctgctgcgggtgcttcctttgtgtccccctacctcattcatttgggcactaagttggcggccgctccgtccctcatcctggcgctgctcctgcttaccgcatccggatgcactctcatgctgccggaaacgaacaataggtaagggtcatggtatttgaaatgatggaaggaggcgtgttgaaatgtgttttccttttcattctctacagacaactgcccatcacattggctgatggcgaggcatttggaaagggcgaatccatgctatcctttgattgttggcgtcgccacgatgacgatgtatccaaggaagccaccgaagaagtgaggctgcaccagctcaatggacaaacaaaatccgaaacggaagcggaagtgtagagtgaagcccattcaaagtatttccccatagactttaagaatcaatcccaaagggtattagcaaaagaagtggacactgtagttgcgaaagttgtcagtagatttgaagtttgctttattttattgattcactgctgttcacaatttataacactattttaacttagcaacttgtattgagccaattttttgagttcatcagcttgttggaatcgtgtgtgtcggtattgttgcctttgtaattaagtacttacttgtaagtaaaggggtcataagtatcttgtatcttgtaaatggttatgtaaactcttgtaatttgtaacgcttaaatgccataaacataacggctacaatttaaatcgcttcttcatcctgccccgattgccatggaaagtcttacaaactctagcgtacaacagctcggaatctcaattgggatttccgcattgcaaaactgaccgatcaaaggtctgttcccttaaatctaagtgtaaagtccaacgcagacatggcgagaagtgatttagtgcccctgtcgcaggttgccagataatacataatttgaaactaccaactcattagcttatttagcaaagaattaaccaaactattagtttcacctcaactgagcttatatgtagaattcaatgtaaaaccatataaacgagctcaaaatattgttctcagggcagtacagggatatacatacaatcagtgtcagctgtgaaacaacttggattaatgcttttaggaaggcaaccgcagcgtttttcatatcctctgctataagtttgtatatttgtgtatcttatgtgtgtattcgctaataaaagttttctacattaacgcaacgtgtgtatctttggggcggaggaaaggcttctaaccctaatcaaaatcatcctttttcggggttaatattcaaaatgtatcttcttctttgggtttttctatgagcaattctggcgaacgctaacaaatacaatgggtatataaatac

SEQ ID NO: 36407 - DNA, 1683 bp, DROSOPHILA
atggatttcgaccagatcttggagaagtgcggcagtgcgggtcgctatcagtacctgatgatactgctgctcggctacatagccttcacgaccaccgtgcactattactcgcagaacataattgggtttgtgccccagcactggtgttatcatgaggcactcgagaatcgtagttttgaggagatcgccgccatctatgccccatttggcaaggaggcctcctgcacgcgattggataagatcgagggcgacagggtaacggtgagtaatgagacgtgccagcgttggatatacaactatgactttggatttaggagcatgaatgcagagctgaactgggtgtgtaatgatgcatacaaggcacggatcggacaatctctattcttcctgggctccctgatgggcaccttcacctttggcgtcctgggtgacaggatcggcagagtgagagccgtgatcctggccaatcaatgtggattcgtaggcgactttcttaccacctacgcctccaacttagtgcagttcgccatttttcgatgcatttctgggctcgcggctacagcaaattattatctgatgtttattctggttctggaatacttggcgcccaaactaaggaatatggccattagtggaaccctgggcatttgcttttgtctaggagctctggtggccccctggctttccgtactggctggcaactggcggatctacctgacctgctcggctttgctccagttggtggtggctttgttctactttgtggtccaggagagcgctcagtggctaatcacacggaccaatgtggagggggccattgccagactgaagcacattgcccacttcaatggcatggaggtgaaagcagctgactttgaagccttcaggaggaactgcatcgtcaagaggaagctttcaaaccaaccggaacaaacggcaggaattttcgatttattgcggactcctaatctgaggaaagtatcgctgctggtggttttcacttttatgctgacttcgctgagcttcaataccatctctagaaatgtggagggcatgggactttcaccttttgtggtcttctcgctctttgcggtggtcgttcccccgtctggatttattcagggcctactgcagagccgagttggccgcaaagccactgcatttctggccatgctctgcaccggactcctgtcctgcgctttgggcgtggccctctccacggagggcgctcaaaagaacgtgaccttgctgctggccttcgccctgcccatgcggctgggcatctctatgtgctacacggtcacctcgcagtttgcctccgagctgctgcccacttgtgtgcgctcgcgcggaattgctgcagtgcatctggctgctgcgggtgcttcctttgtgtccccctacctcattcatttgggcactaagttggcggccgctccgtccctcatcctggcgctgctcctgcttaccgcatccggatgcactctcatgctgccggaaacgaacaatagacaactgcccatcacattggctgatggcgaggcatttggaaagggcgaatccatgctatcctttgattgttggcgtcgccacgatgacgatgtatccaaggaagccaccgaagaagtgaggctgcaccagctcaatggacaaacaaaatccgaaacggaagcggaagtgtag

SEQ ID NO: 36408 - protein, 560 aa, DROSOPHILA
MDFDQILEKCGSAGRYQYLMILLLGYIAFTTTVHYYSQNIIGFVPQHWCYHEALENRSFEEIAAIYAPFGKEASCTRLDKIEGDRVTVSNETCQRWIYNYDFGFRSMNAELNWVCNDAYKARIGQSLFFLGSLMGTFTFGVLGDRIGRVRAVILANQCGFVGDFLTTYASNLVQFAIFRCISGLAATANYYLMFILVLEYLAPKLRNMAISGTLGICFCLGALVAPWLSVLAGNWRIYLTCSALLQLVVALFYFVVQESAQWLITRTNVEGAIARLKHIAHFNGMEVKAADFEAFRRNCIVKRKLSNQPEQTAGIFDLLRTPNLRKVSLLVVFTFMLTSLSFNTISRNVEGMGLSPFVVFSLFAVVVPPSGFIQGLLQSRVGRKATAFLAMLCTGLLSCALGVALSTEGAQKNVTLLLAFALPMRLGISMCYTVTSQFASELLPTCVRSRGIAAVHLAAAGASFVSPYLIHLGTKLAAAPSLILALLLLTASGCTLMLPETNNRQLPITLADGEAFGKGESMLSFDCWRRHDDDVSKEATEEVRLHQLNGQTKSETEAEV

SEQ ID NO: 36409 - DNA, 15711 bp, DROSOPHILA
aatataaaaggcattatgccgaaatgagtttccatacgatttctcttttaatgattaatatgttttcctcgatattaaaatgcataactacgattaagtatgtgcttgcgttcttaaaaaacagtatggttttcagggtaattttctgtgttatatgcatgtaggtaaccatttttttgatatatctaacaatttgtacttggtttttagctccactaaggagtgtcttgttttttattcaaaccatcccttatcccccatctctaagtgacacagcaaagttcaaagcccgcctgcacccatgtttttgagcagcgagttcgagttccattgaccaagcggtatataattgttggccacaaaagcgaaaacagcttttcggccaaataatagttggagaatagaaaaaaaactacaatcgacgcccccgccaagcggaacagagccacacatccacaaccacaaccacatccgtatccatgaagtgctccacacatcgaaaactacttctacatacatctggagccacattaacacactctgactacgcaactgtgcgaaaatcgctttagacgctaactggaaaccgagaagcagttggctatgagtggggcgcttaatatggatacagttaattgaccttgattgagtttatttcggttaaggcagctgtctgcgagccaaatgtctccattctgtttggtgtgagtgtgtatctgtgagtgggcttcatcaacatcattatcattatggaaggtctgcgggaggaagtggcacattcccgagattcctgccacagcctaatcagcataaaatagttcagggtgcaactgcctgctttccaaagtttgagaaaatatgacgaacttcttgctactatactaatattattataccgtttctcaaaatatatgttgtaatttaaattaaattggtatacttgtatacttttcatttttcagtgtagacctcgccttaaggttatctgtctccttctcgtctaaggatcagattcccccagaacttttatgcctgcaaatgcccaactccttacacttggagtgaggaatttttcattaggaaggaagcaatttcatggccagttatttgagccctccggctgacgcctgtgcgtgtcgcactagaaacgcaccaccacccatgcccaacccgcccccacactgaaggtgtggccaccatccccgccccgaggtatgcaaaaggtaaacattgggcattgagcaactcaccagctgacatgttgagacgtttgcgcgcatcgcgtttggagtagaggaactggaagcccgcgcctagttttttgcccgtcgaaccactgctggcacccacaccaacaccaccacttgagccacctcctgccccactgacggccgctgctcgagctgccaatcctggcgagcggtatctcgcactcttggcactgccagtggccgaaacggtggacaaattagagggcgtgtggttgagggcgctctgagactttgtcttgggggtgctggttatgggagcaccaacaccggtggtgggtaaccggggtagtgaattcgtgctagccaccacttggttgggattcagactgcgcggcaacgtggatctggcgccgccaaactgatgcgaagctgcctcatcgctggagtccgtctcgtaaatggcatccggtacactggaacgccgcacatccttcgtagaatcaccgccaatcgaggatcccgcggaggagagccacggcttggccggcgaggactccaactggtggtgatgggcatcgccgcctccaatgctgccgcaggatcggacgcgatccaattgctcgcggctcaggctctgctggtgctggctgaagagaaggtcgcctgccgatcggcgctttgccacagccaaagcggacgcagacgacgagttatccctgtccagttggctcagctggctgagcctcgttctgctgtcgccattagccagtaatgccgactcaaaactgccgcgccacgagaatcgctcgtagtcgctggtcacgccgcactcctccccggcgttgtccgagtgtccgggtccgccggatcctcccgctcccgatcccacgccgccggctggataatgcaccgtggcatggtggtgcaggtgatgcgaatgcggcgtagtgccgtccagcagtagatcatgggatttgcttcgcagctttagctgcttgatgggcatggctttcagttgctccgccacctcatcttcctcatcctccgtcgtggtggccgagatcttggcctgcagtcttcgatgatgccgctgtccttgcggggatggagtgggtgtttcattgccactgctaacttcgtgcatcagagctaccaatctggtaccaatatgctgcatcaccttggcaaacagttgcggggatctctccgtggacggttctgcttcctccaccgctttggtggcttctgtttccggttctccacccgccgccactttgctaaaggaagctaccaatttctgatacaccaatgcttccataggcacactttggctctcgtccagcagtccaccatcaccacgatcaccctcctcgtcaatttcaaacttgttgatgatctgctgacagctggcggagatctgagccttcagttggcccttcctttcaccgccctccagatcggagctcgtgtagtccgaagaatcgtaggaatcagaccatgtatcctcactgctcaggtactccactatttcgcgcacctgctcatcattgatgcccggcacggttttcatcagtcgggtcagctcattctcaaagtaggccaactgagctggccgggatttggccaatctgcgctgggaactgggcgtggtgttgacattggtggtgctgggcccttgattgggcgtggagggcttgctctgctgtgcattggcggtggcgacaatgaggttcttaaagaactgccgcatcttgctcatcatcaggttggtctcctcgtcggagctccaattgttgaagctatcctttcgcaccagattgggcagggcaagatttttcagttggctggaaagtgtgctggctacagctgcagctgctgaagtgcttggttgatccatcctggccagactaatctgactatggaccggttcccgatcctcactgatctgctccagagctggcgttgggctcttgggtggctcacaatctggtgccgccttcaggagatcatcgttgctgcccacaaagccactgtcccggctgtggtgatgctgctgttgttgctttttcgcctgcgactgcatctgcacttgaccactgctgcccggggtgggagtccggcactcggaaggctctagatcgtggagcttcttctcgtccagagagtcgtgacgcttgcgcagttgcttcttgcgtttaatggtgtccgaggaggaaccatccgaagctccggcattggccaaatgaatcacagtgtcgtcacagcccgcctccgattccgaggtgtcctctacagtggctgcagctgctccgcctgcagaagtaactgtggcatccagggtgtctgattctggcagtagcaaattatccaacgaggagttgtgacttctaggtgttcccctggctcttaccagtcgctttctccgctgactgggactcggttgtccttcactatcactgcctacactgccaccactttcatcgctctccgcctgcttttctgcaccactgaatcccatgaagccggagaggaagtacttttccagacgggaagaggccagatcggaagctccacttgtatccaacagctgatcctcatgcggtagggagtcaagactctcagagcactcggaactcacttcggatgcagtgtcatctccgcgtgtatcaatagaactcattactcgaccatctcccagcccaaagaagaagtacttctctagttcagaggcacttagtcgatggtggtgctgcaaggtgcgctgccttctccgttcggatagatcctcatcctccagctcgacgtcttcattgtccgcccgcatggaggccacctcgctctcctcacaactctcctcgacgatggtgtgcagggtgaagtcgatggcagatctattgtatccccttaggtcctcctctcgatccatatatccatgtcgccgggctccttcaccttctccctccgcatcttcggagtctgtggccgtgggtgtggtggtagcattgctgagatcttcgtcctcatcctcgccgcgctgactcagttcctccacccaggagtcgtcatcagccaagccgtcctctacgctgagttccggcacagcaggcggttcgtttagcgagtccacactgtacgcttcgcgatcgctgctcacgagttccgttggttccatggcgcgaaatgagtcactcgcaaagttctggccaacagtgtggctgttgttgctactggtcgggtctttgtgtctgatgttgctgaagttgctgctgctgtttgccatttcgtaatcgccagctgcactttcattgtctttgttgatcatgaccaaactgcgatacttggctgaaagtgaatttttgggcgaagccagttcgctgggcgatgttgcaggtgtgtcagatgttgctgctgctgctgttgctgcaactgctgctgatgcacttggagtgttttgctgatgactaccaaatattttgtcgaagtcacactcgttttcaccactcacatttgaattcacactcactacgtcactaatatcgcagccgacaaccacactcgagccgctatttctcgtcttttgtgctgcgaaagcgtcattattattatggccaagttcgccgtcgttgttgttagtgttttcgttattgctattatcgtttctgtgtgtgttgttgttattgctgccgagaagcgcggcacgagaagcgaccgcaacgtttaacatttcattttcgactggcgactccgccgactccgatttcgctccacggcgatatcgttgctcgcgagcgtcggcaggtaggcgagcactctcttctacctgctggagcggctgctgctgctgctgctcaggtgccaacaaactcgccgaagttgccgagagtgaatccagcgagtagtcactgttgtcgtttattttgcatgcttggctgcatgtgacgaccctctcctcggtttgctcagctgttcggccattccgctcatcccgcagtttgccatcagctctgtttgcttctacctcaaccactgcctctacctgccgtaagcaggtgagactcagcggaccaacgtcattagaacttagcacggtcgaggggcttttccgagaagaagggctattgcattcgtcgggtttcccggcactacctggctgcgttgtgcagtgggtggcagccacatcagtgcccgtggtggagagctgcagatcctcattgatttcggccactccctggcgcaagcgttggagcttcaactccagctgagagttctgcttgtgcagcgccagcaatcgattgacatcgttcgagatgctgtgcagctcatcgcaggcggccagggcatcgctggcgtctatctcatgcgcttggcggcgctctgattgctcgccatcgaactcgacgtctggcagcgatcgcatgtggtgcagcaccacgccggcggcggcgtcgtccgtctgtccgcccaccactacaatgcagttggccagctcatcggttgagttggcaacacggcgttcactttcatcatcgttaatgttgtcttcgtcacttgattggcaatcacgtgcagctgtcggcggctcctcctccgccttcttgggctcctcctctaggggtttcacgtagttgagcacaattccacaatcggtgcgctcggtgtctgtatcattgtcagaggaatcctccaaattggcctccgaggaagacagagaatcgccctcggtggaggaactgcgtcttacccggccgccgggctgtcgatttacgacgaacaccttgttgaacctccttctcttgggcctgcgatcgcgcacagttcccgtatcatcggagtcacacgattccgagctggagctggagtttgagctgctgctggagctggaatcgctggtggtgctgtggtgtcgttgctccactgcatccacttctcctagttgctgctcctccatcattcccgcaacgttgtagcttctttgcgtggtcctacgcggcttttgctccgcctgctcctccaactcacgctccctatcctgatctccatcctggctgctgttgctgctggcctcatctggactactggccgcatagctttcgctctgcagatgggccgccgtcgatggtgatgcctcatcggacatcttgatgttctctataagtcgattggaggacaaattcttggcagtctccgccgtcgctcgatgccgatctatctgctctgggtgctgggctctgggtttgggcttgggaatgggactggcggcactggcactagcactttcagccacatttccaacagcattttcgactgcaagtccgccgaaacgagttattaccgcaggagccgcagctctagttgctgtttgtatttgtgctgttgctgcggctgccgctgctggtacttgatttttatgtatattcgtttcgtctgctgcttccacttcttcgtggctgtttttactggccaggtaggtttgtgttgttgccgctgactgggtttcgcatagatttcggctctggtatttgctggccactctcagagcggttccctttgtggatgtcgctggtgttgctgctggctctgcttttgttgatattgctgctgtcgcggcactcttatctacactggcaacatgtgcctgaacgcactgaggcactggcaatgtgccggttttatcataaacattacacaatctacccgttgtgggcgttgcgttgttgctgttgctgttggcgttgtcgtcgctctcactgttgctgctgccgcgacgcgcgttgctcgtttctagttgctcacccgtcggcgaacgcgaagctactaaacttgttggctttggcttgaaagcactgctggccatttgttgatgttgctcttggtattgttgctgctgctgctgcatcgagttggcagctcgcattggactggccagcgtttccaggctcctacccgccgtcccatagcccgaggtgctcgacgacgacgaggaggatatggtggagcagagcgactgcgtcatcagtgatcccagcgaggcactcagctccggtgccgaggacttgaagccacccagtccgcgcaagcgctccggaattggcggcggagtggtaggcagttgttggtagctcttgctggtcaccggcggcgttgcatcgaacatgttgccactggccgctgcaaattgctgcgaataggcggcaactatggcggcaaattgctgctggtgaccggccgccttccatagctgctgcagactggcagccagctgctcgtcctgttccagtagtggattgcctgacacttctggccagttgggataggcggccatgggcactggtatgggcaccgggacgggaatgggcacgtactgcggctgctgctgctgctggccgggattgcagttgcatcggttgtggctgtggtggtgatgattctttaagaatcgcgtcttaatccgggtcttcatgctcagcggatgtggcggtggtggcacgggtggtggtgtttgatcggagctggtctgcgaactgctttcggtgttcagcacaaactcctcgtcggtgccggtgtcactctccctgatcctgggacaatagatattcctgggctgttggggtcgcctttgcacctggggagaatcgctatcgctcgactgacgccttacacgcggcggtggagtgggcgtggctcgggctgtagtataggcaatcatggtagttgtcgtggtcgtcgtggtggagatcatggagggctcaaagtaatcccaatcgcagtcttccacattgctcacaatgctgtgacagtggtgcgtggagcaggatgaatccgtgtcatcctcctccccgtcctcctcctcctcttcttcctcttcgccgtgacaggacgacgatgaatccgagttgagaaagacgagcttgaactcgtccgcttcaacgctatattgcgactgctgctgctgtcgtccgtgctgagtggaacacctgaagtctagctccgatgacgacgaggtttccacggcatcgcccccacctccacatccaccgatatcaacggaaaccacggacagctgctgccctatgcctgtggagtagcagggatgaagtttcgggaacatacgtaagttcggagacaaccactttgtcgttgaccaacaccacgaagctgttcgcaaatactggttattagcaccaaacaaatacacacaggtgaaatactggttagccggagggtgagtttttccacaccaaagttaaaggttgcagatgggctaagcacatggacgggtggtggttgaacaaaaacttacggctagcatgggttaagcttggatggttacaccgaaataccacagatattaatagatagaaaaggctgggaaggagtgttagtcattttatcaagcccattttatagatttcaatgttaatgggtatgaacaagtttgttagctgtctagttacacgccttgttaaaaaatgatttctacttcaaatcgatattaagttcttgcactgatataaacaacatatttaataacccagcaccaggttgaataacttccctataaatatgttctgtttataattgagcgatagaatgttcaataactaaactcaacatatacagaacacaatgatgagtgatcgtaatgtctatccagttccaatttcatacaaacttgaaacttaaaatttaaatggattccatattacttttattttgacaacactaaaagtttctccgaaaaaatgcacttcttcccaataagttcagagctgggaaaaatctttagtgctgcaacgaccttgagtaagtgaacttcatcctgactaaaattaaatattccgaaaatcatttcccctgctgttcaagtacccatcctgtcaggaagcagttcaaagacccttgattgattatggttgtttgccacaagtttttctgcccaagacaagtactagcgaaaatttgccaaaaagcttttaaagttgccaacatcgccgtccttcaaacccttctgcttggttggttgccctaacaaaaactgcaacagcggcggatgcacatagcgtcaatccctcgtagccacaaagtaaacatttgatcgctgcccaccctgctgtatgagacactgcgagaaatatttcagagaatttttaaaacttcttctacccactcttgcaactaatagtacaggtgttcagtttttggacactttaatattaagtaaactcatttttaagtcaaatatattgttctgagtgctcagaagttcttgtctaaacgcaaactgtgcaccgttttagtcattcacagagcaaaacccacataggagcacaaaaggttcaggagataagactaatgccacagttctgccgctccacgtggtccaaaaatccgacgggtgacagcgtggctttggtgtgtacgtgggcaccgacagaacaaggtaccaaattctggaatccttcgaggcgacagtccaccgcatctcgaattcgcacatagacacaggctgcgttggtggtcacaaaaccgaacgtacacccacaaatcgccaaattgaaacataacaaaaggcggcaaaggcgtttggataccctgccttccgcccggaaaatccccgcctgaaaactcttgaagtgcgggggaagtggtgtgggtggggcggtgggaaatcgatttatgagttgccaaaaaattatcccgccagcccacggctaggtttttgtattttgtttcggtcccgtgccacaaaatcttttgaaacccgccaactttgctcttaaatttggttcttcggtcgtttgtggtcatgccgccaatagcttcgggaaaaatttaattccaatggtgaatggaaagtctgccgtgaagaaggcgaaaattgatggaatacttttaggaactcgcaagagaagtgagcgagaaaaagtgttgcactctttttggaaacgcttcttaaaaaattgatgagggagatggtttccgaaaagaacctgaatgtaaaataggacagttgccaagtacatcgattatttgaaactctgattctctgctacagatttgatgattttacttagcttaacgtgtatgtatgtattttaatttgaatgcataatcccttaagctaaaactattttaaagcactttagtccattagcacaactagttttctatgattaaattgataggattagttttttaggttagtttcgcccaattaaagtgaataaagtccagggcaacttctggttaagcactaatttttagacactgacaaccaaagaagcgcccaccttcattcccagaagtggagcttaattatttgagccaaattagactgaaggcgaagcccttcacaaagagtttgttagtcacccaactaccctctatccgcatcagcatcaaaagtagcattaccatcaccaagttaattacgctccaaacatacatttagctacacaaagacaactacagggtatgcactgagacaaagtcttggaaaataaaattcgcagaaattatactttaaaacatcattttagtaatgtgactgaactttttgataaatagttctcgtaaaaaggatagtttatttttgactttccattgacttttctctcagtgtaccgaggctaaggacacttcttatcactaaccttcttcggcggccttctccttctccttgcgacgctgcagcacgaccttcttgaagacaaccgccgcggcctccactgcattctgcagctcctgttcgcccaaagtgcttgtgtgggtggcctcctaatgaaaaatgaaatgggggagcaggatgaaaaggtttcacgcttaagcctactggtctccggacgcttgatgttctactcaccgccgagctgttgggatcgccgccctccttgttcgccgaggactcgagggacttgccattgaccggctgctccgctccagatccttggccggattccccgtggggcttctcctcctcttgccctgtggatgctactgaggcgacaggaatttctgtttttttcaggcgcatggctaaatcagagtttctatgcataagctgttgatggaaggagtaaatgtgctggggcgtgctacctgtgggggcggttaacaggagggggtgcaaagcgttcatcaatcgggtgccgaaacaagcgcagctactcaaggttctaccagggaccgcaaaaattaattaattaattaattcattcattagccgtaaatacatagttacttatgcgcaggcaatcactactttgggaagctggggtggggatacttcacttgtattaggtgtaaaaatttaagtttctaatcactgaatggtttattgcttgaacttatatttgttaaggaaagcgatttaaattttactaaggggtgtaatattggctttatattctttttaatagaataatagtataacttttgataaaacagacattgaacatgcaatttatcaaataaagagcacaacaataatcacttgaagctagatttgttttttttttgtagttttgcttaagcgagggacaaagtttgaatagtttattttgtagtgtgtaatgtatattttctacaaaatatatttgtacagatagctatctacataatattgctttaccatctttggtttattgtgtatatttgatatgtttctaatgacagtgagcgattattttatggcttaaaacttgtgaatgcaaatgataggtgcttgtgaaataattggtaataattgcggtccctgggttctacggatgcgtgatcgcagattgcaaccatagctactatcaaaaatgacgtatcctcggtacttaccctcctcagcttcgccgattcctgtgcgactgttgcggcgcctcgcctgcggaatcttcgagttgccacgcgttttatccaggatatcagccagaggacgagggctgggtattttcgatatttccgttttctttgtgggctgatcagcgaagtattaattaatgtattttcacctagatcaaggtttgaggtcaactcacctgagtgtccttttcgggatgcgagaaggatcgtcgtgtgacgggcttgggcgtggtcttcgctccagaatcctcggaaacagagcgcatctgctccggttttcttctctcggcagcatggctatcggtggcacttccactggctgcaccttcattgcccgaacctttgccattggcatccgagacctgtgagagttgggccagttcctcctgctgcatctgcagttccctggattgtcggcgcctaatgcgattgtgcattagaggagtacggggtagtgctgctccgccatagaagccttgtggggtgcccatgtccggataatagccgggcacaccacctgaaccgccactggcgcctagtcccacgccagctcctcccccgtaacccgaatcagcaaggacattctcggcactgtaaatcggtctttgggaggagttctggtagcttccatcatccgaaccattgttgtagatgatacgtggctcactgctaaatccggcattatagtttcgttcgtactgcacctcgtcggactccaagaaactggtcgcactgtcgccaaagtaatccacatattccgggcgattatccagctcctcagtgacatcgggaaactgatggaactgctgcttggcctccccgaaagttctttcctccttcaggcaatcctggcgcaccaggcgactgggcgatcgaccaccaggccgctgcacagccgttgggatctccggcagcaatcttctgttctccgggtgtcccttggtgttcgagtactcctcgttgctgtggctgcgcaccttgatcatcttggaatgcggatcacgggagtgatggatgtttacactctgactactggagtactgctcaccaccgccgacgaccccggtgctggccacactgcctccgcttcccagttcggtgcctcccacggcgggcacatgtggctgcgagagaaattgccggggattcggaacacttgggaaaaggaaattctgtttggccctcggcgaaataggcatgaattttgccggaggagtagagtgcacggtgagtgtgtttccactgctaaacgcttccggatttggcagagtttgctgacgcatgaattccggagaacgtcggaattgcggggaagtctgtcgctttggcggagatgtgggcagtagcttgacatgctgctcgggatttggtagagttgcctgccgcgtcattctcggcttgggcatgggtcccacatcctgctcgtcgctggccaaactggacgtttgtgattcgtaattcagtggtggcggagccactgtcggcggaggtgctcccgtgctgggcagcaatttggtgcgatgataggtgctgggcggctctgggaacgaggtctgcctcatgaagggcggatagcgctgctgctcacccggcgatctttccggggagcgactgtacagccggttcggggatgtggacatatatatagccggagttggttgagctggcagcgtggattggcggcgcacctgaagccgatgatgcgtgggtgtcacctccagttggggctgctgttgctgcggctgctgctgctgtacgtagttctcgcagtcacccaccgtcacaccaactcccactcccattccgggcatggtgttcatgtggatgacgtcgtcgctgttgtaggcgctcggatagagcggactcttctgcagttgatgcggcgatgtgggcgccgttagattcacggaattgtaattggccagattgccaccactgccgctgagagccgggtcgttgttcaggctactcggaagcgtcgactgacgcaggaccctccgtcccagctgccacttgctactggttgtgggcgtggcagtgccacttccgtaattgatgccgtgcgtgggtcgcggctgtgggggcaggtgatgctgctggtggtgctggtgcagggtggggtagctgcccgctgattgggcctcaatcaaatgctgctgctgcggatataggttgtccgccaccggctgttgtgagttgggattgttcggatcgtcctcgggatctgtcgggataaaggattttcaataatccgttctaacaaattgcaatatttttttttttaaaaaatcttggaaaaactattaagcacttaaaacttattttaaatgcatgacttttgctgttcgcagtctgtttaaaaaatgtacttacgtagttgaataatccttgaaggattctttcaaacatgcatatactcaatcaaagtctcttagccatataatgaaagtaaaatccagagtacttactcgatatggtccaagaacgccggatgctcttcctcaagacgtcgctggtggtcagatggtcgacggcactgcaggatcccagggcataggcgtccttcagccactcgccgctggccgactgtatctccctgcaagagcaacaacattgccactttagaaaccagaaaacctcgccaaacattttcccaactttcgttggagacgtcaaacagtcaacaagtaaatcggcgactcagcggtatcacgtctgtctgtcctcgcgacatttggcagactggctggctgacttactcaaacgaacactgaatgccggattgtcggtgtcacagcagcagcaacagcaacatggaacatgaaacaccaacacacaccatgactttaagccaaggtgtgagccaacggaagagttaaagccagcacagactgccttgggttcgcacaaacagacagaaatgtatttttggggaaaaatttgacggcgaaaccacaacggaaaagtttggggctcagataccaaagaaataattacatatttaatgaataagacaaacttcaaccggaagttggtcctgcttatgtttaactttaatctcacgtttgggttttaaataatattaaaagttagcttcatatggccatacattgcattacacttccatttaatttgaatagccatactaagaactggaaacgtatttataattaccaagaactatatgattggaaaagcatttgtacaatttaattaagttcctgggaaagataaactctttattaaatttctgaaaacttgattattttagcgggtgatataacacccacttatgtattaagcaaataataatttatatattactagaaaagctttttggtaacgcacaatggggtttcgagaaaaaagcgttattaataacccatttgtacgtatatacaatttaatataatcaatgcgtggttgcccagatacaataaaaaataagaattcaatgtctggccagaaattcatgaaataattgtatttcttcggccagacactgtgcttttgtgcctgacttgggggtgcagtcgaagcaattggataaattcctgctgagaggcagacgcaaatgcagacgccctccatcaaaataaaaaaggggctgggtccatcgtggtagtcatcatgtggcattcataattat

SEQ ID NO: 36410 - DNA, 9699 bp, DROSOPHILA
atgtttggcgaggttttctggtttctaaagtggcaatgttgttgctcttgcagggagatacagtcggccagcggcgagtggctgaaggacgcctatgccctgggatcctgcagtgccgtcgaccatctgaccaccagcgacgtcttgaggaagagcatccggcgttcttggaccatatcgaatcccgaggacgatccgaacaatcccaactcacaacagccggtggcggacaacctatatccgcagcagcagcatttgattgaggcccaatcagcgggcagctaccccaccctgcaccagcaccaccagcagcatcacctgcccccacagccgcgacccacgcacggcatcaattacggaagtggcactgccacgcccacaaccagtagcaagtggcagctgggacggagggtcctgcgtcagtcgacgcttccgagtagcctgaacaacgacccggctctcagcggcagtggtggcaatctggccaattacaattccgtgaatctaacggcgcccacatcgccgcatcaactgcagaagagtccgctctatccgagcgcctacaacagcgacgacgtcatccacatgaacaccatgcccggaatgggagtgggagttggtgtgacggtgggtgactgcgagaactacgtacagcagcagcagccgcagcaacagcagccccaactggaggtgacacccacgcatcatcggcttcaggtgcgccgccaatccacgctgccagctcaaccaactccggctatatatatgtccacatccccgaaccggctgtacagtcgctccccggaaagatcgccgggtgagcagcagcgctatccgcccttcatgaggcagacctcgttcccagagccgcccagcacctatcatcgcaccaaattgctgcccagcacgggagcacctccgccgacagtggctccgccaccactgaattacgaatcacaaacgtccagtttggccagcgacgagcaggatgtgggacccatgcccaagccgagaatgacgcggcaggcaactctaccaaatcccgagcagcatgtcaagctactgcccacatctccgccaaagcgacagacttccccgcaattccgacgttctccggaattcatgcgtcagcaaactctgccaaatccggaagcgtttagcagtggaaacacactcaccgtgcactctactcctccggcaaaattcatgcctatttcgccgagggccaaacagaatttccttttcccaagtgttccgaatccccggcaatttctctcgcagccacatgtgcccgccgtgggaggcaccgaactgggaagcggaggcagtgtggccagcaccggggtcgtcggcggtggtgagcagtactccagtagtcagagtgtaaacatccatcactcccgtgatccgcattccaagatgatcaaggtgcgcagccacagcaacgaggagtactcgaacaccaagggacacccggagaacagaagattgctgccggagatcccaacggctgtgcagcggcctggtggtcgatcgcccagtcgcctggtgcgccaggattgcctgaaggaggaaagaactttcggggaggccaagcagcagttccatcagtttcccgatgtcactgaggagctggataatcgcccggaatatgtggattactttggcgacagtgcgaccagtttcttggagtccgacgaggtgcaaccgatttacagtgccgagaatgtccttgctgattcgggttacgggggaggagctggcgtgggactaggcgccagtggcggttcaggtggtgtgcccggctattatccggacatgggcaccccacaaggcttctatggcggagcagcactaccccgtactcctctaatgcacaatcgcattaggcgccgacaatccagggaactgcagatgcagcaggaggaactggcccaactctcacaggtctcggatgccaatggcaaaggttcgggcaatgaaggtgcagccagtggaagtgccaccgatagccatgctgccgagagaagaaaaccggagcagatgcgctctgtttccgaggattctggagcgaagaccacgcccaagcccgtcacacgacgatccttctcgcatcccgaaaaggacactcagcccacaaagaaaacggaaatatcgaaaatacccagccctcgtcctctggctgatatcctggataaaacgcgtggcaactcgaagattccgcaggcgaggcgccgcaacagtcgcacaggaatcggcgaagctgaggagggtagcacgccccagcacatttactccttccatcaacagcttatgcatagaaactctgatttagccatgcgcctgaaaaaaacagaaattcctgtcgcctcagtagcatccacagggcaagaggaggagaagccccacggggaatccggccaaggatctggagcggagcagccggtcaatggcaagtccctcgagtcctcggcgaacaaggagggcggcgatcccaacagctcggcggaggccacccacacaagcactttgggcgaacaggagctgcagaatgcagtggaggccgcggcggttgtcttcaagaaggtcgtgctgcagcgtcgcaaggagaaggagaaggccgccgaagaaggcatagggcagcagctgtccgtggtttccgttgatatcggtggatgtggaggtgggggcgatgccgtggaaacctcgtcgtcatcggagctagacttcaggtgttccactcagcacggacgacagcagcagcagtcgcaatatagcgttgaagcggacgagttcaagctcgtctttctcaactcggattcatcgtcgtcctgtcacggcgaagaggaagaagaggaggaggaggacggggaggaggatgacacggattcatcctgctccacgcaccactgtcacagcattgtgagcaatgtggaagactgcgattgggattactttgagccctccatgatctccaccacgacgaccacgacaactaccatgattgcctatactacagcccgagccacgcccactccaccgccgcgtgtaaggcgtcagtcgagcgatagcgattctccccaggtgcaaaggcgaccccaacagcccaggaatatctattgtcccaggatcagggagagtgacaccggcaccgacgaggagtttgtgctgaacaccgaaagcagttcgcagaccagctccgatcaaacaccaccacccgtgccaccaccgccacatccgctgagcatgaagacccggattaagacgcgattcttaaagaatcatcaccaccacagccacaaccgatgcaactgcaatcccggccagcagcagcagcagccgcagtacgtgcccattcccgtcccggtgcccataccagtgcccatggccgcctatcccaactggccagaagtgtcaggcaatccactactggaacaggacgagcagctggctgccagtctgcagcagctatggaaggcggccggtcaccagcagcaatttgccgccatagttgccgcctattcgcagcaatttgcagcggccagtggcaacatgttcgatgcaacgccgccggtgaccagcaagagctaccaacaactgcctaccactccgccgccaattccggagcgcttgcgcggactgggtggcttcaagtcctcggcaccggagctgagtgcctcgctgggatcactgatgacgcagtcgctctgctccaccatatcctcctcgtcgtcgtcgagcacctcgggctatgggacggcgggtaggagcctggaaacgctggccagtccaatgcgagctgccaactcgatgcagcagcagcagcaacaataccaagagcaacatcaacaaatggccagcagtgctttcaagccaaagccaacaagtttagtagcttcgcgttcgccgacgggtgagcaactagaaacgagcaacgcgcgtcgcggcagcagcaacagtgagagcgacgacaacgccaacagcaacagcaacaacgcaacgcccacaacgggtagattgtgtaatgtttatgataaaaccggcacattgccagtgcctcagtgcgttcaggcacatgttgccagtgtagataagagtgccgcgacagcagcaatatcaacaaaagcagagccagcagcaacaccagcgacatccacaaagggaaccgctctgagagtggccagcaaataccagagccgaaatctatgcgaaacccagtcagcggcaacaacacaaacctacctggccagtaaaaacagccacgaagaagtggaagcagcagacgaaacgaatatacataaaaatcaagtaccagcagcggcagccgcagcaacagcacaaatacaaacagcaactagagctgcggctcctgcggtaataactcgtttcggcggacttgcagtcgaaaatgctgttggaaatgtggctgaaagtgctagtgccagtgccgccagtcccattcccaagcccaaacccagagcccagcacccagagcagatagatcggcatcgagcgacggcggagactgccaagaatttgtcctccaatcgacttatagagaacatcaagatgtccgatgaggcatcaccatcgacggcggcccatctgcagagcgaaagctatgcggccagtagtccagatgaggccagcagcaacagcagccaggatggagatcaggatagggagcgtgagttggaggagcaggcggagcaaaagccgcgtaggaccacgcaaagaagctacaacgttgcgggaatgatggaggagcagcaactaggagaagtggatgcagtggagcaacgacaccacagcaccaccagcgattccagctccagcagcagctcaaactccagctccagctcggaatcgtgtgactccgatgatacgggaactgtgcgcgatcgcaggcccaagagaaggaggttcaacaaggtgttcgtcgtaaatcgacagcccggcggccgggtaagacgcagttcctccaccgagggcgattctctgtcttcctcggaggccaatttggaggattcctctgacaatgatacagacaccgagcgcaccgattgtggaattgtgctcaactacgtgaaacccctagaggaggagcccaagaaggcggaggaggagccgccgacagctgcacgtgattgccaatcaagtgacgaagacaacattaacgatgatgaaagtgaacgccgtgttgccaactcaaccgatgagctggccaactgcattgtagtggtgggcggacagacggacgacgccgccgccggcgtggtgctgcaccacatgcgatcgctgccagacgtcgagttcgatggcgagcaatcagagcgccgccaagcgcatgagatagacgccagcgatgccctggccgcctgcgatgagctgcacagcatctcgaacgatgtcaatcgattgctggcgctgcacaagcagaactctcagctggagttgaagctccaacgcttgcgccagggagtggccgaaatcaatgaggatctgcagctctccaccacgggcactgatgtggctgccacccactgcacaacgcagccaggtagtgccgggaaacccgacgaatgcaatagcccttcttctcggaaaagcccctcgaccgtgctaagttctaatgacgttggtccgctgagtctcacctgcttacggcaggtagaggcagtggttgaggtagaagcaaacagagctgatggcaaactgcgggatgagcggaatggccgaacagctgagcaaaccgaggagagggtcgtcacatgcagccaagcatgcaaaataaacgacaacagtgactactcgctggattcactctcggcaacttcggcgagtttgttggcacctgagcagcagcagcagcagccgctccagcaggtagaagagagtgctcgcctacctgccgacgctcgcgagcaacgatatcgccgtggagcgaaatcggagtcggcggagtcgccagtcgaaaatgaaatgttaaacgttgcggtcgcttctcgtgccgcgcttctcggcagcaataacaacaacacacacagaaacgataatagcaataacgaaaacactaacaacaacgacggcgaacttggccataataataatgacgctttcgcagcacaaaagacgagaaatagcggctcgagtgtggttgtcggctgcgatattagtgacgtagtgagtgtgaattcaaatgtgagtggtgaaaacgagtgtgacttcgacaaaatatttggtagtcatcagcaaaacactccaagtgcatcagcagcagttgcagcaacagcagcagcagcaacatctgacacacctgcaacatcgcccagcgaactggcttcgcccaaaaattcactttcagccaagtatcgcagtttggtcatgatcaacaaagacaatgaaagtgcagctggcgattacgaaatggcaaacagcagcagcaacttcagcaacatcagacacaaagacccgaccagtagcaacaacagccacactgttggccagaactttgcgagtgactcatttcgcgccatggaaccaacggaactcgtgagcagcgatcgcgaagcgtacagtgtggactcgctaaacgaaccgcctgctgtgccggaactcagcgtagaggacggcttggctgatgacgactcctgggtggaggaactgagtcagcgcggcgaggatgaggacgaagatctcagcaatgctaccaccacacccacggccacagactccgaagatgcggagggagaaggtgaaggagcccggcgacatggatatatggatcgagaggaggacctaaggggatacaatagatctgccatcgacttcaccctgcacaccatcgtcgaggagagttgtgaggagagcgaggtggcctccatgcgggcggacaatgaagacgtcgagctggaggatgaggatctatccgaacggagaaggcagcgcaccttgcagcaccaccatcgactaagtgcctctgaactagagaagtacttcttctttgggctgggagatggtcgagtaatgagttctattgatacacgcggagatgacactgcatccgaagtgagttccgagtgctctgagagtcttgactccctaccgcatgaggatcagctgttggatacaagtggagcttccgatctggcctcttcccgtctggaaaagtacttcctctccggcttcatgggattcagtggtgcagaaaagcaggcggagagcgatgaaagtggtggcagtgtaggcagtgatagtgaaggacaaccgagtcccagtcagcggagaaagcgactggtaagagccaggggaacacctagaagtcacaactcctcgttggataatttgctactgccagaatcagacaccctggatgccacagttacttctgcaggcggagcagctgcagccactgtagaggacacctcggaatcggaggcgggctgtgacgacactgtgattcatttggccaatgccggagcttcggatggttcctcctcggacaccattaaacgcaagaagcaactgcgcaagcgtcacgactctctggacgagaagaagctccacgatctagagccttccgagtgccggactcccaccccgggcagcagtggtcaagtgcagatgcagtcgcaggcgaaaaagcaacaacagcagcatcaccacagccgggacagtggctttgtgggcagcaacgatgatctcctgaaggcggcaccagattgtgagccacccaagagcccaacgccagctctggagcagatcagtgaggatcgggaaccggtccatagtcagattagtctggccaggatggatcaaccaagcacttcagcagctgcagctgtagccagcacactttccagccaactgaaaaatcttgccctgcccaatctggtgcgaaaggatagcttcaacaattggagctccgacgaggagaccaacctgatgatgagcaagatgcggcagttctttaagaacctcattgtcgccaccgccaatgcacagcagagcaagccctccacgcccaatcaagggcccagcaccaccaatgtcaacaccacgcccagttcccagcgcagattggccaaatcccggccagctcagttggcctactttgagaatgagctgacccgactgatgaaaaccgtgccgggcatcaatgatgagcaggtgcgcgaaatagtggagtacctgagcagtgaggatacatggtctgattcctacgattcttcggactacacgagctccgatctggagggcggtgaaaggaagggccaactgaaggctcagatctccgccagctgtcagcagatcatcaacaagtttgaaattgacgaggagggtgatcgtggtgatggtggactgctggacgagagccaaagtgtgcctatggaagcattggtgtatcagaaattggtagcttcctttagcaaagtggcggcgggtggagaaccggaaacagaagccaccaaagcggtggaggaagcagaaccgtccacggagagatccccgcaactgtttgccaaggtgatgcagcatattggtaccagattggtagctctgatgcacgaagttagcagtggcaatgaaacacccactccatccccgcaaggacagcggcatcatcgaagactgcaggccaagatctcggccaccacgacggaggatgaggaagatgaggtggcggagcaactgaaagccatgcccatcaagcagctaaagctgcgaagcaaatcccatgatctactgctggacggcactacgccgcattcgcatcacctgcaccaccatgccacggtgcattatccagccggcggcgtgggatcgggagcgggaggatccggcggacccggacactcggacaacgccggggaggagtgcggcgtgaccagcgactacgagcgattctcgtggcgcggcagttttgagtcggcattactggctaatggcgacagcagaacgaggctcagccagctgagccaactggacagggataactcgtcgtctgcgtccgctttggctgtggcaaagcgccgatcggcaggcgaccttctcttcagccagcaccagcagagcctgagccgcgagcaattggatcgcgtccgatcctgcggcagcattggaggcggcgatgcccatcaccaccagttggagtcctcgccggccaagccgtggctctcctccgcgggatcctcgattggcggtgattctacgaaggatgtgcggcgttccagtgtaccggatgccatttacgagacggactccagcgatgaggcagcttcgcatcagtttggcggcgccagatccacgttgccgcgcagtctgaatcccaaccaagtggtggctagcacgaattcactaccccggttacccaccaccggtgttggtgctcccataaccagcacccccaagacaaagtctcagagcgccctcaaccacacgccctctaatttgtccaccgtttcggccactggcagtgccaagagtgcgagataccgctcgccaggattggcagctcgagcagcggccgtcagtggggcaggaggtggctcaagtggtggtgttggtgtgggtgccagcagtggttcgacgggcaaaaaactaggcgcgggcttccagttcctctactccaaacgcgatgcgcgcaaacgtctcaacatgtcagctggcataaaagttctgggggaatctgatccttag

SEQ ID NO: 36411 - protein, 3232 aa, DROSOPHILA
MFGEVFWFLKWQCCCSCREIQSASGEWLKDAYALGSCSAVDHLTTSDVLRKSIRRSWTISNPEDDPNNPNSQQPVADNLYPQQQHLIEAQSAGSYPTLHQHHQQHHLPPQPRPTHGINYGSGTATPTTSSKWQLGRRVLRQSTLPSSLNNDPALSGSGGNLANYNSVNLTAPTSPHQLQKSPLYPSAYNSDDVIHMNTMPGMGVGVGVTVGDCENYVQQQQPQQQQPQLEVTPTHHRLQVRRQSTLPAQPTPAIYMSTSPNRLYSRSPERSPGEQQRYPPFMRQTSFPEPPSTYHRTKLLPSTGAPPPTVAPPPLNYESQTSSLASDEQDVGPMPKPRMTRQATLPNPEQHVKLLPTSPPKRQTSPQFRRSPEFMRQQTLPNPEAFSSGNTLTVHSTPPAKFMPISPRAKQNFLFPSVPNPRQFLSQPHVPAVGGTELGSGGSVASTGVVGGGEQYSSSQSVNIHHSRDPHSKMIKVRSHSNEEYSNTKGHPENRRLLPEIPTAVQRPGGRSPSRLVRQDCLKEERTFGEAKQQFHQFPDVTEELDNRPEYVDYFGDSATSFLESDEVQPIYSAENVLADSGYGGGAGVGLGASGGSGGVPGYYPDMGTPQGFYGGAALPRTPLMHNRIRRRQSRELQMQQEELAQLSQVSDANGKGSGNEGAASGSATDSHAAERRKPEQMRSVSEDSGAKTTPKPVTRRSFSHPEKDTQPTKKTEISKIPSPRPLADILDKTRGNSKIPQARRRNSRTGIGEAEEGSTPQHIYSFHQQLMHRNSDLAMRLKKTEIPVASVASTGQEEEKPHGESGQGSGAEQPVNGKSLESSANKEGGDPNSSAEATHTSTLGEQELQNAVEAAAVVFKKVVLQRRKEKEKAAEEGIGQQLSVVSVDIGGCGGGGDAVETSSSSELDFRCSTQHGRQQQQSQYSVEADEFKLVFLNSDSSSSCHGEEEEEEEEDGEEDDTDSSCSTHHCHSIVSNVEDCDWDYFEPSMISTTTTTTTTMIAYTTARATPTPPPRVRRQSSDSDSPQVQRRPQQPRNIYCPRIRESDTGTDEEFVLNTESSSQTSSDQTPPPVPPPPHPLSMKTRIKTRFLKNHHHHSHNRCNCNPGQQQQQPQYVPIPVPVPIPVPMAAYPNWPEVSGNPLLEQDEQLAASLQQLWKAAGHQQQFAAIVAAYSQQFAAASGNMFDATPPVTSKSYQQLPTTPPPIPERLRGLGGFKSSAPELSASLGSLMTQSLCSTISSSSSSSTSGYGTAGRSLETLASPMRAANSMQQQQQQYQEQHQQMASSAFKPKPTSLVASRSPTGEQLETSNARRGSSNSESDDNANSNSNNATPTTGRLCNVYDKTGTLPVPQCVQAHVASVDKSAATAAISTKAEPAATPATSTKGTALRVASKYQSRNLCETQSAATTQTYLASKNSHEEVEAADETNIHKNQVPAAAAAATAQIQTATRAAAPAVITRFGGLAVENAVGNVAESASASAASPIPKPKPRAQHPEQIDRHRATAETAKNLSSNRLIENIKMSDEASPSTAAHLQSESYAASSPDEASSNSSQDGDQDRERELEEQAEQKPRRTTQRSYNVAGMMEEQQLGEVDAVEQRHHSTTSDSSSSSSSNSSSSSESCDSDDTGTVRDRRPKRRRFNKVFVVNRQPGGRVRRSSSTEGDSLSSSEANLEDSSDNDTDTERTDCGIVLNYVKPLEEEPKKAEEEPPTAARDCQSSDEDNINDDESERRVANSTDELANCIVVVGGQTDDAAAGVVLHHMRSLPDVEFDGEQSERRQAHEIDASDALAACDELHSISNDVNRLLALHKQNSQLELKLQRLRQGVAEINEDLQLSTTGTDVAATHCTTQPGSAGKPDECNSPSSRKSPSTVLSSNDVGPLSLTCLRQVEAVVEVEANRADGKLRDERNGRTAEQTEERVVTCSQACKINDNSDYSLDSLSATSASLLAPEQQQQQPLQQVEESARLPADAREQRYRRGAKSESAESPVENEMLNVAVASRAALLGSNNNNTHRNDNSNNENTNNNDGELGHNNNDAFAAQKTRNSGSSVVVGCDISDVVSVNSNVSGENECDFDKIFGSHQQNTPSASAAVAATAAAATSDTPATSPSELASPKNSLSAKYRSLVMINKDNESAAGDYEMANSSSNFSNIRHKDPTSSNNSHTVGQNFASDSFRAMEPTELVSSDREAYSVDSLNEPPAVPELSVEDGLADDDSWVEELSQRGEDEDEDLSNATTTPTATDSEDAEGEGEGARRHGYMDREEDLRGYNRSAIDFTLHTIVEESCEESEVASMRADNEDVELEDEDLSERRRQRTLQHHHRLSASELEKYFFFGLGDGRVMSSIDTRGDDTASEVSSECSESLDSLPHEDQLLDTSGASDLASSRLEKYFLSGFMGFSGAEKQAESDESGGSVGSDSEGQPSPSQRRKRLVRARGTPRSHNSSLDNLLLPESDTLDATVTSAGGAAAATVEDTSESEAGCDDTVIHLANAGASDGSSSDTIKRKKQLRKRHDSLDEKKLHDLEPSECRTPTPGSSGQVQMQSQAKKQQQQHHHSRDSGFVGSNDDLLKAAPDCEPPKSPTPALEQISEDREPVHSQISLARMDQPSTSAAAAVASTLSSQLKNLALPNLVRKDSFNNWSSDEETNLMMSKMRQFFKNLIVATANAQQSKPSTPNQGPSTTNVNTTPSSQRRLAKSRPAQLAYFENELTRLMKTVPGINDEQVREIVEYLSSEDTWSDSYDSSDYTSSDLEGGERKGQLKAQISASCQQIINKFEIDEEGDRGDGGLLDESQSVPMEALVYQKLVASFSKVAAGGEPETEATKAVEEAEPSTERSPQLFAKVMQHIGTRLVALMHEVSSGNETPTPSPQGQRHHRRLQAKISATTTEDEEDEVAEQLKAMPIKQLKLRSKSHDLLLDGTTPHSHHLHHHATVHYPAGGVGSGAGGSGGPGHSDNAGEECGVTSDYERFSWRGSFESALLANGDSRTRLSQLSQLDRDNSSSASALAVAKRRSAGDLLFSQHQQSLSREQLDRVRSCGSIGGGDAHHHQLESSPAKPWLSSAGSSIGGDSTKDVRRSSVPDAIYETDSSDEAASHQFGGARSTLPRSLNPNQVVASTNSLPRLPTTGVGAPITSTPKTKSQSALNHTPSNLSTVSATGSAKSARYRSPGLAARAAAVSGAGGGSSGGVGVGASSGSTGKKLGAGFQFLYSKRDARKRLNMSAGIKVLGESDP

SEQ ID NO: 36412 - DNA, 2783 bp, DROSOPHILA
agtaaaaaagtatcaaatgcatgcagcaaaataaacaaagtcaagataacaccgatgcattagactggattagaaattgaaacggacaaagagaaacgaaacgcaactttgttatacactcacgaagtgtatattagttatattagagaacggatatattgtaataaataaatatataaattaaagtacaaaaaaccgaagtcgctaaaagttcctattcaaatgctagatcccaatttaaatcatctgttagtaaataaaaatataaaaatcagaatagttaattttattttaaaccagttttggtttaatttaaattaaataaaaaccagaatgcctgatagtatttaaagtgttttcatttaaaacattgttgcttattcctaaaattataaattaacatgtaaactatttaattcaattaacctgaagaaaaataatgcatatctgagttatttataaattatattaagtaaagcaaaaaccttatattcaggaatataaaaaaactcattgaccttagtagagattcatatcttaaaaatcgacgattttgcaaattataatttctttaatgaaagtgtatcacgtgatcagtgttcttgctaatttggttggaggacagacttaccgaagactcaaccccgaatactgcgtgaccacaaaagttcgcttgctcgtttgaattaatttctgttgaagcgcaataaacaatttaaaaattcaaaaagtttataaacctaagtcctgtaatgttttccccgatacaataaaaagcttactaaagaagacattcaggtaccccctcttttgaccaacgtccagtcactgatcttgacccaaatttaagtttcacgcgcctaccaacacttgttgctttctccatttcacctaccaacatttcaccaaactatattagcagtccaaaaatatgaaaaaccaaaaccttcgctgcatcgtaaccgattgttataagagtggtcaacaggatagtagctccatgtacaagttccccataaatccggttgtccggcagaagtggttggataatattgcggacataaaagatattaacttgttcaatagtcgggtgtgtaggcggcactttgagacacaatgttttggcaagaccaaggtgttttcctgggcagttcccacacttttcttgagtaagtgtatcgaagcagcctcctagatagcttcctaaacctgttctcttcatgatttagatacaaaagaggtagtgcaccaggtcagtaagccaagcaggaactccttcattcgcagatgcagcgtcaggaactgctcctcacgatctcctccagaacgactgcacttctttccctcgaatcccgaaatgcgcaaggcatggatggaaatatgtcggcttacggtggacaacaagtggctgtttatttgcggcagacactttcgccggacttatctgccaaacaagggaaaccttagaaaggacgccattccagagttccacttaggaacggaggaggaggatcccctcggaaagagcatcaaaagtatgaaatcatgtgctaatagaagtaatatcagtttcaagagcgaggattctggcattgacgaggaaagctttaaggagagtaagcctcataataatccatgcgccaattgccttgatctccaacagcaattggcagcagctcatcttcgcattcagcaacttgaggaaagaaggcaagaggagacagacagtgatgatgatgaggagggggaggaggaggagcacatattcatgctaatgaagtagactattgcttccctttatcccttaaagtatatttattttagtgcatatccagttcgagttcaatcagtcgcttgttcgtgtcgttgggcaggcgatacggcatagttgctgccatgttggacagggctttggctcgctgccggagttgctgcatctgggtctgttccagcgagctgcctgatcctgccttcagctgcttgtactgcttctgggcgatctccatggcggccactataacgtcgggcaggaccttgattacctcgccgctaagttgcttcacattgcccagtacaacatcgacatcgtccaacgtattgggcaccaactgggtttgcctgagcagatccaacgctgcattaaattttccgtcatgatagaagttgaagaagataagcagatcctgcagcagcacaaagctgctcttcatcttgggttccacatcgatgctgtcgctagccagcagctggttgaatctctgagcgtcttggccaaggcgttcccttaacgatccacctagcgtgggcaggtgcaccacctgggccatcagaatgcagatgtgcttcacggccaggttgtacttgcccgccatttcgtacagccgcgccgacatctcaaagttacccagcgcagccagttcgtcgcccacctgagcggccatggtgcgcgtgtcgaactccgggcattcgaactggcggaagagtccactaaaaacacaagagactagactttagactgactgaataaatgtaacattgcatataatcacctgttaacatcgttttggtcactcgactgccgcttgccgaatatcagatcgaaaatggtggtatcaaagactccgctgtccaccacaagatcgcacacacaggccataaacatgttccggcccttggaatccttcagacagcgcagtgtgtagtagtaatgcagcgcctccgaggtgtctgtccgctcaaatcgctgcacatactgtcggataagccgagttaggttcaagcgc

SEQ ID NO: 36413 - DNA, 723 bp, DROSOPHILA
atgtacaagttccccataaatccggttgtccggcagaagtggttggataatattgcggacataaaagatattaacttgttcaatagtcgggtgtgtaggcggcactttgagacacaatgttttggcaagaccaaggtgttttcctgggcagttcccacacttttcttgaatacaaaagaggtagtgcaccaggtcagtaagccaagcaggaactccttcattcgcagatgcagcgtcaggaactgctcctcacgatctcctccagaacgactgcacttctttccctcgaatcccgaaatgcgcaaggcatggatggaaatatgtcggcttacggtggacaacaagtggctgtttatttgcggcagacactttcgccggacttatctgccaaacaagggaaaccttagaaaggacgccattccagagttccacttaggaacggaggaggaggatcccctcggaaagagcatcaaaagtatgaaatcatgtgctaatagaagtaatatcagtttcaagagcgaggattctggcattgacgaggaaagctttaaggagagtaagcctcataataatccatgcgccaattgccttgatctccaacagcaattggcagcagctcatcttcgcattcagcaacttgaggaaagaaggcaagaggagacagacagtgatgatgatgaggagggggaggaggaggagcacatattcatgctaatgaagtag

SEQ ID NO: 36414 - protein, 240 aa, DROSOPHILA
MYKFPINPVVRQKWLDNIADIKDINLFNSRVCRRHFETQCFGKTKVFSWAVPTLFLNTKEVVHQVSKPSRNSFIRRCSVRNCSSRSPPERLHFFPSNPEMRKAWMEICRLTVDNKWLFICGRHFRRTYLPNKGNLRKDAIPEFHLGTEEEDPLGKSIKSMKSCANRSNISFKSEDSGIDEESFKESKPHNNPCANCLDLQQQLAAAHLRIQQLEERRQEETDSDDDEEGEEEEHIFMLMK

SEQ ID NO: 36415 - DNA, 2534 bp, DROSOPHILA
aatcgaaccttcactgtaaatacgtttaacaaaaaggcgcctgcccccaaaaaatggcaacaattttccgcgcatatcaatttagagcacccggctggcgatggcgaacctggtgggactaacagactggatgactgggatgttcgccggtggcagacgcgcgtgatttgtcggccatctgcctgcaggtaagctatagcatacgtgtaccgatgggcttatcccagtgtaaaaaggaactgtggaccacggagtacggagctcgaagctcggagctgtggcaccgcaaaaggtcgagccataaattacggtctccaaatgtgcgatacgtgcgttttccgaggggattgccgctcggcgctaccattcttttttttttttgcagttaataaaaagcttgttccaagtgcattagcgctgcagttcgagtggcaaaagcaagtgcattgtctgccaaaaaacttctttcattgtggcacatttaattaggaaagcaagggagaggcggagaagagtttgcaaagagagaaatatctgacttagtaagttgaaaaagtgcagtaagacagctcggctctaaggcgagtttcgatttaacttacaaaattacaaaggaaagtagagcagatcgaataaaaaagtccttcggtgcgggcaaaatgcgacactttcgttgctgactgcgcaaaaaataagctaatcagtgaaaacagttggggtgcgatgttgcttacattgacgcaaaactatttgaatatccaatgaacatttgaattgaaagttgataaaataagatttcgttcggtcgatatatgtggctctaacattcaagagtctgatactaaacttggcttcctttaaaaatgatatacaattagctaccttgtatattaagttcagaaaagttcaaatatttttcaccataaagcttgtttgcatcaccctttcaccgaaggactctcttctaaaataatctttaataaatcaagttaatcatcacttacatcattctagtggcatctctctgcctcaccgactcgtctctgttgagcacctcgatgatcattttgcgctcgttctcggatagattttcgaggacctgggatgtggccaccgccagttccggacccagtgcatcgatggtgtccaccggaatgcgttccacgctcgtcgactcgcaactgctgcccatggtggagccgtgcaaattgtacggtgccatcccgccacccattcccatgccacccatgccgccgaccatgcccattcccatggccatgttcatgccgccgcccatgccgcccccggttacgcccattcccagggcagatgctgcagatgcggtgctcactgtggtcggcactgtggcactcgtgttgctgccgccgtactgcaacatgctgttgctgttgggctctccggcggcaactgctgctgctgctgctactgctgctgcggctgctgctgccctatgtttgttgttcgcggtctgggtgggcgtggcggggaggcgggcgcttcgtccacttgacatgctacaccgatttgccaatgggacaactgcaattccagattcggtttgtatccaagggatggcggtgtatgcaaatagagggatatggccgcgagtttgaaatgtgactttttaatttcgaactgtgagttgctagtccctcgccgctgtttgccctaaaatttgattttaattttatgctgctttgcggccgaaatgcgcatcatcctgccggtgggcaaattgatacctgtaaaatataaaaaaaaaaaaaacatttctccgtgaatattctgcaaattccactcgagagaatatagtgcataaattggaccgaaatagcagtagatactagccctcctcttcaaactgccaattaaaatgttcaatagccgccgcaatggatggccaaaaacgtagcatacttcaggggatctgcccctacaattccctgttcatattttcagtttatttattctggttatgcggccaaaaatccactacaattaaatcaaattcattgaaagagcagaaaaaggaacgaaagtttaaatgtaacatatatatatgttggccattttcggaaaatttattaagcttgaatatgctaagcggaagaaaccactagactaaaataataaagccaaaactgctcctaaaacctctttcaatctagctaaaaactaaaagcttctaaagacgttgttaaacgatggggaaagtagaatttttggcaacgtatcaatatttcatcattccgattttgtcacttgccattattaagtcggtttctatcagctcctgtccaggatcacgaattatccggtggtgacccagtttttcaccgtgctgtataagccataaatacacgagatgattaattgaatattgaacacatcggcgtgtcacacacacaggaaacccccccccccccccccacaccgtaaaccatacaaatgtcgatatgctcgtttacgtaagtacatatatgtggattatgtggatttgtggtggtaacaaa

SEQ ID NO: 36416 - DNA, 534 bp, DROSOPHILA
atgtcaagtggacgaagcgcccgcctccccgccacgcccacccagaccgcgaacaacaaacatagggcagcagcagccgcagcagcagtagcagcagcagcagcagttgccgccggagagcccaacagcaacagcatgttgcagtacggcggcagcaacacgagtgccacagtgccgaccacagtgagcaccgcatctgcagcatctgccctgggaatgggcgtaaccgggggcggcatgggcggcggcatgaacatggccatgggaatgggcatggtcggcggcatgggtggcatgggaatgggtggcgggatggcaccgtacaatttgcacggctccaccatgggcagcagttgcgagtcgacgagcgtggaacgcattccggtggacaccatcgatgcactgggtccggaactggcggtggccacatcccaggtcctcgaaaatctatccgagaacgagcgcaaaatgatcatcgaggtgctcaacagagacgagtcggtgaggcagagagatgccactagaatgatgtaa

SEQ ID NO: 36417 - protein, 177 aa, DROSOPHILA
MSSGRSARLPATPTQTANNKHRAAAAAAAVAAAAAVAAGEPNSNSMLQYGGSNTSATVPTTVSTASAASALGMGVTGGGMGGGMNMAMGMGMVGGMGGMGMGGGMAPYNLHGSTMGSSCESTSVERIPVDTIDALGPELAVATSQVLENLSENERKMIIEVLNRDESVRQRDATRMM

SEQ ID NO: 36418 - DNA, 3095 bp, DROSOPHILA
agttgcaggcacttttgcaagttcccatttcgccggcaattttataatcagaattctcaaaataaggaaaactttgctatgtaaattaaatgctgaaaccagcaacttttttctgacatttctcgcagctcgttcttcttgtatgggtagtacagtaaaaaaaaaagaaaaaccaaataaatacaagagctgcaaaacaaaaaagtcctctatatatacgtaatacgtacacttttttttattgtcgccgggacaaaggcagcggcaaataaatgtggtttaaacatgacaagtagccgtgggctgccagctcgttatcaccaaatatttttgcacacgatatgagtgaataaataagccaggcagaaaaaaagtaagcggccaggacacggcaaatagctcctgcgaaagtcggaggtggatcagaagctatatagccgcatagccgcaaccaaggcgacttgggtcaacgtttatggtcgtcactttttggccgcttgtttgtcaaataaaacgtgaaatgtcagacagtcagaccgtcgtctgtgcgccaaccaaaaagagtaaccaataaaagcttaattaactgtttatggccatggcatgctaacagggtccgcaccgaaaagacgtgccgacttttcgccctatgccattaatatgaaatggactgggaacacaggagccacgaccgtaaaaagctggaccttgtaagtggggaatatgaaagccattcaatcaatttagcaaacagtcctggttactaatatgaatacttacttactcggaaattatagatgtggtttttcttacatggcctaaatcaaagaatacatatttatttatccaccattgttgatttaactgtcattttagacaaatttaaagtggttcaataatcgtaaaaatctttcattgtacttttatatttttgtacagctttgcgtcaaacaaaattcttgtgcttcgattatatttgagaaccaaatatattgcaactatgtcagaggaagtcagcatccggtaccaaatcaaaatcccagcagcaacgtcgaacgaaattcagagttcggtcgaaaatgatccgaaaatcgagtcagaaaagttgatggtttgtgatgaaatagacaggacgttgaatactgaagaggtatccgagaacaatttcgaggatccagaagaggcggggaagactttggaagctctagaggtagcggaagataacgaaggctacacaacaccgaaagagttcaatgaatctgatgaggagatcgaagaggtgaaggagctgagttctggtacatcctttacatcctgtaactcgtacggatatatgcgacagtcgatcctttgccacgcatccaccttgagtttggatagtggcattgttattgtgtccccaatcgatatttttctcaatcgggatctggataaagatcaggatcagttacaagaatattccatatatcaaagtattgagaataatacaatatccgtagatatcgttatggagaaaataccactgactgtcacttccgaagacagcgactgtgattacgaacttagtctggatgaagttcaccaacgcttctcggcttggtttaatcaaaaagaaatagatacggcttattcctgtttcacgcagatggatgaagacctggacgggtacataagtctgggcgaactgaagagattcctggaaaaactggagatgccacaaacccatttggcaaccaaaaacgtaatgactcatgtggtgggaaatcacttggaacgtttaaccttctgccacgcgctccttatttacggaactgttttgaaccgcttggaattacgaaagggacatcttttagatcgggaacggctacgcttggcccggagtaaagcggtagacgtgtccaaagtgggtgtcagtggtgcaaaacaatttttcgaggccaagatagcgatgcaatcggatcccttgccacctattaattcggatcaaccagtggctcgaattgcagtgcattcattgaatacggagaaccctggtagaagagtcaattttaaatctgctgccgctctttttaaaaagcttgaaaatgatcaatagtcaactcgcgtgcaagcctccaatacagaccatacaattcggattcaatagtgttgcgcgaaattttcagttaaattactaaaaaaattttgagttgtattatggactgaccttgtatctactcaataactttatataaatcatttgccaataaaaaacaatccaggaacgaaaacgctgcttaagtgaccaatcaaaggtaatcgccgggctgcagaaaacatacctccactttctgatactcccacttctcgtgggacgggctactttccaatttattttccttttattatgtccaatagtgataccaattcgactttttttttttgcttaaccatcttctttgctaatttttgttgcaagaccaaaagatattaaaatcatgatggttatctacttggtttgccctcgccaactgaaataaattgtcaacttatgtggagcaatggtttttatcagtttagtttccgtgaatcccctcgctgtgaggcaattcttcatttcctgggcatcccgggaaagcggcaccactggcagttggaatttggctggggcaacgactccccgaggagcgaaatgtgcgccacacacgccaagtggcaagttggacgacttttccggaagttacccggcggccgccagtcttcggggcataaaaatattttcgtgcaaataatttgcgctcttaactacgccgagtatttcgatacgtatttgcataccctgcgggccaccgacaaaccgacaaactgcaaggtgaacgttcatttgcccaggatatcaaaaagttggcctcgccaaaaaccaggcacgccacacaattatgctgccattatgggggctgtgtgctaatatttataactgatttcgattcgggggcaagacccgaatggcggtgctagccgcttgctggccacacgccatatacaaattaaaacgaaagcggcggacgctgcgtatacgcaatattgcggaaaataatgttataaaaatccaacta

SEQ ID NO: 36419 - DNA, 1095 bp, DROSOPHILA
atgtcagaggaagtcagcatccggtaccaaatcaaaatcccagcagcaacgtcgaacgaaattcagagttcggtcgaaaatgatccgaaaatcgagtcagaaaagttgatggtttgtgatgaaatagacaggacgttgaatactgaagaggtatccgagaacaatttcgaggatccagaagaggcggggaagactttggaagctctagaggtagcggaagataacgaaggctacacaacaccgaaagagttcaatgaatctgatgaggagatcgaagaggtgaaggagctgagttctggtacatcctttacatcctgtaactcgtacggatatatgcgacagtcgatcctttgccacgcatccaccttgagtttggatagtggcattgttattgtgtccccaatcgatatttttctcaatcgggatctggataaagatcaggatcagttacaagaatattccatatatcaaagtattgagaataatacaatatccgtagatatcgttatggagaaaataccactgactgtcacttccgaagacagcgactgtgattacgaacttagtctggatgaagttcaccaacgcttctcggcttggtttaatcaaaaagaaatagatacggcttattcctgtttcacgcagatggatgaagacctggacgggtacataagtctgggcgaactgaagagattcctggaaaaactggagatgccacaaacccatttggcaaccaaaaacgtaatgactcatgtggtgggaaatcacttggaacgtttaaccttctgccacgcgctccttatttacggaactgttttgaaccgcttggaattacgaaagggacatcttttagatcgggaacggctacgcttggcccggagtaaagcggtagacgtgtccaaagtgggtgtcagtggtgcaaaacaatttttcgaggccaagatagcgatgcaatcggatcccttgccacctattaattcggatcaaccagtggctcgaattgcagtgcattcattgaatacggagaaccctggtagaagagtcaattttaaatctgctgccgctctttttaaaaagcttgaaaatgatcaatag

SEQ ID NO: 36420 - protein, 364 aa, DROSOPHILA
MSEEVSIRYQIKIPAATSNEIQSSVENDPKIESEKLMVCDEIDRTLNTEEVSENNFEDPEEAGKTLEALEVAEDNEGYTTPKEFNESDEEIEEVKELSSGTSFTSCNSYGYMRQSILCHASTLSLDSGIVIVSPIDIFLNRDLDKDQDQLQEYSIYQSIENNTISVDIVMEKIPLTVTSEDSDCDYELSLDEVHQRFSAWFNQKEIDTAYSCFTQMDEDLDGYISLGELKRFLEKLEMPQTHLATKNVMTHVVGNHLERLTFCHALLIYGTVLNRLELRKGHLLDRERLRLARSKAVDVSKVGVSGAKQFFEAKIAMQSDPLPPINSDQPVARIAVHSLNTENPGRRVNFKSAAALFKKLENDQ

SEQ ID NO: 36421 - DNA, 3835 bp, DROSOPHILA
gtccgttcactaatcaatatttgctctttggcttccgaatcgattcctttgcactcttttgttgatgttttcacgtagttttgccgagtttaaacaacactttgttggatagttattgtcacctctgcgttgcttgcaaactttaccccctttctccgtttctgtttccgcttcctctggcgccctttggcactctgttttgcccgattctttttacgctggcctggatctttctgggcttttgtgtcacttcttgggctgcccgaggagctttagcagctgcaatttctatggctgcctttggacagattttagccattgatatgctgactcaggcctggtcgcctgcgtattaactgctccaaggggatttggatctcgcttctaggtctgagacagaaattcttgagctactgtcggtacttaactcagcgggcaaattcgcttgcttaaatgtgtctttttaaacgaacttaaattaaaagcgtatttagtacttaaacgactaaagtatatgcattcacgttaacggtaatcgctaaatccacttgactttatttaatggcttcttaccaactcactgaaaaacaagaaatgttgctaaagcgctccgaaatataatgaaatttaaacaaatattaagtcaacaactactaaatagttgacttaattcaaccagatccattttctgttccataactaaagccattgcaatgtgaaaccacttttcttcaccattaactgatgtcgacttctagtttttagttttcgactgcattcgcattctttttcgctattacattcaaccgccccattcaacccattattttttgttgtcttccaggccaaaactcgtcgtgtaacccattagcattcccattgtgcaattccgttttttgtcacagtttcatttcgtgtgttctctactctttttcaaggacccattgttgtactttttgtggatatcctgtggctgtgtgtgggtgtgttgtcgttgattttacttaccattgagcacatgtactgtaacgcttttgggctttgcatttgatggattacactgataatgcccggagtccgatggacgcgccgatttaattaggaggaacgatgtggtcgtatcgcccttattggtgaccacggatacgcctccgcgcggcgaatcatagttgatgatctgcgggtgagagggaaacttctgaaagttataaaatattttgctacatttactgttgggcgatggcggaggaccccatgattttctaagccataaaacctaggccaaattacgcatacgcactgttgcacactggccaaattaaaatcagtgggcggagataagacgtaaagtccggaaaatatgcaaagtaaggaaagagagattgcaaataaaaccgaagcaaaacaataaaattaaatctctttggggtacaaggggaaaaaaaaagaggaaagagtcagcactaatggcaatattttttccctttcttgtcgccggctctatagaaaatacataacaatagaggaccgtcaacccttaaaacccaatacaataagccaggggcacaagcatgaagtgtgaggaaaacacctaaagtggaaactaaaacgtggccgagtccaaacaaaaccgaaatccatttaaagcatggaaccgaacccttttcctcaggctctgcttccacttccttccttaaatggcatttgctaatataaaaaaccgaaagaaggaaacttttcgctcggcaaagctaatttaaaagttactaaattgaacactaaagggtttccacacttttctggacgctgcgggaggaggaaggcgataatgatgccccaaagtaattgctcgtcctcaacaaaatgaaagtgtgtctgggattagggaactcagactcacagcattattatgattccagaagatataggctggcggctccggtgagttttgtatgatacaggtaaggtttatagtggaaccactttctatatacagatcgggtgcaccgatgatttccgtcgagggttctgaaaaggaaaaggcaattaaaaaggtgaagtgcagaaaattgttttgtgaatcaaactggaataaaatatcaattagctaagagcaaaattttcatctgggatatttcagtagcgaagtgaaaggagaaacatgttcatccttttcaagagacgcaattggagggcgcgaagagtgagatgaaaatatttttccattatactacactcttttgttatttaattcaatcagaatttaacgcgccaacttcaacctctcgaaaggatgaaagcgacacttttcgtaggtgggtttctatagagaaagcgagtttaagtttccagtaaacttgaatgcgcaagagttaaagctaaagtgttgatttcataaggaaacaaaagtttctcaaacactcgcgtaatatattttgtgcaataagaaaaatcgtacaaagtactggcagcaggaaacatttccggatttaatttgaacaaagaatggtgggagtttttatactatttcagaagttttaagtatatcgctataggtattgtatttctgaacgagttaagtaaaaagtttaaacaatgtattcatagagcatgtcagcatttaaagcgctttcatgaagtatcattatcttttgatttttccaacttaccaacgacattcaggtgaatgtagtgactcatgtggggtgtagtcgatacctggcactcgtagatgccggaatctcgatgttgcgggtacttgatttgcagcatccagtcttcagtttgcggctgatgaatggcccgaaagcgctgatccgacgtgtatgtgtatcggccaactgtcagcaaatgtatgtcccgatgtcgcacccacgacacctgaagcaacatctgaaatgattgagagaacgaggaaagttttagccttaagattttggatttcatttgttcggcaaacagtttaaaaagtcaatttcatacgcatctgcttgaatgaagcgtgctgtggggttgccctttgtgccaggaccacacgtgtaaaatgcaaatttattttcaaatattttatatgatttttcgcttggcaaggtaaacttttaagggacaagaacaggtgaagtgatttctttgccagaaaaacaaattggttggaacaggggctagcacacacgcccacactgagaagaaaaacgcataagcatcaattaatgtatctctggtaatatcaaatgtatctaaatatgacagagtgcatgaaatgtgtataccatatatacgaaacaatttcttttacaaaccaaatggagttaaatttccgcctaagctaaatattaatgcgttaaaaaccaattaaattattaataatattatttcccttggtgcacttgggaccacacctttgccaaccacctgctgtttagtgctcaacttttccttgcccgagggcgcaacatttttaagtgacgctgatttaggggttgcctaagtcacgagggtgggctaacaaattcgagcgtggggcagtgctgaaaggatagggcgggaagtgggaagtgggtggggaaggacacgcctggctgtgttgcgtgtcatacgtcagctgcgggaattttcaatttcaatgacaacagcttagcaacatcctgcctaacgatgaacgacgacgtcgaggacgactttgccaaagttaatggacaagaaactctgggcaggaaggaaggaggagctatgagcgatgataggtgggtgggtgtgtggatggggggcgggagggagggagggagggggtacacctttgaccactttcccaacaccattacctgtgagctcaggg

SEQ ID NO: 36422 - DNA, 528 bp, DROSOPHILA
atgttgcttcaggtgtcgtgggtgcgacatcgggacatacatttgctgacagttggccgatacacatacacgtcggatcagcgctttcgggccattcatcagccgcaaactgaagactggatgctgcaaatcaagtacccgcaacatcgagattccggcatctacgagtgccaggtatcgactacaccccacatgagtcactacattcacctgaatgtcgttgaaccctcgacggaaatcatcggtgcacccgatctgtatatagaaagtggttccactataaaccttacctgtatcatacaaaactcaccggagccgccagcctatatcttctggaatcataataatgctatcatcaactatgattcgccgcgcggaggcgtatccgtggtcaccaataagggcgatacgaccacatcgttcctcctaattaaatcggcgcgtccatcggactccgggcattatcagtgtaatccatcaaatgcaaagcccaaaagcgttacagtacatgtgctcaatggtaagtaa

SEQ ID NO: 36423 - protein, 175 aa, DROSOPHILA
MLLQVSWVRHRDIHLLTVGRYTYTSDQRFRAIHQPQTEDWMLQIKYPQHRDSGIYECQVSTTPHMSHYIHLNVVEPSTEIIGAPDLYIESGSTINLTCIIQNSPEPPAYIFWNHNNAIINYDSPRGGVSVVTNKGDTTTSFLLIKSARPSDSGHYQCNPSNAKPKSVTVHVLNGK

SEQ ID NO: 36424 - DNA, 2621 bp, DROSOPHILA
aattatttgcttatttgctagcacattcaactatatgtgttaaccacctctctttaagatgattctcacttgaaatttattgttcacaacaaaggtccttcatttcgcttcgaccaattcccaacttccgagagctctctatcgttaattaactcgttggccaggacacaaagccaggaggagatcgatggggatattccacctaacacgtttaatgaagttatcccgggaacgtagtgtgtcgcacatcctcgagcacaaaactttcgcatcgttctaccacaaggtggaaatcatttagctcgcttgatactcaaacccaaattgaggttgcccccctcccccttctcagccattgtgtacaatttaataatcacgcaaattagttttcgaaaccgcaactcaaacaagccagaaccccttgctaatcacaggctgccagaaagtttcgttcaaaaaaaaggaacaccattgtgggaggtggggtgcatgcaagcccagaattccgggacatgtaacatattattatcggaaaaacgggcagggaccttctccggtcgtcgacgccgccggaagtgacggaaaccaaatgactacggcctagaagtaacgggactgagctcctgccggtaagaccgaaaaaaaaaaacaaaatgaatttcggggctttttgctacatttgaatagttcaggtgagcgaagggctcgaccggaagtggaagtggtggtggtgctggagattgtgtttgtgaaatgtttgcggcacttccttccgctcacgacgcaaaagttgaatgaagtaaaatctgtttcctgtttgggtataattaatcattgcgttctctggcaagcggaacaattagccagaaggcccaaactccgccccacagttgggagcagtcaacgtgctaattagccagccagaaaaaaccgaatacacagtggggcagcaactcatacacggccaacaaatcgcaatttgatagcaatggcaaagaaattacacgataattacaaggcaaattgtcaaatgatggcaaacatatgaccaatggcgctaaattggagttaaaggtaaaaaagtaataataacaaaacattaaatatttgaaatttcaattccatttggttccggtaaaaacgaacacactggtaacatattgcaactcaccgtcttattgcccagattcttgactcggcagttcaaataggccgtcttgcccagcagggcggtgacgttcttggagaaggccttgtcgaaatagggacccgcattgcgggcctcctccagatcgatgctgttgcgatggaagccggatgcaagctgggaggagaatgtgttgctgctggcgctgctggccttgtgtaggctgctgctcgggattcccgtgatggtggttgcgccgccaacggagctgcgactggcatcggtagtcagcgcagcggattcggaggcagcgcctgatccggcagcgggatggccgtttttgttatttccgctgctattgttgccgcttccgcttccgtcgataccagtgggaccgggagcagccgcctcgcccgctccagctgccgatcctcccactccttcgttgggcagggcattgttactgctactcatatcctttgagttgtaggagtcgcgctgagcggcataaactgaaaaaagaaatggtattgtagatgtaacaatcttgaaagccacagctggaataatttccttaatgaatacattttacaaatacttttgaagacttttcaagacccatcgccttttgtaattgaatgaatttgtttattattaagttgacaaggtcaccttttaaaggaatttaagtctttatcccatatttaatttagcccacggtaattccgaaaggtgttttctctcgtaaatgtttcaaattcaaaaactttgccataaagtccttcaatcgatggccataacaagcgaactggaaacccgaactgtgaaaccttgtaactcgtttggcttgaacttttaacagcccacaaacccaactcccaatacttctaccttttgtggctgccatttaggtaattagcgaattaagcacacacatacacagaacccatcggaaaaacacgtttacaacttttttgggagggcaaacaaagttttaggtgggtacgcaggtaaatcaaactttttgttgtgttctccccaatttttcagcgttcttttttttctgtttgtttgttcgcaatttttcgtttatcaaattttcatgtttttccgcccaaccccacgtgtgtatatgtgcgtgtgtgtgtgtgggtacaaactggtagttttcgtcgttacgagcaatttttatccggcatttatccatcacttagctgcgagaacgccactgcgtctgggccagaaactaagctgctggccacagaaccctcgaatatggctcgaatgtatctcggggcacttgatacgcttattacgtcgcagctagcactaacgtctctctttacgacactctcctcctccatcagttttatgaaccaagccgccaagtctggctagcgactttattagattaagcatgttgtgcacgtcgccgcccgaagacccagacatcgaacagtccactgagcggact

SEQ ID NO: 36425 - DNA, 507 bp, DROSOPHILA
atgagtagcagtaacaatgccctgcccaacgaaggagtgggaggatcggcagctggagcgggcgaggcggctgctcccggtcccactggtatcgacggaagcggaagcggcaacaatagcagcggaaataacaaaaacggccatcccgctgccggatcaggcgctgcctccgaatccgctgcgctgactaccgatgccagtcgcagctccgttggcggcgcaaccaccatcacgggaatcccgagcagcagcctacacaaggccagcagcgccagcagcaacacattctcctcccagcttgcatccggcttccatcgcaacagcatcgatctggaggaggcccgcaatgcgggtccctatttcgacaaggccttctccaagaacgtcaccgccctgctgggcaagacggcctatttgaactgccgagtcaagaatctgggcaataagacgcgccattggtcatatgtttgccatcatttgacaatttgccttgtaattatcgtgtaa

SEQ ID NO: 36426 - protein, 168 aa, DROSOPHILA
MSSSNNALPNEGVGGSAAGAGEAAAPGPTGIDGSGSGNNSSGNNKNGHPAAGSGAASESAALTTDASRSSVGGATTITGIPSSSLHKASSASSNTFSSQLASGFHRNSIDLEEARNAGPYFDKAFSKNVTALLGKTAYLNCRVKNLGNKTRHWSYVCHHLTICLVIIV

SEQ ID NO: 36427 - DNA, 2393 bp, DROSOPHILA
caaaggcaggcgcgtcattaggccggcgcacggcatatgaaaaatgaaagccagtccacacacacaagcacactcgtcggcgttttggggcccacatccacgcaatcaggactgagaacttccacatcgcctgggagttgcttttggccaggccaaaccattgatttcccaagacttttcaggcacacaaaattaattacctaacctaaaaacgcagcccacaaggcaacaaaagccagaacacaaaatacaaaataaaaaaggaacagaatgagaaaaaccagcacacgaaagacgtagaaattatgtaaggacggcattgctgagccaaggaggcgcactcccatttttccagctactcgatgctgatagattttccctctcgattttccggctcgctttgatttggctccgcttttctgctgactcatttgggcatgacaacggccaaaatgaatgatatcgaaaatcgaaatcaataaatgaaattggtcaaatcaatttggcaacaattgcacttttgcgactggggcacacagaaaaagaggaaactggagcacgaaatttgattaaagttttcgttttaccatgtttgttggtcttgtgcctgccgcataaaaaaaaaaaaaagaaaaccaattggaatgggaaatgagcttgggctgtgtggataaggccaaaactgtagccggaattaaggcaaaggcaatgccattcggaatgcaactttctgttgcaacgaaaagtggaaacttttatgacactggattaccaaattgtcagttggtttttatgagaagtagtcataagttcgttttccaacaacaagataatctaataaaaatgtgaagttccaaagaaatgtttattgggtgtgcccaaatttttgttgcacattgaaaggactcacatattataagcaaaatattctgatttagaatacaagatatggatatggttcttttaatgtggttttaaggttctatcaatttgattaaattcaaagtatgttatggttcaaagtgcaggactcacctccattgccggacatcagagccatgacaacgacgagcatgctgagcataatcagcgctctttgccgtccgaagttgcagctgcaacagctgatgcggttgctcgtgttgccgctgatgttgccgcctatgtcgctgctgctggtgttgttgcaggtgggtgggttgccgttgaccctgtcagcggtggttgggccacatcctggccacagtcttatgcaatccgtgctgtatggcggtgagtcagtggactccggctgcagatgatgttgtcgttgtcgcctggctttggatgttgccactgccgccgctcgttgccttaaattcgttcgttgatgctgctgctggcgcatttccatttgaaaagttgccataatatttctctagcgagcgtggtgccaccccctgcgctgctatgcggatttcccttgctctccctttccgtttgctcttttccgccgcgcgaaaaacctatttgaaaatgtgtttgtggagtagctgaggggcgtggctgggggcggcctgattagcgcctgccgtcatcatcattctgccgcgatgcgtgaaattgccgtcaagtagaaggcaaagggaatggaaatccacttgtgaatttcccttctatagtttatccttctgctggccgtggaactactttgcatttgttctgctcgacagaggctgacaaatcgccgccatttttccagcgatttatattctatttaatttcggctcgaacacaatctcacttcatcttcattagccgattgctgcccagccaggattgcaggatgccgggactcagctgcctgcaagcgaaaaggacaaacaaaagcgtttcggggcgttaaaaatgtttggaatttcattaaaaattcaaacgtcaatgtcaaaataaatggaaatttgtgtgtgtttgtgttggtggcttcgtcggcacgtgctgttgttgcttctgggaaaacacccgaaaaacgccagaaaactctgccctttccacctgaaaccaggacctacattccgcttctatatgtattacattatctgcgtggcgcgtggctcgtctgtcggttggattgcctctgtttgctttatgaatgtgtttctgtaactggcgacaacagtttgcccaatccgaggaattgtaaggagtatcgtaatgtaattttataatataattcggcagagcacgaagtttggaatttctagtatgctggggcgcagcaaggaaatttaattcgcatttataatatataaatataggtaaacaaaaaaacctataaataatggaaattcactatggaattataaaaaaaaaaaattactatactagtagaagaaaaaaagataggaatcctt

SEQ ID NO: 36428 - DNA, 393 bp, DROSOPHILA
atggaaatgcgccagcagcagcatcaacgaacgaatttaaggcaacgagcggcggcagtggcaacatccaaagccaggcgacaacgacaacatcatctgcagccggagtccactgactcaccgccatacagcacggattgcataagactgtggccaggatgtggcccaaccaccgctgacagggtcaacggcaacccacccacctgcaacaacaccagcagcagcgacataggcggcaacatcagcggcaacacgagcaaccgcatcagctgttgcagctgcaacttcggacggcaaagagcgctgattatgctcagcatgctcgtcgttgtcatggctctgatgtccggcaatggaggtgagtcctgcactttgaaccataacatactttga

SEQ ID NO: 36429 - protein, 130 aa, DROSOPHILA
MEMRQQQHQRTNLRQRAAAVATSKARRQRQHHLQPESTDSPPYSTDCIRLWPGCGPTTADRVNGNPPTCNNTSSSDIGGNISGNTSNRISCCSCNFGRQRALIMLSMLVVVMALMSGNGGESCTLNHNIL

SEQ ID NO: 36430 - DNA, 3644 bp, DROSOPHILA
gctccggtcaatgccaagccattttaagtgcatgtcaaatttttattgcgtttgcaacccgctgtcgcatatgtagaattatctaacgcgcgtttcttggttatgtaatttttgcccatcttaacccacgaaccgcgggtagtttatgtttaataagccgaaaaacttaccaagtgctcttgtttgcttatcccgcagagccgcaccctcagctccgctgccgcccaggcgacggtgaagccaccagtgcaggtgttcggtctggagggtcgctatgctaccgccctgtattcggctgcctccaagttgagccagttggatcaggtggagaaggatctgacggccctgcaggccaccatccgtagcgacaagaagctgcgcgagtacgtgaccagccccatcatcaacaagaaggtcatggccaccgctctgaaggaggcatccgagaagctccgcttcgccccggccaccgtcaatctgttgggtctgctggctgacaacggacgtctaaagaagctggacaccgtgatcaatgcctacaagaccatcatggccgcacatcgcggtgaggtcgtctgcgaggtggtcaccgccaagcccttggatgcgtcccagagcaagcagctggagggtgcccttaaggtagctacgcctagcttctgtcttgtctcacccactcaatttattgctcatttgctttgcagtctttcctgaagggcaacgagtctctgaagatcacttcccgcgtggaccccagcatcattggtggcctgatcgtttccattggcgacaagtacgtcgacatgagcattgccactaaggtcaagctctacaccgatgtcatccagaccgctgcctagactcttaaggatttgctcttgatttagatggtcaaactgaaagtttggtattggaattcaagcggtaatagcgaataaaacactcttcaccctttgaaaaccaacaaaatttattcagagatatgcgcactagatttggtttatgatttagatatatttttaggatccggtatatctgtgcactgcagctccgcaaccttgtgctggattgtctgctgcagaaggctgtgctgctccagcagattctccagctccttgatgcgagatctctgcagttccagaaccttggtgaagttactcgtggccggggactcaagccagttgattagaaaactattatgttgctctttattatcgttggcgttttgttgagcatcaaaattactcttcgtcttgctatctagtgtactcgcatcctgccctgggttggggctgcaatcattcaaaggactctcctccaggaccagaacattggtctcgttcgaggatcgacaaactctgtaattgggcttgtcgatttccgggaacacagctcgctcatcattttcggtcagatcggactcttgaacgcaaatctctggaggcggcgccatgggacgttgcttcgccggagagcagcacccatcttcatagtcattattccgggtgccgttcataagcagcacgttgattgcatttgaagttcttctctcgccgccgccacaagtaaagttattcgaattattggtgtatccgccagataaacctgtcgctgagcttccagtttgatggctgaacgagccggtcatcttggttcgcctaacaggcgaagagctctgagtctgcagcgtcaccgttgagcactgcacttcctgatccttcaattgctgggtgatgcacgtctggcagcattcgctcttcagctccggctttttcttcgtattctgctggttcatcgaacttttaattttgttgttacctcgtgaagttggcgataccgggtagttcgggctactgcggaaatcatctgctacagtttttatgtccgttgtcctgaaagctggacaagtgagacgttcacaggaactctgtttttttgggctgcctttggaattatcctttctttctttatactctttatttatactttgttggctgcctgaatcctcttctagaggggctaccgcttttttgatcccttgcactggacagaaactacaggtgcatccatcacaggtgcagtttacagctccaaaggtcggtttatttacccttgggcttaatttcataggtggattatttttgttctctaagtttgtggcccttgtttgtggattgggatacttctgtcccatttgggtgtatgtattgccctggaacatgctgttgcaggtgtttcgaaaacgacagcaaccattcgtacatctgttcgcgctgctgaattcctgcctctccgagccgagactctgtttgctttggttctggatccgctcgttagtctttttgctgatggaatagccatggccagcgtccgatgccgaagagctccacctgctccattcctgcaggccagcttgagtccttgccctgccagcagcacgagacgagctctccgattccgaacctgatccgtggccatccaaatgggaggcgcaaacgcatccgtgccggcatagcgattcggggtcgacgtcaaaactgctgaggttggccaagttctgccaccggcgagcctccgacatgttgcgcgggtagacgcactgctcgcccggctcctggccacagattatacaacgacgatgcattttccaacggacaaccaggacggaaacggtaaaattttgaattttaactacaggagcatttgtcgaagtgcaaaactataattggagagggtgcctaccttcttttattgaaattcttaatggtggtggttggtaaaagaatagttctagatttaaatgtttaaataaaattaaaaaaaaaaaaaaccgtttaaatgagtgtgatctgaaaggcgcactgctgaaatgccttacttttctgtggcccccccattgtaaggcgttttggtatttcgcacgaaagcagctgcacacacttcgcaactgtttagtttaaaaatagtaaatgcaacgaacttttgtgtgttttactggcccccttcttgatgacacagtctggcagttgatacaatgagcttgccaaccgacggtctaaacatggagatcaccccaagccccaccctggctgccacgagtcgcggcgacttggaaaaagtgctggctatgctggtcctcggactcgggagtcttttgttcggattgctgcccgcctttatatcggaacggaatcgtcgccgcttcccgctgaccgcatccctgctcctgtgcttcggagcgggcattctgctagccaccgcactggtgcacattctgcccgaggtaagagcttggactgcgatcgtgtgtgtggctgcaatttgataacctgctgacttacgcatgcaacaggtgcgcgaacaaatggactcgaaattcgctgaggttgccatgtgcggcgggttcttcatcatctactttatcgacgagttcatacactacttctttggcgaggccattcagcacactcatgcccacgatgcagagactccagcaaccgagccaccaagacgtcccactaatgacaatggttatggcgcagtggacgaacgagcgccccttttatcagcggaacccaatacgtcacatgggcattcgcaccatcatagccagtaggtttattgcatttcccttcccgcagcca

SEQ ID NO: 36431 - DNA, 1644 bp, DROSOPHILA
atgcatcgtcgttgtataatctgtggccaggagccgggcgagcagtgcgtctacccgcgcaacatgtcggaggctcgccggtggcagaacttggccaacctcagcagttttgacgtcgaccccgaatcgctatgccggcacggatgcgtttgcgcctcccatttggatggccacggatcaggttcggaatcggagagctcgtctcgtgctgctggcagggcaaggactcaagctggcctgcaggaatggagcaggtggagctcttcggcatcggacgctggccatggctattccatcagcaaaaagactaacgagcggatccagaaccaaagcaaacagagtctcggctcggagaggcaggaattcagcagcgcgaacagatgtacgaatggttgctgtcgttttcgaaacacctgcaacagcatgttccagggcaatacatacacccaaatgggacagaagtatcccaatccacaaacaagggccacaaacttagagaacaaaaataatccacctatgaaattaagcccaagggtaaataaaccgacctttggagctgtaaactgcacctgtgatggatgcacctgtagtttctgtccagtgcaagggatcaaaaaagcggtagcccctctagaagaggattcaggcagccaacaaagtataaataaagagtataaagaaagaaaggataattccaaaggcagcccaaaaaaacagagttcctgtgaacgtctcacttgtccagctttcaggacaacggacataaaaactgtagcagatgatttccgcagtagcccgaactacccggtatcgccaacttcacgaggtaacaacaaaattaaaagttcgatgaaccagcagaatacgaagaaaaagccggagctgaagagcgaatgctgccagacgtgcatcacccagcaattgaaggatcaggaagtgcagtgctcaacggtgacgctgcagactcagagctcttcgcctgttaggcgaaccaagatgaccggctcgttcagccatcaaactggaagctcagcgacaggtttatctggcggatacaccaataattcgaataactttacttgtggcggcggcgagagaagaacttcaaatgcaatcaacgtgctgcttatgaacggcacccggaataatgactatgaagatgggtgctgctctccggcgaagcaacgtcccatggcgccgcctccagagatttgcgttcaagagtccgatctgaccgaaaatgatgagcgagctgtgttcccggaaatcgacaagcccaattacagagtttgtcgatcctcgaacgagaccaatgttctggtcctggaggagagtcctttgaatgattgcagccccaacccagggcaggatgcgagtacactagatagcaagacgaagagtaattttgatgctcaacaaaacgccaacgataataaagagcaacataatagttttctaatcaactggcttgagtccccggccacgagtaacttcaccaaggttctggaactgcagagatctcgcatcaaggagctggagaatctgctggagcagcacagccttctgcagcagacaatccagcacaaggttgcggagctgcagtgcacagatataccggatcctaaaaatatatctaaatcataa

SEQ ID NO: 36432 - protein, 547 aa, DROSOPHILA
MHRRCIICGQEPGEQCVYPRNMSEARRWQNLANLSSFDVDPESLCRHGCVCASHLDGHGSGSESESSSRAAGRARTQAGLQEWSRWSSSASDAGHGYSISKKTNERIQNQSKQSLGSERQEFSSANRCTNGCCRFRNTCNSMFQGNTYTQMGQKYPNPQTRATNLENKNNPPMKLSPRVNKPTFGAVNCTCDGCTCSFCPVQGIKKAVAPLEEDSGSQQSINKEYKERKDNSKGSPKKQSSCERLTCPAFRTTDIKTVADDFRSSPNYPVSPTSRGNNKIKSSMNQQNTKKKPELKSECCQTCITQQLKDQEVQCSTVTLQTQSSSPVRRTKMTGSFSHQTGSSATGLSGGYTNNSNNFTCGGGERRTSNAINVLLMNGTRNNDYEDGCCSPAKQRPMAPPPEICVQESDLTENDERAVFPEIDKPNYRVCRSSNETNVLVLEESPLNDCSPNPGQDASTLDSKTKSNFDAQQNANDNKEQHNSFLINWLESPATSNFTKVLELQRSRIKELENLLEQHSLLQQTIQHKVAELQCTDIPDPKNISKS

SEQ ID NO: 36433 - DNA, 2307 bp, DROSOPHILA
ttcggcgccaccggcccctcttcctcagtggtctcagctgcggcggggtcttcctttttatcactcggcgtgccaggtcttgctgtggatggcgtcgattgtgtggactttcggtgggcccggctggttgtagagttggcggtgctgttagtagtcgtggtgccagtgctcccggcttccgatttgcttcccggtccggcgctagttgttggtgtgctgctagcggtcgattgcgaggtgttgctatccttagacggcgtcgaggcacgagattcgttccgcatctgttccattttcttggccttggcgctgcctggtatgtaaacaccttaatttacaactccaggaattgcgtttgttactgaactcacctttcttattatccttcttggagcgctcgccgcactggcgagccagttcctgacgtcgcttgacgttgtcatcgttgtacttgaggactcggttctcgggcacccactcgtcccagctgaaaatgaaatggctttcatgcagatcggtgttcatactagtagctttgctcactttttactccagcccgcgtagtggatgtagtactcaaccggcgtcgcatcgggttttgttttcagaaccttggcctcgtagatgagcggtccgtggaagcacagaacccgttcccctgcaaatggcgccaatgtgtttaatttgatttatagttgggcttaagttattgccctaccatccacgaacagagtgtttgcatcggtccccgtgctatagttttccactttagcgggttttacttctcccattttattttcaataatagataattaacaaatcctagagtgaccgtgcgtgacgcatagggctatcggatgggacagtaccgatgcacttatcgattatttacagggtattgtcttggtagatattaacaatattgatttatttatgactatgtacatcaaacagtctgtttttatgggttgttttcttaatgattttgaaggcatcaagtctagtgcttcgctgtcgtcggctgatcttcctgctcctcccagggacgtggaccgcgtttgttctcccagttctctatgtccacggacttgactttgtcgtactccgactccaacgtcacatccttgcggtttttcatgcttacgccgtactttttcatctcctccggcgttaccggctgcttcttggcgtactgatacctgtaaagggaggagactcatgagttagctaaggatttcccggagattcttgaatgctagcctgaggttggagaactgctgcagtccaaaggagccagccaccatcatgatgaggaagggtatgccatatttgaacgattttcgtgtgctgtaatagtttaatttatccacgagagacattgttgttattttgtgttatgacattttggcacatgcggttacactgcaagttgagaacgaagtgtgaccagttatatgataataaaaaaattggcgcaaaatttgaacaccgatttcttatcatatgcaatgtagttatattttattaaaataacttggcgatagttttaaaaataattgaatttaagctaaactattaacaagaatatttaaaacataacattttgtaatcgaaaaaagttattttcaatttggcacacagcactttattttagccacacacactaggcgcctatgtcaatcaatttgtgcagctggtgtcgtctttgaaaatagttgtccttgaatccaaatcgaaagatttgttgtccctgccaagtgcgagcaagttctgaataattgcaaaacattgttttccggcgcacgcctaatgcccaccatttgcatggggttcgacgataagttcaaggtccccgccgtctctttggttttcaaataattgacactgacaatgttgaagagcgccaaaacgctgttcacatgcacacgacattcgatccggatcaccttggccaattgcaggctttggcaaggcaagtagctcgcggcgaagatttccttttgctgcccacagctccaaccagttcgcgatcgctgcggcttcattcacaaggagccggcgccaattgagtcatcagaggcaccccccccccccctcccgagagactgggatagtcccacacccctttcccaatagattatatttcagtttgcaatgcaccctacgcacagtcttttagttgagtgatttgcccaatgggaaataatatcattacaattaaaagaccaaggttttcatttagtattgaacctgatgagcctacaatgagctacatacctaagaagtaaaacttctccaacaacccgt

SEQ ID NO: 36434 - DNA, 231 bp, DROSOPHILA
atgatggtggctggctcctttggactgcagcagtatcagtacgccaagaagcagccggtaacgccggaggagatgaaaaagtacggcgtaagcatgaaaaaccgcaaggatgtgacgttggagtcggagtacgacaaagtcaagtccgtggacatagagaactgggagaacaaacgcggtccacgtccctgggaggagcaggaagatcagccgacgacagcgaagcactag

SEQ ID NO: 36435 - protein, 76 aa, DROSOPHILA
MMVAGSFGLQQYQYAKKQPVTPEEMKKYGVSMKNRKDVTLESEYDKVKSVDIENWENKRGPRPWEEQEDQPTTAKH

SEQ ID NO: 36436 - DNA, 3193 bp, DROSOPHILA
gaccaggacctacacaagatggcgcctacttctagctcttcatcggcggaggcccagcgtcgttatgccaaccagcattcacacgccagccgaatgcttccgggtcgcctccaaatgcgcacctaccatgacgagatgcgtggcgctattcgtccgcgttcccaggaactccaagctccaactgcagcagtggccggggtcaactactccgcacagccgactgcccatccaaacatttcgtttgtgcgacctactttcagcaagcccgtggatttggttagcactacaacgcacgccggaggcggaggaggaggaggtgttccaggaactgctggcttatccgaagcggaactgcccacaccatccactgcggccgtggccaccccgatggcgcccagtagtagtgttagtgccagcagtagcagtagctacttgagtcaacggcatgggcacaaccatatgcatggaggacatccacaggtgccgccgtcagcgcttcctctgcgtttggaagccaacaacgcgtccggcggatccgtgtccaacggcggtgcggagctgtgcgactgcaagaccgatccggatgccatgtttctgatgagcctgctgcccgacatccaaaagctgaacggccgtgatcgcggcaagataaagatagccttccagaacatcctgcaggactacctgtatccggattagcgttgatctctgtgtataccttccgcttaacgcaaacggaacccagttccagtatcgattttgtttaatattctcttttgtattttcgttggagaaaaaaaaagaatcctttaagcttcgctgtgcaagaacaaagtatccttaaaaacgttttgaaaactatccggtatgtttattaattgtataaatatttataaatatttaatgtgtaacacaagaataaattcatttgaaattatgcgatatatggctaggtaacttgaagtatcacatgaggatcggaatgggttgcatcccatcctcactcgaacagcttcagctcgcgggtgatcttcttgatcttgttgtccagcgtcttgtcctcgtgctcgcagatgtagtagtgccgcgaggtgcactcctgtccgtagtacacatagctgtgctttccggcattgtaacttagccgtaggcagcgacccttgccctctatttgcaccgtgttgttcagcacatcctcgccggtcgcctcctctgccgcctgctccgaactgtccaccagattggcggccgtcgagttctcccccttctgggccatcgcaatggatgtgagattcatgttgggattcaccggcttagccgaattggaccagatccagaggaggccaggattgagaccgcccagccagtaatcgcgaccacgatgcgtcggctgattcagcagataggccatgatctcctcattctccgagaccttctcgaactcggccaggtgggagtttagacccttgcaggcagagtttgccgtcttccagttcacctgctgctggctgttgatgtagtagcagttgtcgctgatgcgcgtgaagttcgcgggacagggatccttcacctccttctgattgtttccggccatcagatagtagatcagctgctccgagcgccgcacgcgactctccaggtaatctatgggtgtttgcttttacttagaccaagaactcctaggtgtgacttcaacttacccactcgatacaccaacttttcaatggctcccaagagataaagatcattttcggagacagctcggaatgtggtcggctgaccgcccacaagatgttgctgttgcgggtgttgctgcgctatctgttgcacttgctgctgttgcagcggcactggtcgcacatgttgctgttgctgggtaccgctaccaccaccaccaccactgccacctatgccaaagagctgctgcaggaaacccggttgctggcgttgctgcaactgttgctgttgctgttgttgctgcatctgttggtgttgctggtgcaacatttgattggtcatgggtcggaactgaggattcacaatgggactctggctctccacgggctttcgcagatgcggctctagttccaccgcctcgccaattctcctggtgatgtagatattgttgccgggtcgcttgtaggcggacgagtgatagctgagcggtccattgatgcccatgtccgcgcccatataaggcaggtctttggactttcgctggctgccgctgctactgctgccttggctatatgtaagacagacgcgtgggaagatctggatgagtgtgttgccctagcctagcctcctgtaaccatacctcaagacgtaatcttcgagaaattgcgaccaaactggagatggatcgtctgcgtccgcgagtgattcattggcgtatttttgcctagtttcaccatcgctgccattgcataagagtgcaatacctaatgccagataaacaagggccgtaagccggagttgttgaccagccggcggcatggtgacacgtaatgtttacggatgggtatattgcccccgcctcgctaagcacttggcgattccagtcgcgtggtgaacactttcgatttcgttgcgttttccgtgcggtttatgccgcgtccgctgttcaaagacgtccgttcgcttgggtcgagctgaaaaccacgactgaagctctgcgcttgactttgggcctggtccgctccgctcgctgatcgcctcttccttcccctcttccctgctaccgtcgcaccgcttcaataccatgccaatggcaatggccaagaccagacccaaccagaccgaagacccattgttgttgctgccggccgccgagaaatgcaaaatttcactttctccttcgcttggctgtggtgggcaaatgtaagtcattgggcttttcatcggcatctctactgctccgctcgccgcttttgtggaccggcccggtccgacccactgtttgtttgcactccaaccaaattggcccagacttaggtaattgacgcggctgtcaattgaagcgaaaactgctggcttaaacttgaatgaaatggagtttggtgtgctggatgtgccatgttcatttgggtgttcttcgacttgtgaggaatgactttctgaatgcggttaactaagaaagtaacttaggcgattttctagttcctccccgggcaatataaacatggaataatca

SEQ ID NO: 36437 - DNA, 1137 bp, DROSOPHILA
atgggcgcggacatgggcatcaatggaccgctcagctatcactcgtccgcctacaagcgacccggcaacaatatctacatcaccaggagaattggcgaggcggtggaactagagccgcatctgcgaaagcccgtggagagccagagtcccattgtgaatcctcagttccgacccatgaccaatcaaatgttgcaccagcaacaccaacagatgcagcaacaacagcaacagcaacagttgcagcaacgccagcaaccgggtttcctgcagcagctctttggcataggtggcagtggtggtggtggtggtagcggtacccagcaacagcaacatgtgcgaccagtgccgctgcaacagcagcaagtgcaacagatagcgcagcaacacccgcaacagcaacatcttgtgggcggtcagccgaccacattccgagctgtctccgaaaatgatctttatctcttgggagccattgaaaagttggtgtatcgagtggattacctggagagtcgcgtgcggcgctcggagcagctgatctactatctgatggccggaaacaatcagaaggaggtgaaggatccctgtcccgcgaacttcacgcgcatcagcgacaactgctactacatcaacagccagcagcaggtgaactggaagacggcaaactctgcctgcaagggtctaaactcccacctggccgagttcgagaaggtctcggagaatgaggagatcatggcctatctgctgaatcagccgacgcatcgtggtcgcgattactggctgggcggtctcaatcctggcctcctctggatctggtccaattcggctaagccggtgaatcccaacatgaatctcacatccattgcgatggcccagaagggggagaactcgacggccgccaatctggtggacagttcggagcaggcggcagaggaggcgaccggcgaggatgtgctgaacaacacggtgcaaatagagggcaagggtcgctgcctacggctaagttacaatgccggaaagcacagctatgtgtactacggacaggagtgcacctcgcggcactactacatctgcgagcacgaggacaagacgctggacaacaagatcaagaagatcacccgcgagctgaagctgttcgagtga

SEQ ID NO: 36438 - protein, 378 aa, DROSOPHILA
MGADMGINGPLSYHSSAYKRPGNNIYITRRIGEAVELEPHLRKPVESQSPIVNPQFRPMTNQMLHQQHQQMQQQQQQQQLQQRQQPGFLQQLFGIGGSGGGGGSGTQQQQHVRPVPLQQQQVQQIAQQHPQQQHLVGGQPTTFRAVSENDLYLLGAIEKLVYRVDYLESRVRRSEQLIYYLMAGNNQKEVKDPCPANFTRISDNCYYINSQQQVNWKTANSACKGLNSHLAEFEKVSENEEIMAYLLNQPTHRGRDYWLGGLNPGLLWIWSNSAKPVNPNMNLTSIAMAQKGENSTAANLVDSSEQAAEEATGEDVLNNTVQIEGKGRCLRLSYNAGKHSYVYYGQECTSRHYYICEHEDKTLDNKIKKITRELKLFE

SEQ ID NO: 36439 - DNA, 2715 bp, DROSOPHILA
aacgtgagcaatccaaaccagattggacggatggatagctcggtgccatccggagccgaaagcggtcttatcaaggagtacaaggactttgccaaatgcctggacgaactggagttcaagaccgatgagctgctaatcgatgctaaaatggtggatcaggagttggccaactgccacaagtttcgcgaggatcagctgctgaagcatctgacggagaagaacgacgacgacgagcagatgcagttgctgcgggaaaacatcgagctcaaggcgaccggcgttgagttccaacacggcattgagctgatcatggagaagtaccgtgagcacagcgaaggggacatgttaatcgatacctaccaactgagggagcactacctggccggtttgtcgaaggtggtcgaagagcaggatgcccgcatcgagcgtatggttgatgtgatgaagctaactgtcgacttcgaggaccggagcagtgccgagaaccagcagatcatttgccagctgactgatgaaaatgagcagttgcgtcgtcagttgcagatcagtaccaccgatgagctgttccgccagggagcactgagctccagcgaaagtagcactcagatcggaccaaacgattctttggattcgagtgccacccgggagaatagcatctacagcatagatagcttcctctcctgcctttcgccgagcagcgtggaggatgattcggagtgctcatccaacaattcgctgctgagtgagctggaagtcacttgctttattgaggaggctctggccgagaagcccgaggagtagacctacaacatggacgaataggcacaacacacgttcctgccccactgcaacactggctgtttacgttgattgaatacttggtacttggtacccgaaatataatttcattcgaggctacactatccacacactactagctgtctgttagctgttgctgttctttcataaagatctatataccatttgcactcctaggagattagttgcacttaaatacctgctcaatctttgccattatgatatcaatctcggatccttggtcctggtggctgattgtcggtgcccaagtgacggtggagctgctggccgatgtaggaatggtcgcgccgccaccggaggacacgctccccattccggagcaggccgagcgggatgcctgtttggccttcagagccgacgtcagttcgatttgcagctcctcgcagcgcacattttccagcgcaacctatggatttttagagttcaatacgattgagtagatatgatttgagggcatatagtcaccttcttttccagttcccgggctctcgactgcagattctccaccgcctcggcatcgggacgagcgctaccgctcagattgcgtatttgtgccagggtttcctaggatagcatatatatataaatacagataaacaaaatgttctataaatcctataacaatacaattgcaatatactgttcttaaaatcaaactatagtaccatagtttttcatctgaaattccattaatatgtgcatgagttcacggtacctggaaggacactcacctgatgcgcccgctcgatctccgtgcgccgcatctcggcatcgcgcagctgcaggctgagggcgtccagcattccgttgggggtggtgccagcggccacggcagcggccgccgactgatgatggtgcatcgactcgtacggcatgctgtggctgcccctcggacgactgcaatggaagcgataatcgcacatgagaatggggtcagtgaatctgcagcacgacgaatggacgaactgccgctgggcaaagactgcaggacttggcagctataactagttgctgcttttattatcccttatttattcatgcgcctgatggctggtgcctgctgcctggcgaatgtggaaataggtcagctgcctggcacgcacgtgtccttggggttcagtgtgtgtgcgtgtacgtgtacgtgtgtgtgtttggattgttgcgaactttgaactttgggttaattgcctgcctgaccgtatttattgtccacgcacagcctacaaaatcttatattggtcggctcggctcattcaaacgcttatcttaatttcatagtttgcagcacaagctgtcgtttatggtttatggtcaacggtatgccaaaggtttaattaaaattatttctattttaattcgccttgctttttagctggcacaccaattcgaactgagccagcgcaaacattcggcattcgccaccgaagagttgcattactcatacgccacccttgctagctgagacaatggaaggcgccagtttgtctagacggcggcaagactagatacagtaatcaggtccgattcacttggggaagtgctaagggaagtcggcctgttggcattttgagctctgccataaacgaaaccttaatccaatcatttaatgcaggatatacaaaattgaaatccatttaccggagctgcgctgcatcgataaattgttattaatacatcaaagctcgcatccatcggaagccagtggaccaccactgcaccaccccggcaccactcacaccaccacccactgcaccacccactcggtgggctgtcaatgccactgtttatgtgaaccgataccgatggctcggatgcctgacatttaaaagctatgacagcgtttatccagtgccaatgatgatgatgatggggatg

SEQ ID NO: 36440 - DNA, 489 bp, DROSOPHILA
atgccgtacgagtcgatgcaccatcatcagtcggcggccgctgccgtggccgctggcaccacccccaacggaatgctggacgccctcagcctgcagctgcgcgatgccgagatgcggcgcacggagatcgagcgggcgcatcaggaaaccctggcacaaatacgcaatctgagcggtagcgctcgtcccgatgccgaggcggtggagaatctgcagtcgagagcccgggaactggaaaagaaggttgcgctggaaaatgtgcgctgcgaggagctgcaaatcgaactgacgtcggctctgaaggccaaacaggcatcccgctcggcctgctccggaatggggagcgtgtcctccggtggcggcgcgaccattcctacatcggccagcagctccaccgtcacttgggcaccgacaatcagccaccaggaccaaggatccgagattgatatcataatggcaaagattgagcaggtatttaagtgcaactaa

SEQ ID NO: 36441 - protein, 162 aa, DROSOPHILA
MPYESMHHHQSAAAAVAAGTTPNGMLDALSLQLRDAEMRRTEIERAHQETLAQIRNLSGSARPDAEAVENLQSRARELEKKVALENVRCEELQIELTSALKAKQASRSACSGMGSVSSGGGATIPTSASSSTVTWAPTISHQDQGSEIDIIMAKIEQVFKCN

SEQ ID NO: 36442 - DNA, 3843 bp, DROSOPHILA
gtattgcatagaatagaagcatacaatgtaaagctaaataatcatatgaggagattgaaagaactgctggccaacaatagaagattgatttcggggctatcgtacaatgagcacagcattaaatctttattggaaaacaaagctcaagataaacaaatagagtaagctaaagaaggaaatatgaactcggttataaactaatatatttttaggcgaaattcaagtaaaagaaggtgtcatcttcgtaggacttgcaaggcgaccaacatcagagaggcatgttggacgcaatgcaagtctcacatggagcctgaagaggaagagcaaacccaagacgtggtggagatccaaacgaaaacacaaacatctagaagccgttccggaaaagtatgtgaacggcagaaaggtggtagggagctgagttcatattacgagctaagtgaggagattggtttcaaaggtaggtttttatcaatttctgagatctctttcttgaaatccaagtatatcccaagtgaaatgcatgctaaagcttgtcgaaaagatggatttcaaaacggccacaattgccgaagtgaaaaccattcgcagaagggtgttaagtgcaatatcaagtcgccaaaaaaacctgcagtgagccagaaggagtttggtcgcatctgatatgtatgtcgaaaaatccgtattcctacaaataggcaaattgaatgaaataaattgaaaactcttttcaaaataatgacattagctgtttaatgatatttacatatgaggacaagaacattaatttcaaattaggcttatcgatatgaatcgaatttcatgcgcaggcgcatctaaaattgattcactctagctgtgtgttttggaacagaatggggtccttggagcccgagaaagtgtgatacagctggctcctccggacagccctcagtttacaatcactgtcaatgtcaacatctcgagctcggcaaacggaaaacccactcaagcattcggcatggacttggacgatgtggctagtcatcacggattcggtcaacatatggccacgtacaatgtagaggtgagtccgcccccacccttcgagcgaaccaagtgcgttgtatgaccgacccacccttacagacctcggcggtgcacaggaaacttcaaagcaaggtggaggcacttcgaatcctgcgccaggagctggaacagtttcgcgtggagcgagaccagtacaagctggtggcggagaccctgcagctgcgctactccgcgctgaagagtaatagcgaacttctggctgtcggtggatgtggagccctcagcgagaactccagcctggcagccctgctccacgagacgcgcgagcagaacctaaagctcagcaccgaagtggaagccctgaggcagcggctcaacgagctgcatggcgacatggaactactccgggagacggaggccagcaacaagtcgcgggtacaggcaatggccagcgagaatgccgctcgcaacaaggaggagctgcagtggcgtcgtgagcgggcaaactttatctgccacctggagggcctcaaaaaaaggaatgcccagctggccttcgacctgaaggcggtgatcgatgagaaggaggagctgataaccgagcgggatgcctacaagtgcaaggcacaccgcctaaatcatgaactctttgtggccctcagggcgaagaaaacgcatccaagggtgagttaactgatgctatatagtacttacttgatagttattgattttccagctcctggacatcgatggtgttttgctggagaacaagtacctgcatgaacgtgtgaagatccaagacagcgaactggagctcaccaaacagagcatcaataagtacaaggtactggtattagttaagacttattaccattttatttatttatatttaaatcattcagacaatgttggatgcaaaacgaaagaagggaattgtaaaacttggcggtgggagcacaaatgaggacaccattctaagcccccggcaaggtgagtaattatatggtggccacctctttcatgcctttctaatttgtttgtaccctagtgaaaacaatcctcgagagtggcattgagctgcctcagaaaaccgagagcttaagcgatctaaaatccttgtgtctggccctgctggacaatctcaacgacaagaacttggccctgacgcaccaaaagaagaccaacaagtaggaaaatccagctgaaagttgatatatatttcataaacccatatttcctgcagaatactggctggcaaaatgacggagctggagcagcggtggcaacaactcctctccggaaacgatgacaacgcagaggagcaggaggaggacgtggaatatggttatgcgccttcgcagctgctcctcaatggctattgtgccgccatggtagatgacgccgacatcagcagcactccgtccattgagccagataacgaaggcgtcgccattacagcggatcatgaagattcaaagaagcacaagtccgttgaggctctgcattccgacgatggaatgtcctcgctttcaacggagtccgtggattcgtctgtgtacggtgcagatgtgcagcccgatgacttccaaaagtcttcatccgccacaacagattcgggcaactgtggattgagcagccgctgcaacggcacgccacgaatatccagtgcagtggcacgggaacgtatggaggatctgaaggacctgccgcctcacctggccactctggtccagaaagcacttcacgatctggacatgcgggactacgaggctatggtgacgatacgagcagagaatctggcggctattccttagagaaaaactagttcaattgaggactcccaaagaaatggatgaaaccatatctcagtgttgacaaaagatataatacatatatatattaccgcaacagcgtacaataaaaccagattatataaaataaatcactttattcaatcgatattgcgttgaaactggatatgtacaataactatagcatacagttttaaaagacgcgcccaagttatcgataaataatatgcggagtgttgcataccgttagcataaacacactctcacacactcttatttctgggtatacattttctgataagaatgcaataaatatcccgactggttggagtaatttcgagtttttgaattaaaaatgccttaagaaaagtttttaatgagccatgtagagttaacaccagtgccacatatcctgggaatggagcaccaatcaaaagtcatcatcaagcggcccaaatcaggccaattctagtcggaaagtcgttgcagccgcccattgccaccatgtcgaatgatgtgcaggtcgcccgggtggccaagatagctaccgatgtgccgcgtcgcagtggcaagcagcgtgactccagcggattccagggcaagcactccggcagcgcggctggcgaggatttcgagtacgtcttcggtagcatttcgccgcgcggtggaggacccggtggcaggcacttggtgggatcctccgacctggactctccggagcacacgcagcgggacaccaccgagagtgacaacaacatatccagctgctccacgctagacattgtcaacaaagtgagtaatgatgcccgcactgagagaaataactagatcttaaatcaaaaaaatcaatatattaatttgcaatgatacattggtactaaacatgatcaagttcattttaaattaatttttaaaatgatcacaaaatatttaaaaatacctcattattgtgtagtttaaaataagaaacgcagaattttcaatcattggttttcaaagtgtt

SEQ ID NO: 36443 - DNA, 1557 bp, DROSOPHILA
atggacttggacgatgtggctagtcatcacggattcggtcaacatatggccacgtacaatgtagagacctcggcggtgcacaggaaacttcaaagcaaggtggaggcacttcgaatcctgcgccaggagctggaacagtttcgcgtggagcgagaccagtacaagctggtggcggagaccctgcagctgcgctactccgcgctgaagagtaatagcgaacttctggctgtcggtggatgtggagccctcagcgagaactccagcctggcagccctgctccacgagacgcgcgagcagaacctaaagctcagcaccgaagtggaagccctgaggcagcggctcaacgagctgcatggcgacatggaactactccgggagacggaggccagcaacaagtcgcgggtacaggcaatggccagcgagaatgccgctcgcaacaaggaggagctgcagtggcgtcgtgagcgggcaaactttatctgccacctggagggcctcaaaaaaaggaatgcccagctggccttcgacctgaaggcggtgatcgatgagaaggaggagctgataaccgagcgggatgcctacaagtgcaaggcacaccgcctaaatcatgaactctttgtggccctcagggcgaagaaaacgcatccaaggctcctggacatcgatggtgttttgctggagaacaagtacctgcatgaacgtgtgaagatccaagacagcgaactggagctcaccaaacagagcatcaataagtacaagacaatgttggatgcaaaacgaaagaagggaattgtaaaacttggcggtgggagcacaaatgaggacaccattctaagcccccggcaagtgaaaacaatcctcgagagtggcattgagctgcctcagaaaaccgagagcttaagcgatctaaaatccttgtgtctggccctgctggacaatctcaacgacaagaacttggccctgacgcaccaaaagaagaccaacaaaatactggctggcaaaatgacggagctggagcagcggtggcaacaactcctctccggaaacgatgacaacgcagaggagcaggaggaggacgtggaatatggttatgcgccttcgcagctgctcctcaatggctattgtgccgccatggtagatgacgccgacatcagcagcactccgtccattgagccagataacgaaggcgtcgccattacagcggatcatgaagattcaaagaagcacaagtccgttgaggctctgcattccgacgatggaatgtcctcgctttcaacggagtccgtggattcgtctgtgtacggtgcagatgtgcagcccgatgacttccaaaagtcttcatccgccacaacagattcgggcaactgtggattgagcagccgctgcaacggcacgccacgaatatccagtgcagtggcacgggaacgtatggaggatctgaaggacctgccgcctcacctggccactctggtccagaaagcacttcacgatctggacatgcgggactacgaggctatggtgacgatacgagcagagaatctggcggctattccttag

SEQ ID NO: 36444 - protein, 518 aa, DROSOPHILA
MDLDDVASHHGFGQHMATYNVETSAVHRKLQSKVEALRILRQELEQFRVERDQYKLVAETLQLRYSALKSNSELLAVGGCGALSENSSLAALLHETREQNLKLSTEVEALRQRLNELHGDMELLRETEASNKSRVQAMASENAARNKEELQWRRERANFICHLEGLKKRNAQLAFDLKAVIDEKEELITERDAYKCKAHRLNHELFVALRAKKTHPRLLDIDGVLLENKYLHERVKIQDSELELTKQSINKYKTMLDAKRKKGIVKLGGGSTNEDTILSPRQVKTILESGIELPQKTESLSDLKSLCLALLDNLNDKNLALTHQKKTNKILAGKMTELEQRWQQLLSGNDDNAEEQEEDVEYGYAPSQLLLNGYCAAMVDDADISSTPSIEPDNEGVAITADHEDSKKHKSVEALHSDDGMSSLSTESVDSSVYGADVQPDDFQKSSSATTDSGNCGLSSRCNGTPRISSAVARERMEDLKDLPPHLATLVQKALHDLDMRDYEAMVTIRAENLAAIP

SEQ ID NO: 36445 - DNA, 2481 bp, DROSOPHILA
gtcgtgtgtaactgcaataccatttccttaaaccgaacttgaaaatgtttatcgaaatttgcatcttaattcgtcgtctgcctcgcactaatgggcaaaaaaaagttcgtacccaatcctgtctggaatatggaatatcagtgacatccagacaggggcgtctttgttctttatctctattagatatcttttatgttcttatctcctgtgggacatgtgctcccgatgctgcagaatctttcgctttcccgaaaattgttgctgcagagctagagcaagatagtggcaacctggcggaaacacacgtccgacatacatcagcagaccctgtgtgacgcaaatggatggattatgagtcagctaaagaagtgggagctgcaaacccaaaccaaaaggaatagtttgatgaccagattgcttgatatatgaatgcacttcgtggaggcgctctggcgcatttggatcgaagtgcttcgaacacgttgccatcttcagtctgtttgaagctgtcgaacggtgaggttgccgagaatcctatcgtggatccaacttgggatccagattcacatttccgctgccgcgtgcgcggtgcttcgtggccagtgaggcgtgtgaattcaaatgcggtggtcaacgctttggttgtcgctttctttgtgtcgccagtggtatttaatcaaaatcgaatagagagccagagtggcggcaaaagcaacaaaacaaaaaaaaaaatgaaatgaaatgaaatgaaacgaaataaaacaatgcggcatacaaaacgagacgagcacaccaaaatatcggcaaatcaaccgaaattataaaagaaaggaaagaactcgacacattgatgtggaatcaatgcaataaattaacttaaatttggttttcgcttggccagccgatttcgataaagtagaaaaaaaagagagagagagacagagacgaatacaaacacaaataaatgaaaaatcgttaaaatcccggtctgcgaattcgatcagcccacgaaattcgatgcggcggactaggcctccaaaaatatttatacttatgtagagctcggatttaggacctacctgtctgcccagcagcggacccttgctgatgaagtccttcttggccgagtagagctccggcggtggtcctttcagcgaataccgcaggccggactccccaaggtcgtccgtcgtcccacgcagacagcgctcaagggcacgctcatcctcgtcgtcatcggaggcggtggctgagcaggcggatgatacgcaagaggaggagcacgcgaaggaggtacgatcccgagcaccgggagattcgcagacagtggtactattcgtgccagtgctgtgaccagaagttgtggaccgcagtgtggtgctgggatacgcgaaggcgggcaggtccgacagcaggcgatggcactcgacctcctggccgccggcgggcgatttaagtgaaccggcatccggcatggacatggcgatgaccagataagatagcgatctccaatctcagaaatccgaaatcccaaatggcacgtgcaaaaatgcgcgcgaaagagcaacaaaatccacagtatgcgtatatacggctatacgtatatcttgtagatatatgtatctttacacttatgttggctctatggctctttggctctttggctttttgcttattttgttaattgaaatgcgacagtctcgttccgttgccgtgggcaccgcacccgccaaaaaatgcgaaaatacgaacgaacagaaaggcaaagactacggctcgtgggtattaaaacgactcacacttatggctgcgattagctagataaactacttagtactggagccattgtacgatctcatgatgaatctttttgccgaatcacagaatttattcgcagttgcggttgggttttggccaatgttaagcttgaacttcacacatcgcgccgaatgcattcactttcgagctgcaccattaacttggccaccgttggcattctgagttgctggctttcttttcgctttcggccagcggctatttttgcaaacttttcggtggcgaaggttgtcccacaactgagcaccatgtcagagttcacaagaacacgccgatcgtttggcatcggcatcgctatcgccatctggccgacatggctggtcaggatacggaatacactggcgcactgggatgaatacgtattcaaattcgaattagaaatcgcaactggattaatattacaaatggaactttagcaattgtctgatactaccgcgcgcgcgcaaataaatgaaacggacgagaacgagccgatggaccagaccaatgctgcgaaccagagaatttgtatctgtatctggcgatgtttcgtttcggctcgcttgagttcccgctgcggactgaacactgctcgccgaacagcagttggtagcggacgttccgccgtaccgccaagcaatctgagatcgcgaacatatatcgctc

SEQ ID NO: 36446 - DNA, 429 bp, DROSOPHILA
atgtccatgccggatgccggttcacttaaatcgcccgccggcggccaggaggtcgagtgccatcgcctgctgtcggacctgcccgccttcgcgtatcccagcaccacactgcggtccacaacttctggtcacagcactggcacgaatagtaccactgtctgcgaatctcccggtgctcgggatcgtacctccttcgcgtgctcctcctcttgcgtatcatccgcctgctcagccaccgcctccgatgacgacgaggatgagcgtgcccttgagcgctgtctgcgtgggacgacggacgaccttggggagtccggcctgcggtattcgctgaaaggaccaccgccggagctctactcggccaagaaggacttcatcagcaagggtccgctgctgggcagacagtccgccgcatcgaatttcgtgggctga

SEQ ID NO: 36447 - protein, 142 aa, DROSOPHILA
MSMPDAGSLKSPAGGQEVECHRLLSDLPAFAYPSTTLRSTTSGHSTGTNSTTVCESPGARDRTSFACSSSCVSSACSATASDDDEDERALERCLRGTTDDLGESGLRYSLKGPPPELYSAKKDFISKGPLLGRQSAASNFVG

SEQ ID NO: 36448 - DNA, 2844 bp, DROSOPHILA
actaactgactaactgactgactgcctggctgttggccagttggctacttggctacttgtccactggccattgcataatgcatcatgctaatagggagcggcaccgggggatcgaagatcgaaggcgcgacttcctgtagacttcggtagcgccggcaattgttacaatgatttacgaccatgccacgttggcagctataaattgctaaatggccattacagcattaattacacgaccgaccaagagttgtgagtcgaatcgaaattgaaattgaccttttgccccgcccagactgccggtctgcagaatgagttattatcttgtaattgtcacttaccagcggtgtgcagatatgtttcttcgatctcgatctggatcggagtatgcaaattggaagccagaaccactcgatgtccatgtaaccagcgatgtcggttggaattaaattacattgctgtcgacatgacaaagtgtgcgaatacttaactaacgaaacaaaggaaatccaccaactggttacaatacataacgaaaggaatcattaatgtgatttatgaacatgttgcctcattgaatcagagaaaaatagaaattatcatcgcagttttatctaaactattattaaatgcagacaggccataaaccatccgtttgttgagtgtctctggggaattcctattactcaaccttaagaatcatcaaaatatagaggaaattgtttacaatcatttcgtttccgatcttgcaagtcataaacatcaaattaatacaataatgcatttaacaaaaatcgtatgaaataaatcgaacaatttttgctatataatcccaatatatcgattgttatagaaaatatcccttttttttcggtccaagctgtcatattttttgaccactttcaacacttagtttgtggccaagtcagttttggcaggtggaaaatagttggcactcgacttggctggaaacacaccccgttgtgagtcggcaaccaccaccatgagcgccagcgaaggcatcagtctcccgggcaacgaggaaaccactccgccgcatgaaaaacataaacaaaaggccaagaaggccaaaaagaagtcccggagtgccaaagaaagtgttcccaatgcaatggacgcgaaagccactgccagctactttagtttgagcatcgtgggccaaatagtctcggccacctttcccctgggtcccgacaaggagttcgtcttcctgcgctacgaaatggtcgctggtcccgactggcagctgtcctccggaccccagcacggactcacccagctggccaccaatagaaggggccatttcaacgaaccgattgtcttcaatatgcccatcgaggtgacctacaagagcaccagtccatatggctgtgagtaatagtacagaatcgattagtttactatattctttctcagctcagctattaacaatttttcgaatcagattgaagttacaccaacaagatctccaattcttttggtttccagggccacagatcctggtgaccgtgttcggacgcagtggcctgggcagggagacactactcggttacgctcacatccacctgcccgttttcggcagtcgtcgtccagcggatcagacggagcagctgcaggcgcccatcctgatgcccaagtgccccaacatgatggcggacatcaccagttggctgctgcgccgcgagccggagctgaaggaccccaaagtgctgctggacaacctgaagtgcaagggactctctatggagtcgtacggcagcctacagtttcagctgtcctccgtgatgaggggcgcccgcaagctgggctaccattggcactcctgagagagagagtcgagtccagagtgtgttagtaaaacgtgaacttgaggaagcaggaaagcgtttgtcttaatctaattgccgggtgggtggtacctcaaacttgaccttgtccgttgtggcggctaagacgatttcaaaatgacgcgactgctgctaatccaacgcagcaaacgagcggcaatcgaaagcccaattcgaacggttagctttggattggccaagtgccggctaattggattagggcaattagtctaagacgcgttgtacacaagtggccatataaagaccagacgaccatggtccgccccaggcattgccgccgagttcgcgtcccgagagtcagccgtcctgctatggacagcgagtagtcgccgcagcagagtagccagccatccaagtttagacgaagccaccaccgaagcgccaccagtaccagccattcgaaatggccagcctgcatcccccgagcttcgcctatatgcgcgatgggcgcaatctcagcctggcggagagtgtgcccgccgagattatgcacatggtggatccgtactggtaccagtggcctccattggagcccatgtggttcggcatcattggctttgtgattgccattctgggcaccatgtcgctggcgggcaacttcattgtgatgtacatctttacctcgtcgaagggactgcgcacgccgtccaacatgtttgtggtcaatctggccttctccgacttcatgatgatgttcaccatgttcccgccggtggtgctgaatggcttctatggcacctggatcatgggtcccttcctgtgcgaattatacggcatgtttggctcgctcttcggatgcgtttccatctggtcgatgacactgattgcctacgatcgttactgtgtgatcgtgaagggaatggccaggaaaccactgacggccacggcggctgtgctccggctcatggtcgtgtggaccatctgcggagcgtgggccctgatgccgctcttcggctgg

SEQ ID NO: 36449 - DNA, 726 bp, DROSOPHILA
atgagcgccagcgaaggcatcagtctcccgggcaacgaggaaaccactccgccgcatgaaaaacataaacaaaaggccaagaaggccaaaaagaagtcccggagtgccaaagaaagtgttcccaatgcaatggacgcgaaagccactgccagctactttagtttgagcatcgtgggccaaatagtctcggccacctttcccctgggtcccgacaaggagttcgtcttcctgcgctacgaaatggtcgctggtcccgactggcagctgtcctccggaccccagcacggactcacccagctggccaccaatagaaggggccatttcaacgaaccgattgtcttcaatatgcccatcgaggtgacctacaagagcaccagtccatatggctggccacagatcctggtgaccgtgttcggacgcagtggcctgggcagggagacactactcggttacgctcacatccacctgcccgttttcggcagtcgtcgtccagcggatcagacggagcagctgcaggcgcccatcctgatgcccaagtgccccaacatgatggcggacatcaccagttggctgctgcgccgcgagccggagctgaaggaccccaaagtgctgctggacaacctgaagtgcaagggactctctatggagtcgtacggcagcctacagtttcagctgtcctccgtgatgaggggcgcccgcaagctgggctaccattggcactcctga

SEQ ID NO: 36450 - protein, 241 aa, DROSOPHILA
MSASEGISLPGNEETTPPHEKHKQKAKKAKKKSRSAKESVPNAMDAKATASYFSLSIVGQIVSATFPLGPDKEFVFLRYEMVAGPDWQLSSGPQHGLTQLATNRRGHFNEPIVFNMPIEVTYKSTSPYGWPQILVTVFGRSGLGRETLLGYAHIHLPVFGSRRPADQTEQLQAPILMPKCPNMMADITSWLLRREPELKDPKVLLDNLKCKGLSMESYGSLQFQLSSVMRGARKLGYHWHS

SEQ ID NO: 36451 - DNA, 2666 bp, DROSOPHILA
actactttgccaaggactggtggaacaggtcctacatcatcgtctactccctgtgggtctatctcacgccgctgctgaccatcatcttctaatatgacattcgttactaattatccaaggattctgtttgattaaggattgattttggcctttcaggctgtggctgcccatgagaaggccatgcgggagcaggcgaagaagatgaacgtggcctccttgcggaacagcgaggccgacaagagcaaggccatcgagatcaagctggcgaaagtggcactgaccaccatatcgctgtggttcttcgcctggactccgtataccatcatcaactacgcgggcatcttcgaatcgatgcacctgagtccactgagcaccatctgtggatccgtctttgccaaagccaatgccgtgtgcaatcccattgtgtacggattgaggtaatatctaattagcttcctacttatctatctatatgaccaatttcttaatgcatctcctgcaacagccacccgaagtacaagcaggtgctacgggagaagatgccatgcctggcctgcggcaaggacgatctcacctcggactcgaggacacaggccaccgccgagattagcgaatcgcaggcttaggcgattcgaagacgacgacgactgcagacgtagggaactgacagctctagatctacaaaagactcaactattttgcaaatggcacctcaaggaaaaacccaaaaaaaaaaaaagatggcaatgtaaaaaaaatgtaaaaaaaaaatatagtaaaaatataacagcaattgatacaaaatcaaatccacccagtttatcaactagtcaagtgtgctttaatcaagcacagtgccccaaagaagtttgtgcctttattggtaagtaacatttcaagcatttcaaccatttgccatagccattggatcacatagttcgttaatcgaagtcgttgccagttttggtgtcagtccaagttggttcatctggggatatccttaggggtagtaggtgttcaggccgaggtccatcaatgtgccattgtggcgcctttctcgcaactcctgggtgaagagggcacgcccctgcagcagtatgaagtcgatgagcctcctgttcgagctctgacgcagtgcatcggggtcggatcgcttgcgaaggtagttaaagcagcatgtgctggagtagtaaaatgtatatcacttggcgaactctttgaatatgttagcttaccgaaagtgctttgtgccacatgcgctggcacactccttgccacaagtgtcgcattttatggcctgcgaactgggggggcacatcaaccaaatgccttgataagccaaagatttagttacaaaacctaaacaatgattgctcttagttgaaactcacatagcaagatgatctggaagtgagccagccaatgcatcgttgtcttagtcattggtcggccgtctgctcagaatgctgtgccactcatatgatcttcgcttggtgtcctgtttcgtatccctgagaaagcgcaaatgaaaggaccgagttgccggctcctgactttatatactcatcggctgcaggacagttgcccactttgagatgctggcattcaaagtggtcaatgaagcgtgtggcggatgaatagccaggacgaggactccagtgggcatgtgaacatggagcgcatattaagtaagagcacacagacaattgcagcttgcgcaacaagtttatgggtttattttggggttgtttggggcgggggtcgtttggcagccgcaaatcaaagcagctggacgcaggttgtaaaacttcttaatctagttggcaagtggcaagttaagcatattaaaattgtgagcaacagtcatcaacagtcagtggcaggactactgatttccctagaatgaatacggacgatattgggtgttgttacatagtttgtgcgctagtcagagtaataatttttcttattttatcctaatttttaagtatttagtcattgcacttaattttaatgccgcaggcgtatttgtaacggtcttctatttgaatttaaacttacgatattcgacattcaacatattttccaaagtgtggcaacaccagcaagtttccttcatcagtgtgaccgcttttagtatttttcagtattttcggtggaagaagaagcctgcccactctgcgctttgggaattgaataaacgtaaacattaacttaactccagctctagtcataaatatctattgaatatgtgggagccgccacgattgagtgcatctctgcgcgccaagacggagctggaggcccgtagccggcgcttgaacgtcctgcggcaggcgagaaccacctctgctgcttccacgacgacgaacagccaaaagtgagtagcgatttcaccacctgtgaaatttcgttcaattccgctcctctccagcaaggaggagcagaccatcgcacggctgctggctcagatgccaaccgaaaagcagccggccgctaaggtgcagctacagaagctgcgcaatctggtgcaggagtgtatgggctacgaggagcagccacaggtggtggagcacgcggcgctcttcctcttctggctgctgctggatcagcgggtgctcctggtggccaccacacagcggctacacggcatgttcggacagact

SEQ ID NO: 36452 - DNA, 327 bp, DROSOPHILA
atgcccactggagtcctcgtcctggctattcatccgccacacgcttcattgaccactttgaatgccagcatctcaaattcgcaggccataaaatgcgacacttgtggcaaggagtgtgccagcgcatgtggcacaaagcactttcgcacatgctgctttaactaccttcgcaagcgatccgaccccgatgcactgcgtcagagctcgaacaggaggctcatcgacttcatactgctgcaggggcgtgccctcttcacccaggagttgcgagaaaggcgccacaatggcacattgatggacctcggcctgaacacctactacccctaa

SEQ ID NO: 36453 - protein, 108 aa, DROSOPHILA
MPTGVLVLAIHPPHASLTTLNASISNSQAIKCDTCGKECASACGTKHFRTCCFNYLRKRSDPDALRQSSNRRLIDFILLQGRALFTQELRERRHNGTLMDLGLNTYYP

SEQ ID NO: 36454 - DNA, 3582 bp, DROSOPHILA
caaaagggctttcaatttcacttggttagctgcaagtaaacagctttgcggctccacgacttcagctggctttgggtggcgctcaagtcgagcatgcaaccatcacaagcggcacgcaaacgcatcaaatcaatgaaagtgcccggctatcgatggctctccaggactcccgactccggctcatttgaccacggtttgcacttcattggttcgcccaagaacggaggcaatcggaagccaaatagcacagagaaaaaaaatcttcaattacttaaaagtatgtgaatcattactacgttgaaattgtggactaaataaatattttttaatattgatttaaataaaataaaacttaacagtgagttttttaaacgttccagaattgaatattacttctctcagtgataagaacaatggatcgatctcgatttaaggcgttttccattcactttattttccaccggttgaattgggtttatgaaaatgaaaattgccaagaaaatagagcaaacaagaacatttttctgctccagctcagttcatatttttcggcattttctctttgaatttggggctttgcaatagcaactcgtattagctcagtgggccaaaaggcactcgatgcacactttccatcggaaactataagctcactccctacatttcccgcagatgcattggcatgatttaatcggaatacaaatcgcttatcagctcaaagagaagattcgaaaacagctaagagaatggaaagcaaatccataggtcagagggaaatgataggagaaaaatagcttactccactagtatgcttaacaatattttaaattacaagtatgcttttaattatcacataattaccttgcgctgaccagaaagatagcaattctcggaaataacattttaatgaccccaaataaaacacatggcgttgaaaacaaacaagattgataagagtttgtactgatagtagtagtaaagtctaagctaaaaattgagttcacgctctaaaaccccagagcactgcaacggtggccattagaattgccataggaaatagaccaccggatccattgcattcgcccggcgattgcatctcccacgcgatctggttgcccatgccgtactgttcagcatagctcttcgccaagttgatcatctcctggctgagctcacgtttccgagtgaagagcttgaacagcggaactggcgaaatgcttccgaaaccgcagacaaaggcgatattctcgtagtccgttaacattagtttgtaggtcacagtgaccgtatcgtaatcgagtttgaagatgccggtttgcgtatcttcgttccaggggaattcaacggactcctcggtgaactgccatccattgttcaccgtgctgatgaagttcaagtccagcgagagtatgtcattctcgatttcagcgggcacagagacattcaggcattccagtacctggacattgggtactctagcagcctcgtaccagtaaccggagagctaaaaagttattagtgtgtttcagtaaatatacttaaggtcatagcaatacctggaaaattcgatattcccaggaatatgaatcaaatttcttcgctcacttgcgttaggttaaagttgaaatgaatactttcatttcggcagttgagttcctccggcaaagtgggcattctcatccgaatcgctccgacctccagtggaattccacagcagcaaaataacagcaaaatcgggagcatatatttctgagcctccatttcgatccgttcgcggtgccgattttcagacaactaaacgacctaccaattccccaccagcttttgctgctcaagtgatgtgcttatcagtggtgacgatttattaatgaatacatatgccgcaaatatgtattgaattttcaatatgcggtgaatcactgttatgtcatcgataaggcttatagcttatctacatttaggctgacatcctgttttcttggaactctattgtaacgacgatagttgtatattataaatctatttacttatatggacaagtattatgtgtggataatatgtatgataatggctacaagtttggtaaggctattttccttctagttgtagttgcttgcccaagtggataatccacaaagtagaatcaagcccactagagctgccaaagctggctgtccactgggttccctgcactcttccacggattgcttctcccaatagatcagggagctataaccattttcctcggcctgcgtgttgatcagctcgaagatctcctcgctgacctcgcggtctcgagtgaagaacttgaagataggtatcaaagaggtgctcccgtatccacagacaacggcgatggacacgtagtcggtggtcaccagcttatatgacaccttactcgcatcgggatgaaagatgccgtactgggtggagttgttccaaggaaagctcacggcttccctgctgagggaccaactgttattgagtatggtgacgtagcttaaatccaacgtaagattattgccactgactgccgagggaatcgagacattcaggcactccattcccgggacactgggcatttggagagcctcataccaggtgccggcaagctaaacaaatcaagaataattatcagactggatttttcagtgtgggaaactattgtaatatatatcctacgacttttcttacatctgttaagttgaacttaaatccaacatcgtcttcctgacatttaaaatcctgcaaattttccggcagcctgggtaatgtaattgcttcaattccgcagatacaaaatgcgagtaaaagcgatcggttaaatatttgatccttcatttcaaaccgtttgcttcgttaaactgaaggcaactaaatgccgactcaattcttctcactccttttattctgctgtgaaatgctgttgtcattgaataaatataaaataattgctagtaaatatttaacaacgtaaggttataaataaacatatatgaaacaacgcaacctatttgagctccatgtcactactcgccaatattccatatcttaacgatcgttgctcacttgaaattcctttaagttttctttttatggacttcacgcgtacagtgatttcacatcttgaatcaataatagccaaacgcgagtcgcacccacagatttctagattcctcactaggtcaggctggtaacctatgctattggctttatgatttgatatgcagagtaaactcaattcacaccccaaattaattacccaattataactacccatttgttgaaaaaaaagcggacgagttctttgatgagtaagtaacttgataacttggtaacagaaacagaaatattttcgcaagcttatacaatttttctcattgcaaaaagtgggtaagaaatcgctttgcggactctgaagaaaagtcaaaagtttggcgaactgcttgtagaaatcacgtgaaattcgattgtcgcttaaagtgaaattgcacaatgtttgcgatgaaatgttgtcgcagtaaaatatcgttgcaaccccttcctcttccttcccttccaatgttgcagttgcacttcctc

SEQ ID NO: 36455 - DNA, 933 bp, DROSOPHILA
atgcccagtgtcccgggaatggagtgcctgaatgtctcgattccctcggcagtcagtggcaataatcttacgttggatttaagctacgtcaccatactcaataacagttggtccctcagcagggaagccgtgagctttccttggaacaactccacccagtacggcatctttcatcccgatgcgagtaaggtgtcatataagctggtgaccaccgactacgtgtccatcgccgttgtctgtggatacgggagcacctctttgatacctatcttcaagttcttcactcgagaccgcgaggtcagcgaggagatcttcgagctgatcaacacgcaggccgaggaaaatggttatagctccctgatctattgggagaagcaatccgtggaagagtgcagggaacccagtggacagccagctttggcagctctactctccggttactggtacgaggctgctagagtacccaatgtccaggtactggaatgcctgaatgtctctgtgcccgctgaaatcgagaatgacatactctcgctggacttgaacttcatcagcacggtgaacaatggatggcagttcaccgaggagtccgttgaattcccctggaacgaagatacgcaaaccggcatcttcaaactcgattacgatacggtcactgtgacctacaaactaatgttaacggactacgagaatatcgcctttgtctgcggtttcggaagcatttcgccagttccgctgttcaagctcttcactcggaaacgtgagctcagccaggagatgatcaacttggcgaagagctatgctgaacagtacggcatgggcaaccagatcgcgtgggagatgcaatcgccgggcgaatgcaatggatccggtggtctatttcctatggcaattctaatggccaccgttgcagtgctctggggttttagagcgtga

SEQ ID NO: 36456 - protein, 310 aa, DROSOPHILA
MPSVPGMECLNVSIPSAVSGNNLTLDLSYVTILNNSWSLSREAVSFPWNNSTQYGIFHPDASKVSYKLVTTDYVSIAVVCGYGSTSLIPIFKFFTRDREVSEEIFELINTQAEENGYSSLIYWEKQSVEECREPSGQPALAALLSGYWYEAARVPNVQVLECLNVSVPAEIENDILSLDLNFISTVNNGWQFTEESVEFPWNEDTQTGIFKLDYDTVTVTYKLMLTDYENIAFVCGFGSISPVPLFKLFTRKRELSQEMINLAKSYAEQYGMGNQIAWEMQSPGECNGSGGLFPMAILMATVAVLWGFRA

SEQ ID NO: 36457 - DNA, 2557 bp, DROSOPHILA
tggacttggactaccccacacaacagatggggaattcttgggctgtcagtgcagctgagctgagagacaagtcccacaaacagcagccgaatgttgaatgttgaagtttcgattcaaaccccatccactcatgtatctgtatctacctaccgcgcctcataatatatcggattgccacgcaggaccatcaatcatccgtcctaactcaattgaacccccgaaaccttaacgccgaaaaaggtttcaccaagtcaaccgttttttctcaattattttgtcagcatatgtgtgaagaaaaaacacaaccgcagccaaaaaaaaaggataataataatagaagtattgaaaatagaaaacacgaagcacacacgctgaaaaaacctggggtaaaacaattgctagtgagtcgacggaaatcggaaaatcggggtgcaaagggataaatatagcaaagctagcgagcaaagtaaataaaaataaatagcaaaaaatggaaacgcattaaggaaaatcaataaaaattaacatttggccacaaagggggtgctgttggaggtgccagggggtggttgggtggacgattttgttccatttgattttatttttcagtttgcattggcttacagtcgtgttcgcggggaaatgggcaggatcaggccaattaaagatagaaaacccggcaattgttacgtgccaggacatccatgtgtgagataattagcacacaaaaggagacaaggccgcatgctgagtacttttcaactaaccagagtccttttctccctcttccttttcagctacaaggccgccaatgaaggctgtccagatgacagcgatcgggcagcgaatttgacacgcacccaaaaacatcaaagcgactcgcaaccgaaacggttaaccccccttatatagataattccccgcagtcccgaagatcgaggaggtataccacctataccactccccgtccagccgaaatcacacgtactcaatgtggaaaatgctggatatgatggaactgtccgaagcagagctcttcatgttcgactgcgacgattgctcgggcacgccccttgccccaccgccccagttcctcatcccaccgccaccaagaccgccggccctggccgaattcacggtggtgccgcaggattgcaacgaggagcaattggcccagcagcaatgggagagcgatgtctgccaggcaatgccggtaagtgggaaaatctacccaaaatatgataagcccattataaaaactcgaaaaattctccaatattaaatctcttgctatttaaattagttgaaaacaaaacattatttattcaaagctcaaaactgtatattcctgctaatgcgcagagttttcattcctgaccttcgatgacatttccttccccagtgcaacttaggctgattataattttgagggcgttgcaaatgggattttccaacccgaccccacgggtggatgattatgcaacccaaccctctccgcagtgccataatgaggcctgcattttggcacagctgtcgagattttcccctgtctgttgattttccgctcgccgaaacgagttgcaagtgatttggctttttgtgtgaggtgtcagaattgtatgttgcctcattgaattatgtgctatatgcatattacaataacaaaagccttcttgtcgcttttcaagtggtgggttgtggctgtgggcgtggccggaggagttgattatgagctggtagagctgaaaataaatgttagcagttgagtaggcactcgaaatacccggcgaaggatgcgaattgatttattgacaagctaaaattatgccacctgatcgaaaatctgttcgatttgtggcctaagaggataattgctggataacaaattattattgacattattttgcttagccaacaagccgcctgaactggaaaacacattcgagttatctgaaatactagtagaaggcattcaaaactctatgacctctttaaggccattaaactttaagttagccatccgaaagcacaaaaaaggactcgatgaaaaattgccaacctgccacgcccactcgaacagacgtagcccacaattcgggtgccggcaggaaccgcaaaggaatcactttaaagcaaagtgaaacaaatttcttttcgtttcaagtccttttggcctccagttgccggagcaacagctgttgcgccttggcgtgttgttgttgcccccatcattataaggacgaataaggacgataccgacgatgctggccatccccttggacagtggaagcccagtaacagttacactggaaattacaataacaatgaaaagttaaacggcagcaacacaacacaaaaaggacaacaaggagcatttttcggccgccagtcgtcggcaacatatggcccgaaatcaaccctcaactttaaaaggttgtcagcggttacaaaggcaaaaaacaaaatagatatttctatataatttctggcctcagaccgaaaacagccagatagataattttccatgtggaaaaactgtaactcggcactcgtctaa

SEQ ID NO: 36458 - DNA, 270 bp, DROSOPHILA
atgctggatatgatggaactgtccgaagcagagctcttcatgttcgactgcgacgattgctcgggcacgccccttgccccaccgccccagttcctcatcccaccgccaccaagaccgccggccctggccgaattcacggtggtgccgcaggattgcaacgaggagcaattggcccagcagcaatgggagagcgatgtctgccaggcaatgccgtgccataatgaggcctgcattttggcacagctgtcgagattttcccctgtctgttga

SEQ ID NO: 36459 - protein, 89 aa, DROSOPHILA
MLDMMELSEAELFMFDCDDCSGTPLAPPPQFLIPPPPRPPALAEFTVVPQDCNEEQLAQQQWESDVCQAMPCHNEACILAQLSRFSPVC

SEQ ID NO: 36460 - DNA, 4967 bp, DROSOPHILA
tttaatgcaaagtaactttgtaacgctgtaagaaatgtagtttacaaaatcctaggtcaaagaaaattcgtatattcttttccatcctccttgggtaaactcttaaaagtagacaggcatttttaatgtcttcccacaatcagttttcacgtgtgcgccagtgtttgtgttggctgagggtttttacgaaacagggctgcgtcgaaagacgcaaaatgcttcaattttaattagatcaataggctcaactacgcttacttatgagctcaagccttgaattatatttttaatgcaaagtaactttgtaacgctgtaagaaatgtagtttacaaaatcctaggtcaaagaaaattcgtatattcttttccatcctccttgggtaaactcttaaaagtagacaggcatttttaatgtcttcccacaatcagttttcacgtgtgcgccagtgtttgtgttggctgagggtttttacgagcgacttccgttttgacatcgcaacatgtttacctacaagacattacaaggatgtttggggctcatccttccccagttacgtggcgtcaatttaatttcacatttttcattatgcttatggctgcacgaaggaaggagacgctcaaggctctctgttttctttgccaggggcaacacttaattatgttcattatttccatggcacgcggttgtcgctcctggggaatccccagcttctcgagcttctccagctcatcatcattctgacaagcccgacgctttgtgctcatttaaattgaatttttggctgtggagtgttttgtgctgctttggcattctttattaatcaaattgttttcgggcaatttcgcaaggaggcgatagcccggcctttgccttgtttacctgacatttatcaaggttgctctacaccctgttggtcattacaaatcgatttatctttggcttgggccaaagaacttatggctctattaggaggggggagttaaacctaaagcaacgctaaatgtttgctaaagccgagcaacatcatcatcatcatcagtcttctttagccatcgtagaagcacttattaatcgctttctttctctcattttttttgcagaaacaagcggaaggtgcagaatctgctgccctgcaagacacccacacgaggccccctcaatggagccatgcccctgggcggtggcactttgggatcggcgcaccaccatcatcatcacgggatgtacgaggatcctgatgcgcacttgggccaccatagacccctggtgatgcatcggcatcatcatcaccagcagctggcgcaccatcatcactatcagcagcatcactccgaggttagtatctttagatccattatgaagtacatatcctttctggctttcccaccctcgctcatcagctgacaagccaactgacaaacattacgacaatcgctgtcaaaacattgcgcagtcattgtctcgcgttcaggttactactctgtttttgatcctgtcacatgcaattcaattgtaagacgaaaccacatttccttctcgccgaggatatccctttctgcatattattcatttatgtctatggtcctttatgcgcccattgtacgcctcaatttacacttgaacttgacatggcacaacgtacaaacggcggacacattcataagatatgtgagagtatgtcgtatcctgttgtttgtcccctaccctccactcagcttaatttcagctcctttgtgtgcctaaatattttacgactctgacgcctcgaaggctttttctgacccaaaacgtgttttctttatgacgcgctcaccctcggttttattccattttttcatattttatgtgcgagttttgctcatttttttgcctgactgaagtgtgtgtttattttattgtctgataaacagcgcctgtaggggccatatatgaacagaagtcttaagtatattccagttcaattagtttacacattatcccttcttttaaaccagttttcttggctagaatgcagatccgacctagtttttaaggttcaattggtggtaggatataaccaacttaaacttttactctcaatactttaaatgggtcgttttttgcttccccgttttttttttttttttttcttacccatttattattcattttcccgtggcattttaaacttcttttttctgcctttgtcagctttgttctgtttcaacaactgcttatgctgcttggttgccttcccttcgacttgccccttttactgctgccgccttgtcctgtcacatttcaaagtcctgcccgagggtacgtggcagtaaagcggcttaccaagaacaaccttctcctttcccgcaagagggttgcaatgccacacggagcacaaaaatgtcataatgacaaactcgacattatttataaacattctcctcagctttgtttactaaacttgcattgaaaatcgtttggttttcagatgaaacaggaaacaactatgattgtgggcaatgcaaatatttttcgcagtgcagtcgagaaagtaaaagtaacgtcaaacgcgcttttccttaccccttttaaattttcttttcttttgcaacatgtatctaatttatttttcctctttctcttacagctgctccaaggaaagagtattcactatcccagcggctatcccatgacgcgttcgccaccgttcttggtcagctcctcacctggacccgatccctatcgctccaatgacaatgtctacgaggaactgggaccgggacgcgttgattccgatggcgagtcggagccgccacttcattcagatgacgatttcgccgaagatgaactatccctgcctggcgaatgcagtttccagaaggaaaccaacctgccagcggcagccggtgccacgccctatcacgagagggcggcgggaagcagcagcagtggcacaggagtagcaggagtagcgggagccactggatcagtggctacatccgcgagtctgccacaggctgttcaggagcgtcacagtgtcctgagcagtggttcctcaatgggtcaggacacgtccaccgcgacagcatcctctgccagcaataacaatcacgagttggcatcgggatcgaacaatcgccgtactggccgcacgcgacaaagtcgcagctctcaggatcaggatctcaacaacagcacctccacggcggatattgccgacctggcgcctctgtacgacaaccgcagcaatctgatgtccctgggctacgtggctcgctccacagcaccgcaattctataacaccttggagcacgaagtggagcgcagaaatcggattaatgcgcaactcagcaaagccccagttcctccgctatccacgatttacagggaacgcatccgctatccccatgccagccagcagtatccgtcgagtgtggccagtggcctgatggccgccacgatgagggcgagaactcaaccgagggtattggaccgtcgattagcaccacatcagcatcagcaccaccgcatacacgctgcaccaatggcccaggagccatcctactgctacgcagagcccatgtacaatgccaactattactacgaaagtgctggtggcgcccggccttatgcctccaccttactacccactgctgcggactataggcatccgtacggggactccagttttggatccgattcgggatacagccaccatacgcctgccagctcgattgggcgacaggactatgacgtagccgagccacaagtgctaacccaaccgaaaccaagcaaacttagttccgccctaaacttcagttggaatcgcaactcgcggagcaagggaacaagtggaggagctattgccaagacctcgggaaatagcagcaacagtagtgccaccagccccaacaacaacagcagcgcctgctccaccgtcacatcccaattggaaaacaacaatactgccagtctctcaccagcgtagataaactaatcaagtataccccataaaatatccttgtaaataggggggtttgaatactaaacccttgtacagttagtcatatctcttgagctaagcatactaaatatcaaaactgtcctgcgtgtacatcgtcaaagcaatagttgtttaaccaatatatatactaaactcgaagcggagagcccaaagtttcttgataggattatcggagatggttgccataccaccaagttttcgctctgtttcaaaagcaagaacttgtcgcaaagcaaagaacttataggtcttaagtgtttttccaatgtgattgccaaattctacattataatactaaactttattgaaacctgcaaaactaatttataatctagttgtaaaatagatatgaccataatgttacttttaagtttaactttagttttgtttgttattttagtttttaagtgaagtagataaagagaagagctcctaaaaaatagttgcacagaaggtcaacaaaaatataccaaaatattaaaaaacaaaatgaaatcaatgaaatgggtttttattttttcaaaattttacaaatttttagttgcttgtattttgggtttttaatgtttggccattccaatttaaacgcagaacaaatatttttcttttaatacgtacagcatacttttcggcgctgcaattatctggacaagaattcttttggtctacatacttttcagagaaactgtaatgttaactaacaaaggctctgttagcttacagacaacaaaataatatcatttcgtgcagctgacttcttttaacaattataatattagcacattgtggtgcactgttgatttaatagtaactttgttggattttgttaagcataagtggcaatatgtattgcatttaaccgcatcctttgagtaacgacaaccaaaggctctaaaaagactgtttacatataaaagaacaacatattttacttattaccgaaacaataatatactgtataaac

SEQ ID NO: 36461 - DNA, 1614 bp, DROSOPHILA
atgtttgctaaagccgagcaacatcatcatcatcatcaaaacaagcggaaggtgcagaatctgctgccctgcaagacacccacacgaggccccctcaatggagccatgcccctgggcggtggcactttgggatcggcgcaccaccatcatcatcacgggatgtacgaggatcctgatgcgcacttgggccaccatagacccctggtgatgcatcggcatcatcatcaccagcagctggcgcaccatcatcactatcagcagcatcactccgagctgctccaaggaaagagtattcactatcccagcggctatcccatgacgcgttcgccaccgttcttggtcagctcctcacctggacccgatccctatcgctccaatgacaatgtctacgaggaactgggaccgggacgcgttgattccgatggcgagtcggagccgccacttcattcagatgacgatttcgccgaagatgaactatccctgcctggcgaatgcagtttccagaaggaaaccaacctgccagcggcagccggtgccacgccctatcacgagagggcggcgggaagcagcagcagtggcacaggagtagcaggagtagcgggagccactggatcagtggctacatccgcgagtctgccacaggctgttcaggagcgtcacagtgtcctgagcagtggttcctcaatgggtcaggacacgtccaccgcgacagcatcctctgccagcaataacaatcacgagttggcatcgggatcgaacaatcgccgtactggccgcacgcgacaaagtcgcagctctcaggatcaggatctcaacaacagcacctccacggcggatattgccgacctggcgcctctgtacgacaaccgcagcaatctgatgtccctgggctacgtggctcgctccacagcaccgcaattctataacaccttggagcacgaagtggagcgcagaaatcggattaatgcgcaactcagcaaagccccagttcctccgctatccacgatttacagggaacgcatccgctatccccatgccagccagcagtatccgtcgagtgtggccagtggcctgatggccgccacgatgagggcgagaactcaaccgagggtattggaccgtcgattagcaccacatcagcatcagcaccaccgcatacacgctgcaccaatggcccaggagccatcctactgctacgcagagcccatgtacaatgccaactattactacgaaagtgctggtggcgcccggccttatgcctccaccttactacccactgctgcggactataggcatccgtacggggactccagttttggatccgattcgggatacagccaccatacgcctgccagctcgattgggcgacaggactatgacgtagccgagccacaagtgctaacccaaccgaaaccaagcaaacttagttccgccctaaacttcagttggaatcgcaactcgcggagcaagggaacaagtggaggagctattgccaagacctcgggaaatagcagcaacagtagtgccaccagccccaacaacaacagcagcgcctgctccaccgtcacatcccaattggaaaacaacaatactgccagtctctcaccagcgtag

SEQ ID NO: 36462 - protein, 537 aa, DROSOPHILA
MFAKAEQHHHHHQNKRKVQNLLPCKTPTRGPLNGAMPLGGGTLGSAHHHHHHGMYEDPDAHLGHHRPLVMHRHHHHQQLAHHHHYQQHHSELLQGKSIHYPSGYPMTRSPPFLVSSSPGPDPYRSNDNVYEELGPGRVDSDGESEPPLHSDDDFAEDELSLPGECSFQKETNLPAAAGATPYHERAAGSSSSGTGVAGVAGATGSVATSASLPQAVQERHSVLSSGSSMGQDTSTATASSASNNNHELASGSNNRRTGRTRQSRSSQDQDLNNSTSTADIADLAPLYDNRSNLMSLGYVARSTAPQFYNTLEHEVERRNRINAQLSKAPVPPLSTIYRERIRYPHASQQYPSSVASGLMAATMRARTQPRVLDRRLAPHQHQHHRIHAAPMAQEPSYCYAEPMYNANYYYESAGGARPYASTLLPTAADYRHPYGDSSFGSDSGYSHHTPASSIGRQDYDVAEPQVLTQPKPSKLSSALNFSWNRNSRSKGTSGGAIAKTSGNSSNSSATSPNNNSSACSTVTSQLENNNTASLSPA

SEQ ID NO: 36463 - DNA, 2666 bp, DROSOPHILA
taaatcgcaccatggaaatgaaacagcttagattaagaactagcttgattttagaatgaaatatttagagagcaaattaaatcaatttttgttttcgtttgcgcgattagcgttcgcatcgatttgtttagactgattagcctaaaacgattgcaaaattggcatgtaatattaatctcaattaatctattcactcctagcccttatccagaattaaccaaaacacaagtgtatgtaggatataagttttaaacgagcaacgtagtggggtagcaaaagtataagccaaatattacattacattcactagcaatattgtaaatagtcgaataggatttccaggcacggtaaaaatagctctaatatccgatataccacttatagatttaagctaagccctctctcagctctggtattgtcgtatacgagagtcattcaaatagttactactgaattcagaaacaaagcattcaaagcaagcaagacataaactctaaaatatccagaacgtagggataaaatgacgaaggatgggatggattacttctaacggaaacaactgttttgtgtatttatttataaaaacttattactatatatctaattttatggatacaagaaaataaagtattatatgaaaccaattgtggaatgtgcgtttgtcattgaaacgaattgcaagagcgattctccgagaagatttacttcttatctttaaatattttcaacgaaagtactgggcaagaatatatcaagtgaaattgatatggtcccgaaagtatgcttattaaatttaactttataaaaatgtaatcaatataaccacaactagaacgtaatggtgtgagtttcaaacagaaaaatgttttccatggcatttattattaattgctagacggcttggcttgcctcattttagaacccacttaacttatagttaaccagaaacaaaaaccacagacgttagccaaatattggcactatatcgtttgtcatttgcctagtccggaaccacttcgtacatgtttgcgcccttcatgagcaaatagccacccaggttagccatttccaccagctggctaaagccagtcaaaatgccagcccgggttccaatttcctttagctcatcgaattcgaagatgcgtcgccccaatgccgccgaacgtctcttcgtaagctccaaaaaattgcgcagttgagcgctctttccggctcctcctccagcgccgcctcctcctcgagttccttgcctgctggagccctccttgaggctggtctgggtgatgctctcggtcagcagggcgatcacatcgcgcacgtgctgcggactgaccacgtgggataaatccaggcgagcacgtgcctgcgacaggtgaattatcgcaagaagttgccttacaagaagaataagccaatataagtgttaccttataatttaaggttcttaaataaatcttacaactgtataaaattgcctttaggtatttcataaatgaaacacaagcagactgtgaacaccttaattagtattttttagattagtattcttatagtaagtaaacatatatatgggcaaaattgataaagcaggtttgttgcctaagtcttttgatttctgaccttttgccaaaagttcttcaaacgtgtattccattttgtttccattttgagcacagttttcaaatttaaggtcccgaggccgtacgtgggcctcatcttcttgaccctcaattaatttcgcatcttgtttttctcatcatttacgccgtaggtaaacatttcttttcagaagtatgataatatatgtatctccatatttgccgaaaacttgttttggcagatgaatgtttttaattgtatttctaagtcacccaactggtcgtacaatcacgcccaacacttttgctaattaagctttattctggcgtactttaaatggatttgataaaaatatttgattttaaatttaaaattccagctccttttcgtaagttttcgcccaaaacaaaaataggtataagtgggcaactctgatgcccaatgaaaactaactcgatcggaaacccgaaatgtaatcataaatcagttggatgtgggcgactgaagagcccagcatcgaacatgttccaacgcatttttccctttgcctttttattttatttttcggaaaccaacgcatttctcgggggagttttgaaacccatcatcattacagcaactgcatcgacagaggcagaggccgaggcataggcagcgaagccccatctcatccagaggccctagacgcacgcatctgttcggaccgcatttcattctcggctcgcacgttggcgcaaacggttcattagctggcggatcaattccattcggtcgggtttcgattgggttttgggccaaaagtgcatttcctaacatcggcattggccggacagcagaagcccctgggtctggtcatctgctttgtttttttgcttcatttacctcgagtcgcgtcggttgatgaaattccgcttcttattgttattggtgcgctggcgttgcattcgattggagttcgagtgacgaaagtgccaagagtcgaagacaatcaattagagggtgcattacaatcggcgattcgatgcatcccatgacgatgatgatgcttcacatcgtgattttagcag

SEQ ID NO: 36464 - DNA, 409 bp, DROSOPHILA
aatggaaacaaaatggaatacacgtttgaagaacttttggcaaaaggcacgtgctcgcctggatttatcccacgtggtcagtccgcagcacgtgcgcgatgtgatcgccctgctgaccgagagcatcacccagaccagcctcaaggagggctccagcaggcaaggaactcgaggaggaggcggcgctggaggaggagccggaaagagcgctcaactgcgcaattttttggagcttacgaagagacgttcggcggcattggggcgacgcatcttcgaattcgatgagctaaaggaaattggaacccgggctggcattttgactggctttagccagctggtggaaatggctaacctgggtggctatttgctcatgaagggcgcaaacatgtacgaagtggttccggactag

SEQ ID NO: 36465 - protein, 135 aa, DROSOPHILA
METKWNTRLKNFWQKARARLDLSHVVSPQHVRDVIALLTESITQTSLKEGSSRQGTRGGGGAGGGAGKSAQLRNFLELTKRRSAALGRRIFEFDELKEIGTRAGILTGFSQLVEMANLGGYLLMKGANMYEVVPD

SEQ ID NO: 36466 - DNA, 3598 bp, DROSOPHILA
agcgactgcagcgaaaggcttgccacgtgaggctgtagctaggctcgcccacattgctcacaaaaccccggatggaaaacaaagtgtccactcgggaatggcttattccttctattgattccacaggcacaaaatcatccggtcgtgcgtagatcttgcgtacccgtggggttggaaggacgtactgttccggagtggacaccatagctgtggtggaatcattacagtccagctggtgattgacgaccacagtgtgcatagccaacgacagggttcctagcgtgcgaagcgggtgctcacggatgtcttcggacaaactaggccaaacctcctttagctgggcatctgatttgatgcctgctgcgcagagggggaagaatccccgatcccgtatcatcacaaaatcgaaggtgtgaggattacgttggtagtatgcctccacggccattatccttgtggccagttcgttgccctcctcgtatttctcgcgcaagaagtacagtcgccagccggaataagcccgtggattatccaccgcaatgctctgcacctggagcccgtcttctggtgcggcatagttttccggccgcagaaagctgcagtccaagtgagcattgcgtcctcgcttgccggctgtgcggctccagcccctgggttgccgagttgcaggcggaacagaaggagcgtctggtgctccaggttccccttggttgggttgtcgattgcctccggctgggatcacacgtccattgcgccgaaagtagaagtacggacggtaggctccgcctccgcgaccacgaccacgcacaaatcgcgatggggcgcccccccgggaaagcgttggattcatttcagctggggaaagtttacaaatttgcccgcttttaaatagagatgatacctatattacaaatgacatgaaatatcgataacgatctttggctaagatattgaacccttaacgattttatatttaaacttataaatcgatgtaataaaattattttggaattatttcggcggacacttgtgatatcttcgattcttgcttcagtatgctcagctgggcgggaaggtagtgttcaaatacacccgatagcttcgacttgacctcacgaaatgtttccaacacttttatctcctcgttctcatcagtgggctgcacggcctttagttcatgtagtaattcggtgcagccgtcgaggagcatcacctgcttcaggtgaagcttaagcagctcctgctgaattgtcttgatgcactggatttgttggtccatgcgcagtggaatcgtggaaagagccaacatttgctccatatgctttttatccttcacgaacattttagcagcactttccatggcttcagcaggttttgcttcaatctccttgggatctttgtgctttttatcctccacgatcgttttatgaataatttccatgttttcagcaggttttgcttcaatctccttgggatctttaatgcacggagcttccgtctcggttttagctggaatctgtaagggaaattagggcttactaactaactagccttagaaattgacagctatcgcctttttttttggttatctacagctttgtatttatttatttttttttttaccattttgttctctgctgaaaagttttagagaccgtatgcaaccaatgataaaactgaatagcagatcgaatactaagtcaaagcctccttttaataagaaactcatagttttttacagaacattcagagcgatctagggttctggtttctggtcaccttttttcgggaaaagtgaactcagattgacgggacagttgtccaggcgggccagttgcttaaccatgtcatccaggagcaggctgttccgctcgtcggaaccctggatgagcccgtaggcctctgcgttggcgattcggtgctgcagaagcggcatgtagggtccattgaaatgcggctgtccattggccaattccggcggaggcttagcagtgggaataaagtccgtttccgactttggggaccggcaagtcggctggtttggccgaaactttggagtcctatagcccaactttcgcttcttttccgcctgcaagtgattttcgctcacgtcgtcggactcgtaatgatggttataaaaccggatgccgtatattgcgggctttggctaaattaggtagatttatctttagataaattaatattttgtgttatagatagtgttgatggttagaaactgagacatatctccaaatctccaatactcacagctctcttgcgctcctcatcgtagccatcgtcatccgaatcatcatcctgttcatcattgtccatttcaatgggaatccggtcactggtcaccggcacctggggcacgaattctgaggcacttgctcggagtccattaggggagaccgcggtcggcggagaagcagaagccgaagtcggaggagtaacggctggagtcacctcattgctcatggactctagttccagacataaacgtttgtaggccatcgtggttctttccaagtggttgagatccaatttgccagcgatatgggcaacgttctggaggaattttttactttcatccataaagagcgaagtcacaatcaaattcctttgtggatggcgcaaacattaaaaattttaaacatttaacacaaacttgatttgtttagcattcgatgtttcgattcgatttctgacagaaaatctggaactgtcaaacatatttaaattggttgatgtacaacaatttataaaaaaatattaataacgaactaaaaaacttgtagtatttaatggaattgtccacaattttaaaaatttagctcagtgtgaccatttcggtcgcgacttatcggtcttgtcgataaattagagctgcaaaatttgtaaacagtggacgcctataattaaaaacaatatttaacatcgaaaaaataacgttttcaacgttaatttaaataattaatttaaaatacaattcaacatgccggttagtggatacttgcgcatcaaaggcaaacgagttggcgttgagatattcccagttcttttcacctgctttcgtgaccccctgccaagcataaaaatttccaagggaaaaggcaatcttgtaaattaactatgctttcaggcctaccactcgcagatcaaggaagtgcgccagcaggtgggcaacatggccatcctgccgctgaggacgcaggtgcgcgggccagcgcccagtgcgaatattgagagcgacatcattgatgagtcactgtactacttcaaagccaatgtcttctttcgcacgtacgaaatcaaggtgaggccgtaatccgggattcagaaccattacctggtcacgtgatggtcatattgaatccttatgctacttgctacttgaattcacaaactatgttttaccattttcagtccgacgtggatcgcgtgctcatctatgtgacgctctacataacagagtgcctcaagaagctcaatcgctccacgagcaaggcccagggacagcaggacatgtacagcctggccatctccaagttcgacattcccggcgatgctggcttcccattgaacgccgtctatg

SEQ ID NO: 36467 - DNA, 1203 bp, DROSOPHILA
atggatgaaagtaaaaaattcctccagaacgttgcccatatcgctggcaaattggatctcaaccacttggaaagaaccacgatggcctacaaacgtttatgtctggaactagagtccatgagcaatgaggtgactccagccgttactcctccgacttcggcttctgcttctccgccgaccgcggtctcccctaatggactccgagcaagtgcctcagaattcgtgccccaggtgccggtgaccagtgaccggattcccattgaaatggacaatgatgaacaggatgatgattcggatgacgatggctacgatgaggagcgcaagagagctccaaagcccgcaatatacggcatccggttttataaccatcattacgagtccgacgacgtgagcgaaaatcacttgcaggcggaaaagaagcgaaagttgggctataggactccaaagtttcggccaaaccagccgacttgccggtccccaaagtcggaaacggactttattcccactgctaagcctccgccggaattggccaatggacagccgcatttcaatggaccctacatgccgcttctgcagcaccgaatcgccaacgcagaggcctacgggctcatccagggttccgacgagcggaacagcctgctcctggatgacatggttaagcaactggcccgcctggacaactgtcccattccagctaaaaccgagacggaagctccgtgcattaaagatcccaaggagattgaagcaaaacctgctgaaaacatggaaattattcataaaacgatcgtggaggataaaaagcacaaagatcccaaggagattgaagcaaaacctgctgaagccatggaaagtgctgctaaaatgttcgtgaaggataaaaagcatatggagcaaatgttggctctttccacgattccactgcgcatggaccaacaaatccagtgcatcaagacaattcagcaggagctgcttaagcttcacctgaagcaggtgatgctcctcgacggctgcaccgaattactacatgaactaaaggccgtgcagcccactgatgagaacgaggagataaaagtgttggaaacatttcgtgaggtcaagtcgaagctatcgggtgtatttgaacactaccttcccgcccagctgagcatactgaagcaagaatcgaagatatcacaagtgtccgccgaaataattccaaaataa

SEQ ID NO: 36468 - protein, 400 aa, DROSOPHILA
MDESKKFLQNVAHIAGKLDLNHLERTTMAYKRLCLELESMSNEVTPAVTPPTSASASPPTAVSPNGLRASASEFVPQVPVTSDRIPIEMDNDEQDDDSDDDGYDEERKRAPKPAIYGIRFYNHHYESDDVSENHLQAEKKRKLGYRTPKFRPNQPTCRSPKSETDFIPTAKPPPELANGQPHFNGPYMPLLQHRIANAEAYGLIQGSDERNSLLLDDMVKQLARLDNCPIPAKTETEAPCIKDPKEIEAKPAENMEIIHKTIVEDKKHKDPKEIEAKPAEAMESAAKMFVKDKKHMEQMLALSTIPLRMDQQIQCIKTIQQELLKLHLKQVMLLDGCTELLHELKAVQPTDENEEIKVLETFREVKSKLSGVFEHYLPAQLSILKQESKISQVSAEIIPK

SEQ ID NO: 36469 - DNA, 2922 bp, DROSOPHILA
acagactgaattcatattttttcatatttatagtacatatacaattttgattcaatttttttacacgtttgccttaatttataaatgccataagaatggatttttttcatggactaaagatagaaaaaggtctgaaaaaactacactttgcaggtgaaattttccatctttcaccccacattgttcacacaattgccgatcatttatcaaatggtgcagctttaacttgtcagaaggaccatcactgtccgtgccatatgccgcaaattattcattatattggtcttataatttgatttatttcagaatttttatttgcattgttgtataaatccataaatcattacattcactttcgattagtttcgcgtcgattttgttccactttcactttatatgtcgatttccgtttccggtttcgtccgcctttggtgttcacttaacggtttatcaccggcttctggcgccttttcgcaatggcacgagtcgattttgttcgttctcgattcgaagtcgaactttcgaattaatgtgcaaccggcattttggccaagaaacagctgacgggcaagctgcacgtggcacggccccaaagctttctcagtgtgtgggcggtgtggaccgaattgtttatgtttagcccgagcgaggtgtgtcttgtaaatttgtgaaattttcatacatttactaacaactgggtcgtgtttaaggacacgttggtatataaacatttatcttatcaacctaacattttagtaatgtatatacctttaaatatttaaaatattatttcgttttatgatagaacaataacgtaggtgatgaaacgcatttttgttctgttcccatcttaaactgcataattgttagcaatgcaaaagctacattagtaaagtttgctcgcccgatgcacttgctgaacggttgttgtctcggctaagccgttggtgaaactactctgttaacaacagccatgttaagttgacagcaaatctctctgttacttacttgcatgtttattgccaatttctcggcgcatttcctccgtgcgatttgtcaagttgggctcaagtggaaactgggcgaatgtcatgttctcgttacgcatttgttttcccagggatttcatcatgagaaagcaggtgtgcattccggccacacttcgctggccatcccgttcatagtagaagatggaatgcgaccagttgtgtctgccggaagacttgataagctggtaaggcttagaatagcaaatttatggcacttaccgcttcatcacgtttatggtcagctcggaaatcgtctcgaaactcagcattcccgtgcgcaacagcatatagaactcgtcattgcaatcggttttcttctgctcaaagtcataggtggaacctccaactgatatgagtggggtgccctggctattgaaatacttggtaatccggcttactgcagctgcaagggattaaaaaaacatggaaattatttaattaaaaaataaatcgtattacaaaatataaatcggatgctcttggaatagcttctataaactcacccaaggaataatcgcagacgggtccaaagatcacctgggcgcactgtttgataatgccatccatggccttaatcacgccgagggaggcatcacacttggtatcgtgggccagccactcgaaatcgatgtgcgaaggaatcaaggacttggaccggatctgctgctcggccactttaaggattggtaggacacgcggtagggatgcctggtacatattatcatcgggcagaaggactaatgcccgaatggtgcagtttctgccattcgcatcgcaaatagcctcacaatcgcgggctggctcctcgcggcaagtggccacacaatccttggggccaaaaaccaggccaacaagcagtaggacaaggagcattgggaacaggcgagtgcgtttgctaatttgaaaactgttgacaatttctcgtggaactggtacttcaatcaaatcgagtgatgcgggtctgcgtctggcgctttcagtgtcattttgtttaccaatttgtctctgtgaattggtttggctaatttgcatagtcgcagcgattctctatcaaactactgctcggtgattgcggtctctatatttcagcgcctctgtgtgttcgccggagaactctggagtaattaagttgctttgattgtgcgcataattgagccaaagtttggccgacgctgcatgttgcctttgccgtcgaagtgcctccagctgcgactgcaaatggtgcgaatcaagatattgaagtcattagcagctccctcgattcctgctgctcaggaatacataaattattgaagttttaatgcgctgcccttgggggcgatgtgtaagtgccatatggagaaatgaaatgagcttgtgctttaaagtggaatgttgagtggttgaaaggaagttttccagggaatatgcacttcttattaaccctttatcttaaaattcaattattaaataattttggcctctaccaaatcttaagatccctagtcgtaaatattgaagcttcccagtcgtaaattttttgttcgctccacttatcactgtctcaattagatacgcaatttaatgataataaggaaataacaaactttatctttcattgaactgcattgcctctcagtgtctctaaaagtaaacagcacctgaatttcagaacatcgccctacacacacacatttataaacatttttatttacgattccaaccataacagtgccctaacaacattatttttttgtatgggaggtgggttttatggttcgcaggtgtgactcactgcttctggtgcccaattatttgctcaattcccgtcgaagctgatgcattagatagtgagcatgaaacctgtgttgtttatggcaatttccctggattg

SEQ ID NO: 36470 - DNA, 765 bp, DROSOPHILA
atgctccttgtcctactgcttgttggcctggtttttggccccaaggattgtgtggccacttgccgcgaggagccagcccgcgattgtgaggctatttgcgatgcgaatggcagaaactgcaccattcgggcattagtccttctgcccgatgataatatgtaccaggcatccctaccgcgtgtcctaccaatccttaaagtggccgagcagcagatccggtccaagtccttgattccttcgcacatcgatttcgagtggctggcccacgataccaagtgtgatgcctccctcggcgtgattaaggccatggatggcattatcaaacagtgcgcccaggtgatctttggacccgtctgcgattattccttggctgcagtaagccggattaccaagtatttcaatagccagggcaccccactcatatcagttggaggttccacctatgactttgagcagaagaaaaccgattgcaatgacgagttctatatgctgttgcgcacgggaatgctgagtttcgagacgatttccgagctgaccataaacgtgatgaagcgacacaactggtcgcattccatcttctactatgaacgggatggccagcgaagtgtggccggaatgcacacctgctttctcatgatgaaatccctgggaaaacaaatgcgtaacgagaacatgacattcgcccagtttccacttgagcccaacttgacaaatcgcacggaggaaatgcgccgagaaattggcaataaacatgcaagtaagtaa

SEQ ID NO: 36471 - protein, 254 aa, DROSOPHILA
MLLVLLLVGLVFGPKDCVATCREEPARDCEAICDANGRNCTIRALVLLPDDNMYQASLPRVLPILKVAEQQIRSKSLIPSHIDFEWLAHDTKCDASLGVIKAMDGIIKQCAQVIFGPVCDYSLAAVSRITKYFNSQGTPLISVGGSTYDFEQKKTDCNDEFYMLLRTGMLSFETISELTINVMKRHNWSHSIFYYERDGQRSVAGMHTCFLMMKSLGKQMRNENMTFAQFPLEPNLTNRTEEMRREIGNKHASK

SEQ ID NO: 36472 - DNA, 3964 bp, DROSOPHILA
caacagcagcaacagcaacatcatcagcatcgccaacagcagcaacatcgttcagcaaagctcgtacacaaaccacgcacagcaagagcatgaaatgtcacggccatgagtccaccgtagacacgcaccaccagcacgagcaccaccgcaccacaagcagcagcagcaccaccatcgccgagccgcatcatcatcctggctgctgccatccatgcaaaacggatccgttgccttggctgcaacagcatttagttttgaaccagatcctcagtagtagtagtgccaccgcctgccagcccacgtgtcacgtgcaacacttgacggtggatgctgatagtatggcagccacatcggcagatgccacatcctccactgcctgcagaggtcctggcagcaatgctcttagcgccagcatcaagccaaagttgtactttgagcagctgctgcgtcgtgacggttgccacaagaagccgcgtccgcccgtcaaagtggacgtcaatgtgcgcctggtgcccaaacagcccatgccgaaggtcactcggtccctgaacgagacgttcgtcaaggaggtggacgaggtggcacaggcgatgaacgaaacctttgtcaaggagacgtcgccggagctggctcggatcgatgagcagctggcagagctggagagcaatcgagagcgcgaggatcacgaggatcacgaggaggtggacgaggagacggaggagcaggagcaggccaccaagctttgataacgttattctaagccacaagaatagtattaagttttaggtatatgcatagggataatccatttgattatatcaatttataagaatattttcatttcctaatgaaactatttataatttaaagcatcatttacgtgcaatgaagcgtagtaaatttagattatagcactagttcttattctagcagcaaattgtatttatttttgcgagcttttagtttgccctgatttatgttgacatattttctgtttttgatgaaccacagtctggagaagcagcagctgagagccacaaacgagcagctaatgtcacgccttaggcaaatctggggcaaatacaaggcacaactgccagcgcaccagggatccccggagctgagctccgaggacatgcgggaggagcacccaataaaatccgtgacggtacctaacagtatttaactaatatctttttccctctttctttcttccatctgattctctttctatctttccgtatcttgatctgtttccctacatttaaactttcttgaagagaggaaatatctgctttacaatcgaatctagagtatctgtccaatcgaatgttgagtaatgaggagcatatgagtaaattagatagctcaccacacgattatactagcttagtacccggaaaaggtaaattccccaattcccgtcaataaccaagtagagcacctccatcccatagtccctaattctaaactgatttaaccactccatcagaatcggaagctgaagtcaaggaggcggatctgcccgataaagaccctatttagagcctcgactcacacgacgactccacccacacacctataacacttgattggcgatccactctaatcaaaattcttgtactcacacagccgcttacgactaccaggcagcgacatatggcaccccaatcgaacccatacaaagcaccccacaaccacacaacagcgccagcgacagtgattacacgtccggagggattggcttgggcgatggagcaactgcatccgcaacagcagcggcagccacagcagccagcattgctgcaggagcagctgcagcagcaggatcagcaggatcaggatcgacagcccctggacgaaagagcagcatcgccgactatggactccaggataacgatgacgagaatctcaaggacaaccttggcctgggcgagaagcagcagcaacaacagcaacagcaggacgtggacaggcaaagggagcgagaggaacgcgaccgggagctccagcaactccgcgagcagcgcgaaaaacgggaaagggaacgcgagcgggagcgggaacgggagcaggccgagcagcagcaacaggcggagcagcagcagctacagtcgcaacctgtggcagagagcagcattaccaatgccggcagcgccaatctggccgcctataacaccgactacagtgcctacgatcagcagcagtacgacgccagtgcctatgatcccaatgcctatggccagcagcagtacgaggggcagcagtatgactacggcgatgcgggagccggatacgactatggagcagctgactatggacagtctggataccagtatgacgccacgccaggaggcaccgcagccggccagtcacagccgcagtcccagtaccaggtaccagctgccccccagcgaatggccacggactacaacagatcgccaccgccattggcagcggcggcaacgggcatcacgtccccgccagcaacaggagcgaccggagcagcagcaacacctgcagtttcaacagcaggagcagccggaacaggagtatccggaacgggccgaccacaatcgcgcccgggcagtggagctgtggggtcagcagctgcggctggagcagtcgccggcggaaaatccgctgtgccacaacagcctgccgcgtcagccgccggcaaaaagtagctggagtcccgactgcgaggatcgcctgacgctggagtgctccatcagtagtcccagcctgatgcgctcgtccaacgatgaaacctgctcggaattggccgatctcagcgagacctttgtggtcctggctgaaaatggttcgggggaggagagcttgtccccggcccagaccaccatcatcacagccagaaggtcgagtgcaccggccgtggtccagcaggcggacattgccaacgagaccgtcaccatcgagcgccatctagatgcccatgaataggggtcagcaccgagttctccagcaacagtttcttcaatcaacgtacttctactcatgtgttccataattaaacgaagaagggaaattcatgttttataactaataaatccattttaaataagttgattttgttattttattttcaactagctagttcaagagattcaaaggtataaaaattatagtgggtagaatccatttcgagggtgagcttaatgactgcataatactaaaacgtcacactcacttttcctcctttcgctccttcaaaataaacgcttttgcctcttgcataatttccgccagtaataactattaatgttagaactaataaacaacttcgtgatgtaagtgctctgcgccacgcaatcctgtcaaaacaaccaaaatgataggcagatgggcattgttcatgtcctgactgacatcctcgtcaattgccagcgacaactgggccaagcactcataaagtggcaaaataaaatgaacttgactttgagcttggaggttagccttttgctgatttcgatgaggtaacagtgcgaccgaatcgaatgtcagtaatttgactgaggttgcgagatgggtggttggagtgatctaggagctgtccggatagacggttcctatcaggcgcataccgttccatttccattcgtgggagacaatcgtggcggaggcatgacccaactggatgtggcagggttcctccttcgccgtggccaggaagcaggcggtgtacagggccatgtccagttcgggcgagatgcccacaaagaagccgttgactggcttattgatgttgtgaaacgtgtagcgaacgctgagaaccatttggttgtgctgaggaaatatagcaatccccttttgtaaggatcatctgttacatttgtctttaagccttacctttcccatttccttgtggttcagccagcccttgtagtccacattgccacgttgctcctgatctgcaaagtacagccagttatgcaagcccagg

SEQ ID NO: 36473 - DNA, 1419 bp, DROSOPHILA
atgaaccacagtctggagaagcagcagctgagagccacaaacgagcagctaatgtcacgccttaggcaaatctggggcaaatacaaggcacaactgccagcgcaccagggatccccggagctgagctccgaggacatgcgggaggagcacccaataaaatccgtgacggtacctaacaccgcttacgactaccaggcagcgacatatggcaccccaatcgaacccatacaaagcaccccacaaccacacaacagcgccagcgacagtgattacacgtccggagggattggcttgggcgatggagcaactgcatccgcaacagcagcggcagccacagcagccagcattgctgcaggagcagctgcagcagcaggatcagcaggatcaggatcgacagcccctggacgaaagagcagcatcgccgactatggactccaggataacgatgacgagaatctcaaggacaaccttggcctgggcgagaagcagcagcaacaacagcaacagcaggacgtggacaggcaaagggagcgagaggaacgcgaccgggagctccagcaactccgcgagcagcgcgaaaaacgggaaagggaacgcgagcgggagcgggaacgggagcaggccgagcagcagcaacaggcggagcagcagcagctacagtcgcaacctgtggcagagagcagcattaccaatgccggcagcgccaatctggccgcctataacaccgactacagtgcctacgatcagcagcagtacgacgccagtgcctatgatcccaatgcctatggccagcagcagtacgaggggcagcagtatgactacggcgatgcgggagccggatacgactatggagcagctgactatggacagtctggataccagtatgacgccacgccaggaggcaccgcagccggccagtcacagccgcagtcccagtaccagcaacaggagcgaccggagcagcagcaacacctgcagtttcaacagcaggagcagccggaacaggagtatccggaacgggccgaccacaatcgcgcccgggcagtggagctgtggggtcagcagctgcggctggagcagtcgccggcggaaaatccgctgtgccacaacagcctgccgcgtcagccgccggcaaaaagtagctggagtcccgactgcgaggatcgcctgacgctggagtgctccatcagtagtcccagcctgatgcgctcgtccaacgatgaaacctgctcggaattggccgatctcagcgagacctttgtggtcctggctgaaaatggttcgggggaggagagcttgtccccggcccagaccaccatcatcacagccagaaggtcgagtgcaccggccgtggtccagcaggcggacattgccaacgagaccgtcaccatcgagcgccatctagatgcccatgaatag

SEQ ID NO: 36474 - protein, 472 aa, DROSOPHILA
MNHSLEKQQLRATNEQLMSRLRQIWGKYKAQLPAHQGSPELSSEDMREEHPIKSVTVPNTAYDYQAATYGTPIEPIQSTPQPHNSASDSDYTSGGIGLGDGATASATAAAATAASIAAGAAAAAGSAGSGSTAPGRKSSIADYGLQDNDDENLKDNLGLGEKQQQQQQQQDVDRQREREERDRELQQLREQREKREREREREREREQAEQQQQAEQQQLQSQPVAESSITNAGSANLAAYNTDYSAYDQQQYDASAYDPNAYGQQQYEGQQYDYGDAGAGYDYGAADYGQSGYQYDATPGGTAAGQSQPQSQYQQQERPEQQQHLQFQQQEQPEQEYPERADHNRARAVELWGQQLRLEQSPAENPLCHNSLPRQPPAKSSWSPDCEDRLTLECSISSPSLMRSSNDETCSELADLSETFVVLAENGSGEESLSPAQTTIITARRSSAPAVVQQADIANETVTIERHLDAHE

SEQ ID NO: 36475 - DNA, 2667 bp, DROSOPHILA
tgcaaattacatacgttgacttatgcggttacacttgaagattttcttttaaaattatacacgacttatttattattattaataatgactaactttatcgtgcaataattaaaagcacttcataaacgaaaaaaaaaaaatagccacaaaggatgaattttaaacttgttcatctttggtctcaaattttttgaaagtacaaataaattgccgcaattgacgaagttgctctttaaagaaattgtcatctttgatggagcgtttcgtgttatggtacttatcggtatttcacatacgatgtgactaatgtgaactcaacccacgcaattacatagtcatattaaaataagattccgtttttgaaagattgtcatttcgtgacacattcacccccaaaaaaaagacaaaagatgtaatcagcattcttacgcatccagccacttcctcgtttactaattacgcgtcagcactaaaaaattgccattttcaattggaatttcaggcgggaacaggccggataagcttttcgtggaacattttcgtgttcaagtctggtcaaagcctaatgctcaattaacacaaattaaatttattaaatgaccagcgggccagcagacgataaagttcaattatttattggaactgccaaaatacgagcaggccaaatcataaagaaaaaagcagacacgaaatgcgttttcccccaccagttttccaccgacggagaaggagatggcgacggtacggagaatgaaaagcgagctgcaaatgaattggacctgaaacgcgtgtagccgtgcgatatacccatacacggacggactcttgtggcacggacatgaagcgccccaaacatgcaacaaaatttatgcgaagctttaacgaaagccagacggaggattgaaaagcgtgtgtgggggggggggggggcgcgttcagcagacacagcacaacaacacttccagaggcatatccattggccaatcgcagcacggctgcctcatggctctgactccacctcaaaatggggaccagcattgtgtggcacccgaaacgggtttccgttgcaagctgccccgtcggcctgcagcggcgtcctgctgatctccaggcgcgatagccacagccataggaggccatagcccgggtctggtctggtttcgattgtggttctgattccggggtgtggcgtggcgtagcgtggcgaggttttgggccggggcagaagccgccacttcgtcgcagcagggtcaaaagtggtagaatttgtaatggtggccaagagtatgctgcaggccaacagcagaggcgccctacagggggtttgtttccaactggattaatgagtaatcagctaaaaatccttaacgttatattttttttaacttgaataaattaataccaatattattatttgtggtgaatttcggaacctgcgaatgtataaaactaggttgcctttccttaacaccccctttttcacagttttgtcaccaccatcgaactgcgccccgttctctgccccttttctgtggcgcccaaaaaaatgggctgtggcttacgaccaggtctgattcggatttcgcctccgacaccgactccttgaggtggcgtggcagctctggctctttcgcctccttctggcctcttatccagcgcactgccattgcaattaattttggcattttgacatttacgctttttgttggatgtggctgtggttttctggcccctatctcaagcatacgcacatacatttttgttcaggtatgctggcgctcgataacaagacattttgcctatacaattccgagcggaattttctcacgttgaagggtccgcgaaagcggcgccagttgtgaaaaggggcccaaagaagaagtcgtccctttaattgcaactggttgggaccactttttaagggcagcatttgaaatatttccccctccagtgccgttcgataaactaatgaaaagccctgcaggattttcgcggccgcctaattgaagaggatgccaatcatagatttggtccccggtttcgatatgagcgatggtcatcgtaagtgggtgccatacattgtaattattatggccaatatctgggttctctttcactttagttttgtggttaatttggcgacggtgaacaaagttattaagttgttaaccataaggttaatggtttctttatagcttattaaggaattccttggtgaatgatgctaacataatgagcgcggcttattagttactttattgtttatcgatttgtgatttttattgcattttggctacttctattgtatgcaattgcaactacaacttcttgttgtgggtagcataaccaacaatcgttcatatgtaaaactcttttgaatacaaaccaatccgaaatgatatcactaattattccaattgaattcacacgaccaacttgcctgtccagtgcattcaagagcgggccaaaagagcggccaagacccctggggattacaatatcacaaagtggcctagctggatcgtgatcatgatacgactggaggagtgccactgcccctggcgacatttaaaagctgcaagtgcattagtgtgaggcaaggatcgaggcgccgtctaaattacagtcggcaagaggcatcgcgatcaagatcaagtaccattttca

SEQ ID NO: 36476 - DNA, 339 bp, DROSOPHILA
atggcagtgcgctggataagaggccagaaggaggcgaaagagccagagctgccacgccacctcaaggagtcggtgtcggaggcgaaatccgaatcagacctggtctggcggcttctgccccggcccaaaacctcgccacgctacgccacgccacaccccggaatcagaaccacaatcgaaaccagaccagacccgggctatggcctcctatggctgtggctatcgcgcctggagatcagcaggacgccgctgcaggccgacggggcagcttgcaacggaaacccgtttcgggtgccacacaatgctggtccccattttgaggtggagtcagagccatga

SEQ ID NO: 36477 - protein, 112 aa, DROSOPHILA
MAVRWIRGQKEAKEPELPRHLKESVSEAKSESDLVWRLLPRPKTSPRYATPHPGIRTTIETRPDPGYGLLWLWLSRLEISRTPLQADGAACNGNPFRVPHNAGPHFEVESEP

SEQ ID NO: 36478 - DNA, 3792 bp, DROSOPHILA
tacgaagaaacgcatacgtgtatcatttttcccagagaataggaagtgagggagagggggcggcacttgtttgccggctactcacgaatctgtgttccttgtttttctgcgctttgcagaactttttgaaggccgtttcgatctgtttgtagtccttcttggtggagtcgtccagcgaatctgcgaaccgcctaaccgtcttgacgcaaactgcggaacgaaagaatggagcccggtgaaaatctgttccagaacatctcaaccacttacgtggccaatcacataccttcgcagtcctcctctttcagggccagcgacgtttgggccaacgtcgccaggaagccgatcactaccaccatgtaccacgtcttcattttgttattacttcgactgtgcttgagcgtactttaattaactgtactgaattctttgcatgcgatttgattttgtccccgaattgttagcgttaggtggccgtagatatgggtgttcaccgataggtcaggcatcgataaaagtactcatttatcggcggggcagcgccacgttttcaaattggaaaacaaccgatatggtcatactatcggggtccggaatttactggctaacaggtgtggggatcgctcagctgctccgttttacgcagaggcactcctgctcagttttcaatcacgcgcgaatgcgaacggaactgcgcgtcgtggaattatttaaattagttaaagctaagcaaatatgctcgactgcacgttgcccgtgacgtagtcttggacttaatcctcttccagtcccttaatatagcaccgtatctgtgtaatcgccaacagtattgaccaagtcgtccaagtgctcactactccctcggctatttggagttattgtaaccgttggcaactgccacagcaaacgtatttacaattatccggataaaatttgcaattacacaccttgctaaaaataaaacggaaaagaagcagcccattataataaatcgtttaaaatgcctgatgtgaagttctttgccgtgctgcccaccaatgccagtacctcggatcgagtaacccggctgtccatcagcggcaacctgctccaggatccccagcagtgagtcctttgatatttcgcgtttaaattccgcgaactttaagaaaatcgattagccacttcccgcgaactgaggtggagaaattgcctctttgcgtgctgaaaatataaatatagtgttcttaaaatcgtttacgtatgtgacccgattagacgaaatactcaccaaactcgcgaacaatttatggcgcacacaaaaaacatgcaaatgggctcatgaatttaaataatttatacttcttctgccagatgatgtttgttttttataaattccaaagacctcttatgagtttatgatctattagggcgataaggcggtggtgatgggaccataaagaaatctctgccagatgtatacgtagtcgtctggttttactgtatcaagtccatcgtatatgacatcaccagactaaaattgaatcagacacgcgctgaagatgccggctatgaagaaaacaacaagccagttggatggcaaagaataataccatgaattatgtatgcttgagggtgggaagttgttaatcagcttatgaatgaatggtcaaatgatgtccattaatcagaaccatcagttacatcactcaagaatccgggtttctaattgaacaatttcaacgcaattgataaatcaagacaatacatttcttatctgttctttagatcgataaggttctagtgatagctacctaaatgtgtcatgataatattccgtgacactagtagctcttgtatttcgataaggggcataacttactggaaattccatagcttgactaacggatttttaacaataaatcgctgaaaattccaattccgttccttgaatgcgctgcacgttttcgcgcctactcacactcactattaatgtctgggagctccggtccccaaaaacgaaagaaaaaaactcaccgaaccagcatgtgccatttaaacaattctgatgactaagcgcttgagggggtcaaacaatcaaataacgacgtcattagcactgatatgtgataagttatatcgctttaagcgagggtactactagtgcttgtgattttattgaatataaaatatgcatatcatatttacttcattcacactttgctatttaccgcctttgatcaaatgcatagtgaagactatgtcgctaggcacgtattaagttaatttttagctagtagctagttcattagcacctaagtgagacatatacatctgatttttttaacaagcatttgtatgtttacctccgctacagattctcggtgaactttgtcaacagtccggactgcacggacaacatcacataccacttcaaggtggtgattcccacacagacgattatcgagaattataagcggaacggcgagtggagcagcctgcaccaggagaagtacctgaacatcttcgacggtacaggagctagcgataagaaccccaatatgacagaaagctttgcccgcattataaccgaaattgacgaggcgctccaactttcatccacagagtcctccttttgccttgagttcgccttcgactacgcaaattcaatgatgcgggtgtaccagggtagggattcgggccacaatttcataaccgagtacgagactctcttctccctgtccgacatccaggctgtacaggtgtggggcgatgtacagaaggtcaaccagtttgccctaagctacaactgatcgggagaagaatcccaaagatcccatgatccccaaggtagcccgcaatgttctcttatttaatgcattctttcttcaatcgcatagattcaagttcggtggcgggcgtccttagtcctaacaccgcacgaccttaatcccctcacctgtagttttaattagtttgttggattccgcacccatctaaatcacttcgctgcagtagcaacacgctttcactccttcgcttgttaatgcgttgagtatcattataatttgactacaagttcttgttgatcgtgggcttaagaaacattttcccatcaagatgattgtggttttttaacagtattaaaccaatatttatttatttgcaaaaatctcaaaaatttaattgaaacacctgttttctttacgttctatgttaaattgtttaaaattttaaaagtactcaaaattttaattggcatttgaataggttttatgccccatttcttgcaacataaggcaatatcattttcaatagtattgctggattgcagcgttttccacttatatctttatgatgccgtaagagtttgataatattccattgtttgataaaccaaatcagcattaacaaacacacattcacggactacatacatacatatatatgtcagtcacatatcactcacctcggtgctatctgtcttatgacgtcactttagctctgctatgtcctattgctatcctttgcagttgctaattgtttctttgtttgtagttgatagcaaacgtatttgtaaggccaaagaattttatgtataatacaccttgagtttctgtttcgcgcttgctaaagtcttccattcagattgtaaacctacaatgtaagtgttagctttacctgtaatacctacatacatatgtatacagaccacgccaagtattaaaaatcgcatgacaagtgcgttttccacaaattaaatgcgtaaacacaaattcattggaattggtattcttaaatgctaataaattt

SEQ ID NO: 36479 - DNA, 540 bp, DROSOPHILA
atgcctgatgtgaagttctttgccgtgctgcccaccaatgccagtacctcggatcgagtaacccggctgtccatcagcggcaacctgctccaggatccccagcaattctcggtgaactttgtcaacagtccggactgcacggacaacatcacataccacttcaaggtggtgattcccacacagacgattatcgagaattataagcggaacggcgagtggagcagcctgcaccaggagaagtacctgaacatcttcgacggtacaggagctagcgataagaaccccaatatgacagaaagctttgcccgcattataaccgaaattgacgaggcgctccaactttcatccacagagtcctccttttgccttgagttcgccttcgactacgcaaattcaatgatgcgggtgtaccagggtagggattcgggccacaatttcataaccgagtacgagactctcttctccctgtccgacatccaggctgtacaggtgtggggcgatgtacagaaggtcaaccagtttgccctaagctacaactga

SEQ ID NO: 36480 - protein, 179 aa, DROSOPHILA
MPDVKFFAVLPTNASTSDRVTRLSISGNLLQDPQQFSVNFVNSPDCTDNITYHFKVVIPTQTIIENYKRNGEWSSLHQEKYLNIFDGTGASDKNPNMTESFARIITEIDEALQLSSTESSFCLEFAFDYANSMMRVYQGRDSGHNFITEYETLFSLSDIQAVQVWGDVQKVNQFALSYN

SEQ ID NO: 36481 - DNA, 4130 bp, DROSOPHILA
gagcttctagtatgaggggaccatctctccttataagtaacccattcaagcccaactacttaaattgacttcaatttatttagagacaatacaattaccgatcttcgtatgtgtatttaaaagaccacattacctaaaccctttttatagcctattacgagtaacgaaaattaaatgaataggcctgaaatcttattgccaatagctttgtttattagatattatggttataatttcagtctcttgcagttttacttgcataattaaataattatttactatgaacaaacattcttaagtttaattcaaatttaaacataagttactcaactttgacagagtgaaaggaactcgcatctatgagatataattgggagataagaaggcttccgaatataatctgtaatcggccacttttgatggaggcttttggagtcccaagactttcgcagtagccaaataaatgacaccaagatcgatatcggcgaatactcgtgcccagcatgtgtgaatgtgaatgggaatgtgaatgctgtaagcataaggtgtacattttgggcttcagtctgggagttggggtcccagaccgcaggttggattcggatgctgccctgacttgggcccaaagtgatgaattgacgcgatgtcataacttggcacatggtgccacggcttcttgcatcagtcgacctgtgctgctgtgtgaaatgtcaactttatttttagtcggtttttgtggaaattgttgttgtttccctgtgatgtgtctaattataatgaaaaaatttctcgtcgacagtagcaaattatagcccaatgacttatcgaaatctgccactggatctacacctatgtatgtacatgtgcagaagcttccgctcagtccgtgaaaaatattttcccagcattccgaacaatctatgaaatcatggatctctcaacaaaaaaggttgtgtaaggtctattggacaagccaaatagaaatccaaaacaactcgcaatggaagtttctgttgagacttactgaccagaatgttttgtttaagatgtgaatcaaatgtttcattcttagtatttataaacgcattcataattaagaaattaattaaaggttgtagtaattaaatataaatattatctttttaattgaaataattatgattattataattccctgcaggctcaaaatgccatcccaaaaacgaatcctgcctcgctgctgatacagaagacatccttctcctgcgccggacgtccagccggatattatgcggatgtggagacgggctgccaggtgtaccacatgtgcgatggcctgggtcgccagttcagctacacctgcccaaacacgacacttttccagcagcgaatgcttatctgcgaccactggtacatggtgaactgctccaaggcggagagcaactatgctgccaatctcctaattggtttgtattatatcttaacgtatcatattagatttgactacaaaatctatttcacaggtcagcgggacaagcccttcgtaaacgacgaggaaaacagcttgcgcactccaagacccgatcttctggatcgtccttatgcgcccgactattccggcgagtccttcagaagccaatataaggtgacggtttttttatagtttgaaatgattatgttcttaaatatttgtactggcttgttctttcagcagtttacttccaaccagaatcagatacgtgatgagtccgtcaaaggagccggtgcgggtaaatcggatccccagatatcgcagacgcgttggcgcattccaccacccagccggacgatccttccaccggcctatgaaccgcaaatcgagctgcccagtgcccaatcggccaagcccaggatacccattatcactagcaccaccacaaccactcgagcgaccaccaccacccgaccaacaaccacaactcgtgccaccaccacaacaacaaccactcgaagacctccggtaaccgccaggccgaaggaggccttgcacaacaggcggccaaatttccaggagcatgatatggatgacttgggcaccagccacagcacacggtacaacacctcggcagacttcaactcggcggagtcgccgctccgtgaaacgaaacagtccagcaccaagctgaccaagttcatcaagccgccgtccaagatctatgagccaccctttgtgtaccccatctacaatctagaagagtcccagacccagaacgcggcagtcgccaccacactgcgcacatcaacggcggctcctttcagtcctgttccaagtcgcaaggaggtcagcaccacaactccacgaccactgagtcgaccgacgaccttggccggtgtacccttctcctctgccacacacccaactacggttacgacggtcggagtaccgccacgcagcgataatcggactccagctccggcccagagcttccgcctggccacgcccaccagcactgcagcaccaccatcgcgcccggcacagttgcccttcaacgatttactgccgccgttcgttgactttgtgccccacgatatagccaccacccaaggaccgcctatctattacgaatggaaggtgccctcgaacggtcttgagcctcccaaattagacccacccattggtgtggatggacgtgagtatcccgagaccactggagactacggggtcaccagcaagcaggatgtattcaacacccgactaaacgatattggaagccatcaaaagaagccagtccagataacctcgccgctccaacagtcgagcacaagccatcgtttggccatctcgagatccattaagcccaaagaggagcaggaatcggcacagcggcgatccgatgtggtggccagctccacggatataagccatctgcgcaagcaattcctcattccggagtacgccttcccgctggaaaccattgggcgcacgggttatggtcctggtgcaggagcagcggctgggggctccggctccagcaacggcgatctgtataactcgttccagctgaagatccccgagcagcgcgctaagtggttcggagagaaccccaagtgcccggagtgccatccttcgttcgttctgccgggcacctgcgagccctgcctgcgcagatagtcctgattccatatccattcccgtctccgtccgtcccatcgcccattatccgcatccgcatctgctactagccctagtattagcttccgctgagaagtcccggagtgaagcatccacgcatttattgtatatccgcagattaattattaaactacacaaatatgtttgtgaatgatttatttcgcctgtggtcgtgggtcatttgtgtaattttatatgcaaagaatatcttttatgagttaggctaagatatttcatggggtaacctaaaaaatttgattattaactcttgatagccaatttttcacagttgttaaaattgagacaccactgaaactttcgaactcgaaatttgggcagtcacaccgtaatgatatttctgtctttatggtttttagatcaatttttcggttttttcaaaatttattcagatcagtaaaatacagtattatgggggactgcgcagatgcaaaattagttagtcgagttacggtgccaccaataccgaaacttggcgacatgcacatgtattgggtgtggcgaatgctgattaaatcatatttggatgctataggtctttggtctggaaatcacccaaaggaggtaatatatatactgttaataaatatggtggttaaatctgcacaattcgttattttaagagcgcccatacaaaatttgtgctgctgagcacgttggaaatatgggttgtaagaagggaatacgatgaaatgagcagcaggtccattttcgaagatctcgaggaacgatatgctatcactaacaatgacaaacgaggtcagttggcaatggatagatttatttaaaatcaataagatttgtttttattagactctatgtacaacttttgattgctgcctggattactactgtagtgtaataaatctcaaacttcaatatataattatatatatttataaatttggtgaaaattgtcgatctcggacggttggatattatattcatttaaaatttgtca

SEQ ID NO: 36482 - DNA, 1896 bp, DROSOPHILA
atggaagtttctgctcaaaatgccatcccaaaaacgaatcctgcctcgctgctgatacagaagacatccttctcctgcgccggacgtccagccggatattatgcggatgtggagacgggctgccaggtgtaccacatgtgcgatggcctgggtcgccagttcagctacacctgcccaaacacgacacttttccagcagcgaatgcttatctgcgaccactggtacatggtgaactgctccaaggcggagagcaactatgctgccaatctcctaattggtttgtattatatcttaacgtatcatattagatttgactacaaaatctatttcacaggtcagcgggacaagcccttcgtaaacgacgaggaaaacagcttgcgcactccaagacccgatcttctggatcgtccttatgcgcccgactattccggcgagtccttcagaagccaatataagcagtttacttccaaccagaatcagatacgtgatgagtccgtcaaaggagccggtgcgggtaaatcggatccccagatatcgcagacgcgttggcgcattccaccacccagccggacgatccttccaccggcctatgaaccgcaaatcgagctgcccagtgcccaatcggccaagcccaggatacccattatcactagcaccaccacaaccactcgagcgaccaccaccacccgaccaacaaccacaactcgtgccaccaccacaacaacaaccactcgaagacctccggtaaccgccaggccgaaggaggccttgcacaacaggcggccaaatttccaggagcatgatatggatgacttgggcaccagccacagcacacggtacaacacctcggcagacttcaactcggcggagtcgccgctccgtgaaacgaaacagtccagcaccaagctgaccaagttcatcaagccgccgtccaagatctatgagccaccctttgtgtaccccatctacaatctagaagagtcccagacccagaacgcggcagtcgccaccacactgcgcacatcaacggcggctcctttcagtcctgttccaagtcgcaaggaggtcagcaccacaactccacgaccactgagtcgaccgacgaccttggccggtgtacccttctcctctgccacacacccaactacggttacgacggtcggagtaccgccacgcagcgataatcggactccagctccggcccagagcttccgcctggccacgcccaccagcactgcagcaccaccatcgcgcccggcacagttgcccttcaacgatttactgccgccgttcgttgactttgtgccccacgatatagccaccacccaaggaccgcctatctattacgaatggaaggtgccctcgaacggtcttgagcctcccaaattagacccacccattggtgtggatggacgtgagtatcccgagaccactggagactacggggtcaccagcaagcaggatgtattcaacacccgactaaacgatattggaagccatcaaaagaagccagtccagataacctcgccgctccaacagtcgagcacaagccatcgtttggccatctcgagatccattaagcccaaagaggagcaggaatcggcacagcggcgatccgatgtggtggccagctccacggatataagccatctgcgcaagcaattcctcattccggagtacgccttcccgctggaaaccattgggcgcacgggttatggtcctggtgcaggagcagcggctgggggctccggctccagcaacggcgatctgtataactcgttccagctgaagatccccgagcagcgcgctaagtggttcggagagaaccccaagtgcccggagtgccatccttcgttcgttctgccgggcacctgcgagccctgcctgcgcagatag

SEQ ID NO: 36483 - protein, 631 aa, DROSOPHILA
MEVSAQNAIPKTNPASLLIQKTSFSCAGRPAGYYADVETGCQVYHMCDGLGRQFSYTCPNTTLFQQRMLICDHWYMVNCSKAESNYAANLLIGLYYILTYHIRFDYKIYFTGQRDKPFVNDEENSLRTPRPDLLDRPYAPDYSGESFRSQYKQFTSNQNQIRDESVKGAGAGKSDPQISQTRWRIPPPSRTILPPAYEPQIELPSAQSAKPRIPIITSTTTTTRATTTTRPTTTTRATTTTTTTRRPPVTARPKEALHNRRPNFQEHDMDDLGTSHSTRYNTSADFNSAESPLRETKQSSTKLTKFIKPPSKIYEPPFVYPIYNLEESQTQNAAVATTLRTSTAAPFSPVPSRKEVSTTTPRPLSRPTTLAGVPFSSATHPTTVTTVGVPPRSDNRTPAPAQSFRLATPTSTAAPPSRPAQLPFNDLLPPFVDFVPHDIATTQGPPIYYEWKVPSNGLEPPKLDPPIGVDGREYPETTGDYGVTSKQDVFNTRLNDIGSHQKKPVQITSPLQQSSTSHRLAISRSIKPKEEQESAQRRSDVVASSTDISHLRKQFLIPEYAFPLETIGRTGYGPGAGAAAGGSGSSNGDLYNSFQLKIPEQRAKWFGENPKCPECHPSFVLPGTCEPCLRR

SEQ ID NO: 36484 - DNA, 3063 bp, DROSOPHILA
tttaagatagactagaagttttagtattacattggaagcagccttatgcttagattgttgctaaaattttgttattccagttgactaataaggtggtacatactctaattccttttcattttaaataaaaactaatttgacgaatttgagctcaagtctatatatatattagtaaagaagtatgttttttgaaccttcgataatggaagccacaaattattgttctaaaatgtgggtttcttatatttcgcatatgttcatttttataacaaggttttacttttaattttactgaattgtctatagacgccagtgctgttttgtagtcagttttcaagtaaatgttctataataatctttaaaataacggtcaatacaggtttaaaatttgaggaatgtccctattgtcggccttttgtgtgaatgccaactgcacttggaaatcagctgtcgcttgtttttgtttcgtgacataaccgcaatttactaaaacttagaaacttaacttaaattatttcatgaaaagcatagcaaactaatattaactatgtcccacaagtacacggagctgattaaggtcggcacgcagtatgctcgccggatgaactacctctcaaatcgcattttcggcgaagtggctcgcaccacaaacgagaagtccatgaaggtatgttctcgaaataaatttattaattaaaatgtaaacatgttttatccgaccttccccaggtggttcgcatgttctcggaggaaccaattcacaaacgggactacgtgatcaactggtatccgcggcacgtggagacgcacttgctgatgaagaaccttcgcgactacggactgttccgcgatgagcaccaggacttcaaggaggagatgaagcgtctgcgcaagctgcgcggcaaggcgcctcccaagaagggcgagggcaagcgggcctcaaagaagtagtaaaataaatattctaacatccacttttattgaaccaaagctagtctttttagttgcgagtcagcaacttggcgctgccggcgaacaccacctcgtcgttctgccttatatcgtactccacggtggaaatcttgcgagattgtagcagacgtacggtcaccacggtgtcggtctcaatacgacagggtttcagaaacttgaaattctgctctagaaccacggtgcccggaccagggagctgggtacccattataccagccaccaccgcgttgagcagggctccatggacgcggcgctcctcggtgggcgtttccagactatggatgtagttgtggtcgccggtgaactgggcaaactgctccaaatcgctttgggaaaaccgcttaaccacttgcacctgcttcactgctttgctgctcagctgtcggaacgtttggggaagccttttgcagctggacaacctctgtgcgtgttgcgaaatcttgcagcagcaactgacaaagtttaacgatgcgttcatcgtgggccttgacccgccactcttgcaccgtccttagcaccgcagggctcagaagtaaatcccgttcagtccgttcaccaaattccagtaattggtaaaagagcgccaggctgtgaagtactatttccgggtgatcagtgcgcacaaagaggccggttagcagttttagctgctctctgataaatttggcagccgttttgtctgcaataagaatatgatgaacaaggttggtttgaaaatcaaatgtttgcttacccaggcaaaggttacacaatgccgcaattccgtgcacttttaatagctgatcctgtgtctccagcgatgccacaaatacatccaaggcgtccgcctccaggagatgcgaccagttgatgggatcgtatgcaaaattggccaaattagcagtcacctgctgctgggcctctaataatgaaaatcaaaaatgaattcacaccggcaaaatgacgtgaataaaaaccttaccgatgttggttgtcgtataatactcatcgaccaggtgaccaatgtactcccggcggtcaatgccctgggcaggcgtcctcctcttcaatgtcctgtggctggagaacataaaaaggatgcgaaggcaaagctgcgatttgaaatcagtcccaaaatgccattcacaacgcaaactattcatgttttaccattcacatataaacgtgctgaaatacattgggggcaaaataatagctttcggattcaaagccacatttataaaagttatttgtttcatctcatttttttttataatgagcaattgggttgttgtacaaaatcacacatgaatttatttgaaaacataataattttatttcgaaataatatatgacataaatattttttagaaaacgttaaacattttaatcaattccttttccaataagtacatttatacaagaagcgaaaaatacaatatttcaaagattaatttattaaaccaagtttagttctttaaaggtaaaccaccagcaaaacgtcctcattacgcaggctcctcctcctgacctgaagccttaactctcctccttgctgggactgtctttccccaagaactctgtgtcattggaattgctgaagtggctcctggcagctgcaactgactttggtgggatgttgaacagtgggtgggtaggcagtagctcgttaatggtgtcgcccaggacctgggggctgctggcgcactccgagtgctgggcaatggaaacgccactaagagtatagcatgtgtggtagagatcctgcggtctgaaaatatgggttttacattaaaaaacatcacaatgttggcattaatcccttactttccgggtttgtcgataagcccgccgctctgcttttggcagcagagcaggatgtactcctgcagggcctccacatcgaaaagggtgtgctccatttgcttatcgacgccggatagcgttgcctgcgtaatgggaatggtggctcccacccagaaggagtagcagccatcaaccagtttgttggtcctcccttggaagccgccttcgtaggtcatctgacggcgcagtgtccatttgagcaaagcctgcctgtcgcacttatca

SEQ ID NO: 36485 - DNA, 861 bp, DROSOPHILA
atgttctccagccacaggacattgaagaggaggacgcctgcccagggcattgaccgccgggagtacattggtcacctggtcgatgagtattatacgacaaccaacatcgaggcccagcagcaggtgactgctaatttggccaattttgcatacgatcccatcaactggtcgcatctcctggaggcggacgccttggatgtatttgtggcatcgctggagacacaggatcagctattaaaagtgcacggaattgcggcattgtgtaacctttgcctggacaaaacggctgccaaatttatcagagagcagctaaaactgctaaccggcctctttgtgcgcactgatcacccggaaatagtacttcacagcctggcgctcttttaccaattactggaatttggtgaacggactgaacgggatttacttctgagccctgcggtgctaaggacggtgcaagagtggcgggtcaaggcccacgatgaacgcatcctgagcagcaaagcagtgaagcaggtgcaagtggttaagcggttttcccaaagcgatttggagcagtttgcccagttcaccggcgaccacaactacatccatagtctggaaacgcccaccgaggagcgccgcgtccatggagccctgctcaacgcggtggtggctggtataatgggtacccagctccctggtccgggcaccgtggttctagagcagaatttcaagtttctgaaaccctgtcgtattgagaccgacaccgtggtgaccgtacgtctgctacaatctcgcaagatttccaccgtggagtacgatataaggcagaacgacgaggtggtgttcgccggcagcgccaagttgctgactcgcaactaa

SEQ ID NO: 36486 - protein, 286 aa, DROSOPHILA
MFSSHRTLKRRTPAQGIDRREYIGHLVDEYYTTTNIEAQQQVTANLANFAYDPINWSHLLEADALDVFVASLETQDQLLKVHGIAALCNLCLDKTAAKFIREQLKLLTGLFVRTDHPEIVLHSLALFYQLLEFGERTERDLLLSPAVLRTVQEWRVKAHDERILSSKAVKQVQVVKRFSQSDLEQFAQFTGDHNYIHSLETPTEERRVHGALLNAVVAGIMGTQLPGPGTVVLEQNFKFLKPCRIETDTVVTVRLLQSRKISTVEYDIRQNDEVVFAGSAKLLTRN

SEQ ID NO: 36487 - DNA, 3449 bp, DROSOPHILA
aaccgaaacatacccgacattacatattcgcaaacgcatttaagacgaacgcaaaatttgcaattaaaaacgtaaatgtaaaatggaacttaagtcttgaaaccaaacaaagaacaacataaagtagcataattttttatacgcaacttttattgcaaatgtaaagggacgaataggagaaagaagaagctgacatcaattttgatcgattcgtaattatattagtatacactaaaagaattggctctatttcaattaaacttaaacgtagataaaatacaaaatgcatattattgtgcaaggtcaaaacgacttgccaaaataaacgtaaacagtataataaataaaaagatctagatatttagagaagcggagaaacaataacgatacattagcgctttaccaatcggttaaattcaaagagcaaaccctactatacgttttatgttttatgtgtgcacgtttaatttgcttgaaacctaagtcgtaatctatattctaccattatttagatatattttgcaatttaccacttaagtcaattttatacacagacccaaatccatttagtacacgtagtcgtccccatccacttcgatcattgaagatggccctcacaattgtatgtatttagtttaccttgcactgtaatttttattttgtgttgttaaatatatcgttatttacttattcgaccaaagctttctgttttataattatttacattgaggctgcagttaaaataatagcaattgatttacaaacatctgagtgcaaatacttgcatacattagctactcaaatgagcagtggaagtggttcctttgctacacttattttcaattatgaaaataaacgaccttaaccgtacgtaaaaacaacaaacacactaaaaattcaaattttctgtaagagttacaaacgactaatatattaaggtatttatttatagggcttaattaatgaagcttttattttgactgcacctaagacttgtccattacagccaaacatcctcgcggtatttgtcctgcttcctcagtttttttaacagctgcgaagcttcttcttcagtgagatgcatagccttctgcaagcaacgacttaaaacacctgcaatggactgcgaaatcttggcgccatcggcacaaatgtacaacacagtctctgacttcatcaggaactcgaccagatcctcacagtcctcctccaacatatgttgcacgtagctgggggattcgcctcgcgagtaacacatccgtaggcgctcgagcaacgaagattcctgccactccattagtttttcacgcttaagaactgcttctggggtcttggcaccaatgtagagccaggattgcccgcttggctgttgcggctgctgttttataagctcttccttgtgggctaagaatccaagaaaaggcgccagacctgtgccaacagcaataagtatttggtttctgcccacatcccgctctgtgtaacggaataggttgctcattcgtgggtagataactacttttttggaatgctccggactgctttgctgtgcagccgcctccaacatgctggttgtgactccaggtttgaggctgagcagcgagtagataacgcgaagttcgcgattactagcctccaagggactgttggcaatggagtacggtcgcggcagcagccgtggcaagtgctctgccaggaatgccagtggtggcctgcagttgacgcacacttcaagaatgtctatgaaaagcaggccttgctctaatatcagcgattggtagtactcggtggcctgtttagaggacagacaggacaggaaacaacgctctttgtcatcgcttgtaaatccggccagggcgctgaggagctgcttctgcggaacaaaattaagggagaggcagtgggtaaggatctcccggggagtagtagttgctggaatgtgggcgggtagcttagcattcttattggcgcagttgaacaccaactttaagtggcaagtggtgtcggcctggtctaacagttccagccgatggagcagactttccacttgttcgagtttattagcaggcaaaattccaatggtatccccgggctggtaatcgaacgtggactccagagtcagctccaccacgcgttttgtctctgtagccttatcagcagacacgagcaccttgctctcctttatctccactgaacttggctggaaatcagggcgggcgaatgggaactttaaaatatcgcagcatttaagttggccgcatgtttcggtgggtctctacaaagataggcttgaaaaggctattctcacggtagctcctaactcacctgctcttcgtccgtgaaacacaactccagattaccgaccagcggcttggcggggatgtattcactcaatttataagctcctaagtccatttttcccgtatttaccaattcgcatgggcagcagtcaaatcgttaacaagcggtagtgttggaaagagtttatttacagcttcccttatcaagggaagctgtaaaagattaaatgtttattttaaattggtcttcatctttgccaaatacaacattaaggattatccttaaattatttgttttaaaaattatctgtacctaacatttcttagcttgggaaggtacctaatcagaaacctacctttgtcaacactgtacgacatcggtgttatcgatatgcacagttatcgttagcatgaggagctttatttgttgctgaacaacaaaccgaaatctccagtaaattcggtaaggatcaattttaaaaagaatggcaggcaacgccaacagtgacgacgaattccatgatgcgatcggggaggagataaccgaaaaagaggccaccagcacgcggcagagcgaaaaggacgtggatgagatcgtggagaagcaaaaccagctggcgttggatgacgaagcggaacagggcgcggctggtggagattccatcgcgacaccaacgacagtggactctgagctaaccattgaggagttgcgcgaacgggagaaggatctcagcccagagcagctgacagctaacaaagaaaaggccgataagctgaaagttgagggcaacgagttgttcaaaaatgacgacgccgaaggcgccgccaagacctacacagaagccttagacatttgcccctcggccagctccaaggagcgagcagttctctacggaaacagggctgctgccaagattaagctggaggccaacaaagcggccatcgacgactgcacaaaggctatagaactgtggccggagtatgtgagggtgcttttaaggtctttattttaatatctcccttaaaatttctaaagtctaattacatcttacaggcgcgccaagctctatgagcaagaagacaagcccgacgaggctctggaggactacaaaaaagttactgagatcgatcccggtcagcaggaggctc

SEQ ID NO: 36488 - DNA, 1399 bp, DROSOPHILA
ctgctgcccatgcgaattggtaaatacgggaaaaatggacttaggagcttataaattgagtgaatacatccccgccaagccgctggtcggtaatctggagttgtgtttcacggacgaagagcagagacccaccgaaacatgcggccaacttaaatgctgcgatattttaaagttcccattcgcccgccctgatttccagccaagttcagtggagataaaggagagcaaggtgctcgtgtctgctgataaggctacagagacaaaacgcgtggtggagctgactctggagtccacgttcgattaccagcccggggataccattggaattttgcctgctaataaactcgaacaagtggaaagtctgctccatcggctggaactgttagaccaggccgacaccacttgccacttaaagttggtgttcaactgcgccaataagaatgctaagctacccgcccacattccagcaactactactccccgggagatccttacccactgcctctcccttaattttgttccgcagaagcagctcctcagcgccctggccggatttacaagcgatgacaaagagcgttgtttcctgtcctgtctgtcctctaaacaggccaccgagtactaccaatcgctgatattagagcaaggcctgcttttcatagacattcttgaagtgtgcgtcaactgcaggccaccactggcattcctggcagagcacttgccacggctgctgccgcgaccgtactccattgccaacagtcccttggaggctagtaatcgcgaacttcgcgttatctactcgctgctcagcctcaaacctggagtcacaaccagcatgttggaggcggctgcacagcaaagcagtccggagcattccaaaaaagtagttatctacccacgaatgagcaacctattccgttacacagagcgggatgtgggcagaaaccaaatacttattgctgttggcacaggtctggcgccttttcttggattcttagcccacaaggaagagcttataaaacagcagccgcaacagccaagcgggcaatcctggctctacattggtgccaagaccccagaagcagttcttaagcgtgaaaaactaatggagtggcaggaatcttcgttgctcgagcgcctacggatgtgttactcgcgaggcgaatcccccagctacgtgcaacatatgttggaggaggactgtgaggatctggtcgagttcctgatgaagtcagagactgtgttgtacatttgtgccgatggcgccaagatttcgcagtccattgcaggtgttttaagtcgttgcttgcagaaggctatgcatctcactgaagaagaagcttcgcagctgttaaaaaaactgaggaagcaggacaaataccgcgaggatgtttggctgtaa

SEQ ID NO: 36489 - protein, 454 aa, DROSOPHILA
MDLGAYKLSEYIPAKPLVGNLELCFTDEEQRPTETCGQLKCCDILKFPFARPDFQPSSVEIKESKVLVSADKATETKRVVELTLESTFDYQPGDTIGILPANKLEQVESLLHRLELLDQADTTCHLKLVFNCANKNAKLPAHIPATTTPREILTHCLSLNFVPQKQLLSALAGFTSDDKERCFLSCLSSKQATEYYQSLILEQGLLFIDILEVCVNCRPPLAFLAEHLPRLLPRPYSIANSPLEASNRELRVIYSLLSLKPGVTTSMLEAAAQQSSPEHSKKVVIYPRMSNLFRYTERDVGRNQILIAVGTGLAPFLGFLAHKEELIKQQPQQPSGQSWLYIGAKTPEAVLKREKLMEWQESSLLERLRMCYSRGESPSYVQHMLEEDCEDLVEFLMKSETVLYICADGAKISQSIAGVLSRCLQKAMHLTEEEASQLLKKLRKQDKYREDVWL

SEQ ID NO: 36490 - DNA, 3217 bp, DROSOPHILA
ccgcgccggagacctctgccagtgaggttgcaccacagcgcgcaactcggtcacgacgaaagtaatatcacatctattttatttataagctttgtactaatctgtataattttttgagttcgtttttaattttacgttaacttgtgtaaaaaaaattcatttatgtatcaattaatgaaggcgtgttattttttaatttctcttgttaatccaacccatttcggtgggataccgttgaatggaatggctcccctcgctcagaacaaaaactaaccttaatagatttaaggcatttaaaaatattaataaatatatatacatagtttatcacttaagacattatcagaactccccaaaaataataaagtttcgtaaaccaatcggaaaaagaaaaacacattattgaagaggcaggtgtatgaacttaaatcaatcgttgcaatcatctttattttcttttataatcacaataaaagtagtttttaattctggtttttggtatagacatatacatataatgctggtaaacattttgtagggatttgatggaatacattcgggtaacaaggggaattgaggaaagcttgttgtatgtatatatagcatccaaaaatcatacaccatataaggcatatgattgtgttgagtacatagtagaaatatagtacatcatacaaatatttgagaacattttcgtatcaaatacaggagtcgttaaacaaaagaaaaccataaataacaacatcaataaattaggacgtcaataaaatgaataaaagcttcaggtaaacaaaagtaaagcacataaactatctaaattatatcttccatttcactggtaccggtaagcttgggataatactttctaaagcttctacaaaaacacatgcgtacttaagtttgtcttaagggctaagctctgccagctaaatgcaaacagtttgtgtatgtgtgtgcgtcgatctaagtcgttatcgttcgttcaaatcctgaaggactcttaggctttcataagtaggtgcggctctgaccgcaacgagtctgtaaggtactggatcttcatggtcttttggaagtatcttttctcgttgggtgagttaaccatatagactattggacggacacccacgttgcgccaaagatcggcaatgtggctgaaaaataaacacgataccaaatttctaattaataatgtctaataataattatatatttgcttacaagttaatctcatctttgctgagaaaaactacgcttattcctatcacgggtgcaattatgttgcgaaaaatagcgccatagattgaggtaataagtgtagaagacttgaggatggccagtgacaaataggtctcgtgccaaaggccacaaattatttcgggcttaagttttcggagctgaaagaaaggaatgagtaaaaacccaagtatagaataatacgaagcaatttttttcacctggtaaatcgctagtggtgatcgactgatgacaattgtgcgctgggtgaacgactcgtcagcagtcataaacttctgcagttcgtttatcatcctggcgctgttgtcgtgcagacgcaaaaacactgtggtctcagcagcctctgcctccaggaaatcggacaattgcctgaggggagccaccgtttccgcttcgtactgcgacctgtgtgcgatgatttataacgatttaaaggaatttccagttgattgattgactcaccccatcgggtgttgctccgtgatgtttagcttttgcaactccacaagcggctgtgcaacgtttatttttgtggggttagccacgactatttcaccacaggacgtgaggccggcatccagaagcacgttccgatatccacgtgcgaggcactgtttttaagggggtggaaaaggggatgttattgattttcgtgttgccaaccacccggctcgtgacgtcacccaccttcttaatggctgccttggagttttcgggcgcatcaaagccggctgcccggttggcgattggccagtaactgggccattcctctggagaactcagaaggcttaggagtcgcttctcgttgggacttcgttgcagtttgacgaacttggaggcgatgcacacaacgagcaaggtaagagtgcaccacgggatggccaggttgcaaaagagccagaatacgttgaagcagaagaagatcagactcacggagcagcacagcagctggtaaatcattttgagcgccagccacaacaaacgccaataggacattcagcagagaactgtgtggagcaaatatatatatggacataaaggttgctggtctaaggtgtctcgtgtctatgtgtccactcagctgcacttaccctaaatagaatgcgtgccgccaccaccacccgttagtgcaccacttgccactccctccttggatactttcgattatgcaccgtttctttgattgtgttgaaactttctattccgcgcagtttgcttcgatttctttatatcaaagggccactgttctaatagattctttcaataatagccgtcgaaaacacaaatcaaatttcgcaaaaaaggagcgtacattttctcagccagttttctatcgctgcttgggcttatcacgtatcgttatcgtctttcaaccccaatcagctgtttgagtatcgatggagtttggtggttagggcgcgcttttttaaattaagaaagtgaaagcatataaagtagcagtattatatattatagaactaaagaaaagaagaacttacatattaacatgttactacttattattgcttatagggcatttatatataaccctaaaattaaggaaagccaaagcaaataaaatgcaattccaaaatacatcaaccaatttatgcagaaatcttttaatatataagttccatttaatccgctgaaaatctacaactttgtgagcaggcgtatccaacggcgtatagtaggatgggccaggcgggtgtaaactcctggatagtacggatccgcgcagccaactccccaggatacgattccgataagggttccctgtgcgctgatcggacctccactgtcgcctgaaaaatgatgaggttcacggtgtcattatcaacatgtcgattaaacgtaattgtaattatctgggctcaccttgacatgcgtctgtgtttctggcggccgcgcagaacattctgaaagataatataaattgggaattaattggctttgt

SEQ ID NO: 36491 - DNA, 957 bp, DROSOPHILA
atgatttaccagctgctgtgctgctccgtgagtctgatcttcttctgcttcaacgtattctggctcttttgcaacctggccatcccgtggtgcactcttaccttgctcgttgtgtgcatcgcctccaagttcgtcaaactgcaacgaagtcccaacgagaagcgactcctaagccttctgagttctccagaggaatggcccagttactggccaatcgccaaccgggcagccggctttgatgcgcccgaaaactccaaggcagccattaagaagtgcctcgcacgtggatatcggaacgtgcttctggatgccggcctcacgtcctgtggtgaaatagtcgtggctaaccccacaaaaataaacgttgcacagccgcttgtggagttgcaaaagctaaacatcacggagcaacacccgatggggtcgcagtacgaagcggaaacggtggctcccctcaggcaattgtccgatttcctggaggcagaggctgctgagaccacagtgtttttgcgtctgcacgacaacagcgccaggatgataaacgaactgcagaagtttatgactgctgacgagtcgttcacccagcgcacaattgtcatcagtcgatcaccactagcgatttaccagctccgaaaacttaagcccgaaataatttgtggcctttggcacgagacctatttgtcactggccatcctcaagtcttctacacttattacctcaatctatggcgctatttttcgcaacataattgcacccgtgataggaataagcgtagtttttctcagcaaagatgagattaacttccacattgccgatctttggcgcaacgtgggtgtccgtccaatagtctatatggttaactcacccaacgagaaaagatacttccaaaagaccatgaagatccagtaccttacagactcgttgcggtcagagccgcacctacttatgaaagcctaa

SEQ ID NO: 36492 - protein, 318 aa, DROSOPHILA
MIYQLLCCSVSLIFFCFNVFWLFCNLAIPWCTLTLLVVCIASKFVKLQRSPNEKRLLSLLSSPEEWPSYWPIANRAAGFDAPENSKAAIKKCLARGYRNVLLDAGLTSCGEIVVANPTKINVAQPLVELQKLNITEQHPMGSQYEAETVAPLRQLSDFLEAEAAETTVFLRLHDNSARMINELQKFMTADESFTQRTIVISRSPLAIYQLRKLKPEIICGLWHETYLSLAILKSSTLITSIYGAIFRNIIAPVIGISVVFLSKDEINFHIADLWRNVGVRPIVYMVNSPNEKRYFQKTMKIQYLTDSLRSEPHLLMKA

SEQ ID NO: 36493 - DNA, 3989 bp, DROSOPHILA
tgactttaaaagaatctctcttagtagttcaatttattccacttctcaacacttttctttaaatttcacttgctttgctcaacaggtccccgtggttaagtttcactttaaagtctccgtttaatattcaatcgccgccttgtaagtttttaaatttccttaatcgcgttgcttgtgattcactttaaatatgcactattactctgctaacttatttacaacttgaaatttacaactgaaaattcaatagattcccacacaatatgaaggagcacatatgctggctaaagttcccaaggcactaaacgcacgtatagcactcggagaataggttttccattgctattactttgatttttattggacgaaagcgcacgaggaggatgctgtagatgctggaatgacgtccctcggcttggactgtatgtgtgtatcgcgaatgggaagctttctaactggcatccaggaagctttctaactggcatccaggacgcgaatgaagcgcctgtcgttcgtcgctgggacttttatagcacctcggcaatcgttgtagactcatccttcccattcgccaagcggagggtctaaccccctttggcagtgttacatttcatgtcaatgctccttgttgatgccaattgacggttacttttcgatataatgtctgaaaatgaaagttttattgccttaccaccaataacttacacgcacaaacgcagtcctcgttggttttgtcacgtaaatctttataaaggttctcgtttgcttactccaagtgcgttaatatttcttgttattttgtttatctccctttttgatgtggcatttttggacttgttatgcgccacaatttacatttacatttaagaggatttaaaaattccacagaataaatcctgcacaagcacacaaatgttgacattttaatgggcattccttgcaggagtgatgataacggttaaacaggacttgtatttgccttggcgccccctccccccttttttttttttgatacttcacagcggccataaacgtgacagcgtatttaattagcgcccttcgcaagcggcccccttcctgtcccttcaaattgattgggccacgtgctggaagggcgttgacatctcacttgtagctctcgctcccaggagcagacagtagactacgggtctgtcagggaaaccctagagcccatcggcaaacacgcaatcggggaatacaagttgtaaaataaaccaaacgatgaaaataatgaaaccatttgattgatgagagggacgcattcgcggcttggcttgtatagctaaccaggctgtgtaatatttactttaaaaatcccgaagcaattagggaatgtttcagtcggtgggcttcagttgttgctttgagaccggctcgggttacataattctagaccaattgatttacccaagcatcacattttcgacaatgttttatcgccatgtccaattattttatattctataaatgtcaaatgcagaagcgttttttatttaacaataaaaaggtttgtttatctgaaagaatataataaatggtggatcggctgtttttcgtccaggcgaataaaagtttcaacttttactatgccttccgtcgtctaatacataaataacgaaaacagtttctctacaaaaaagaacccattttaaaagtaaaagcgtttgagatttttttcatcagcctatgaggcggttttataatttcctttttcttttggataagcttgacttacttaaatatttcccagggaaatgaaaagaaaattcacaatgcattttaaaattcattgcgaattttagtgttgaactatttgcccagtccgaccttgttgaaaagtttgtccttaacaatctgagccatcaagccgtgtatcagttcaatggtggagcggctgcagtctcgggtggccttggacagcttatcctccgaacgcttctcattgacatcggttcctgtggataataaagcgggtaaattatttgcacaattcctaaatcgacccattatgtaccgcgacctaaaaagttctcactctgctccagcttctcggagagatccatgatctgaccggtggtgtactctgtgttggtgagcagacccgagctgcccagtgtgtttacccagtatttgttccacagagagtcgaggagcctgcggtccagagcagacttgaagtagctaatttccaagggatagtactgcttgcagtggactccaaagtcttcgatcttattcagcgggatggtctgatactccgagggctcctcgtttggtggcttataaccttttggatacgtgcggaatgcacccagacacaccttgccagcggaaacagtgcgcaccggatcaaccacaatggccacgaatggctcctggtatgtctggttgagcatctgggtggacacatcgatgccggacaaccagcaaccgtaaccgggatggctgtgataccagcccacggcgtgttccatgcgtcccacctctttggccgcttccatgtaggcggtcatgtactcgtacgcttgtgcctgggcattgacgcgggtttcagtgccctccactggcagtgcaaatgcatccatgacaatctgcacgggaatgacttataaattgaggaccttttttacattcaataactcaccattgtgttgtcctctaccttgccaagcattagacccatcacctccaaagtaccgccagagcgagcgtgcatcaccatctttaggagcgccagagccgagatcttaatgtccttaaagaagtggggatctttctcccagggcttcgcatcgatgatctgccgctgctgttcggcgtcgtagcgaaagatctcgtcacaactgggcaacgtctggatgttgttctccagctcccaggtcttttgtgcggcgtcggagtccattgtgattgtacttatgccgaaaattgtagtcttttgttgcaagtttttgttttccggctcaattctagagatgaacttgtcggtaccatctgtacaatcaatttcatgaaggtacaatcgatattttttataaatcgattattataagttaagaaattaaaatattgattaaaaaatttaaaatttatctatattaacaatttatttgtttaataaataaaatgtatttttaatcgttaattttttaccaaggaaagttttttaatttaatttttctgtttacgatacgcactctaatttgcagcatttttgactaaaaaaaacttaaaaccttatttcatagtgacaaaatgattcatcgcagtatctgtaatctgtatctttcttttcacttcttgagattaaccattattaataatcacataatataaaccacttttaattcaagtaagttgtcagttcctgcaccccgaattttaaatgtaacgcataagccggcgcattaaaagcaggttggcagggcttgcgcgtccattgcaaaaaaattcctgcacagagttttcgctacaattaactttggcaagctcgtgatgtgggccgtaaaaacagtgtctggtggaaaagtgtgaaagaaatcagtgaatagtttgtgggtgttttgtgtacgtgcatttaccgtattattcccaatagctttgcggcttttcaaagtgctcgcttcggtattcgttttccccgcacccaagccgcatttgcgacgccgcttggaaaatgtcgctggatggcggtaggttgcgctacgaagacgaaaatggtaaaaccgtggttctggcagccaaagggcgcaccttccaggtgggctcctactacaattgcgacctcatcctggaggggccagaggaggagcgtctaatttgcgaaataaactgcgatgccttcggcagggtgagtctggatggcaggaatcccccttaaccgccctaacatactgcttcttccgcccttaggtcatcatatacaacaagtccagcggagaccccattcatctcaacgacgtggccat

SEQ ID NO: 36494 - DNA, 1189 bp, DROSOPHILA
attgagccggaaaacaaaaacttgcaacaaaagactacaattttcggcataagtacaatcacaatggactccgacgccgcacaaaagacctgggagctggagaacaacatccagacgttgcccagttgtgacgagatctttcgctacgacgccgaacagcagcggcagatcatcgatgcgaagccctgggagaaagatccccacttctttaaggacattaagatctcggctctggcgctcctaaagatggtgatgcacgctcgctctggcggtactttggaggtgatgggtctaatgcttggcaaggtagaggacaacacaatgattgtcatggatgcatttgcactgccagtggagggcactgaaacccgcgtcaatgcccaggcacaagcgtacgagtacatgaccgcctacatggaagcggccaaagaggtgggacgcatggaacacgccgtgggctggtatcacagccatcccggttacggttgctggttgtccggcatcgatgtgtccacccagatgctcaaccagacataccaggagccattcgtggccattgtggttgatccggtgcgcactgtttccgctggcaaggtgtgtctgggtgcattccgcacgtatccaaaaggttataagccaccaaacgaggagccctcggagtatcagaccatcccgctgaataagatcgaagactttggagtccactgcaagcagtactatcccttggaaattagctacttcaagtctgctctggaccgcaggctcctcgactctctgtggaacaaatactgggtaaacacactgggcagctcgggtctgctcaccaacacagagtacaccaccggtcagatcatggatctctccgagaagctggagcagagtgagaactttttaggtcgcggaaccgatgtcaatgagaagcgttcggaggataagctgtccaaggccacccgagactgcagccgctccaccattgaactgatacacggcttgatggctcagattgttaaggacaaacttttcaacaaggtcggactgggcaaatagttcaacactaaaattcgcaatgaattttaaaatgcattgtgaattttcttttcatttccctgggaaatatttaagtaagtcaagcttatccaaaagaaaaaggaaattataaaaccgcctcataggctgatcaaaaaaaaaa

SEQ ID NO: 36495 - protein, 327 aa, DROSOPHILA
MDSDAAQKTWELENNIQTLPSCDEIFRYDAEQQRQIIDAKPWEKDPHFFKDIKISALALLKMVMHARSGGTLEVMGLMLGKVEDNTMIVMDAFALPVEGTETRVNAQAQAYEYMTAYMEAAKEVGRMEHAVGWYHSHPGYGCWLSGIDVSTQMLNQTYQEPFVAIVVDPVRTVSAGKVCLGAFRTYPKGYKPPNEEPSEYQTIPLNKIEDFGVHCKQYYPLEISYFKSALDRRLLDSLWNKYWVNTLGSSGLLTNTEYTTGQIMDLSEKLEQSENFLGRGTDVNEKRSEDKLSKATRDCSRSTIELIHGLMAQIVKDKLFNKVGLGK

SEQ ID NO: 36496 - DNA, 4004 bp, DROSOPHILA
tgttttaaagcaatttaaaagggatttcacagcatcgaacaaaaagcctttgtcccacttaaacgaaacggattttagggctagtctattaaataaacgttgacaattttatggacagaccattattcgactaagaggacgataatatgcccggctgaataaaagaaggagatacttctaccactcaaaaagccatcaattacagatgcgacaggcacgcgttgcataactacaaaaatattatatttatgtacattgggtcccgaagaaaataactcaatataatcaaacaaaaacagctcttaacggagtaaaaactaatgacgatggccctcaacacacaaaagttctgatatcaacttttgtgacaaaaaatatttttttattaaactaagaaaatacaagaatattttcaaaattcttatttttatttttttttaaccattttcaaagtcttattatttgttcagtgtagttattttcaatattgcaccggaattaagtgtccaacgtccaggcgttcgagctaaggacacgcagagtgacttaatttaatttatataagaaagaggcgaacggaggttactgtatgtttgaatgggcttacgatggtccgtcgtgggttggagatgatggtgtgcaaagtgacacgcaaaccgcccataaaagttattaaaaatggattttccgaaatgagggttgtctgcgggaaatggcaggagttggtaattgaaaaggcaggatggaggatattataagaacttgagcttataaagggtgtattcaataagagtctattgtctacatagatagctggtattattaaacaaattaagtttgtcccaaaaccagcaggaaataggtattatttatactttcacaaaaagtcagaggagcagagctaaattctcttttattgcaacaaattaagagagccacaggtgccgtacaatcagaacatggtgctataaataaagatacatttaatatttttctattcctagccctcgggaccctccagcagccagtaggtctccatgtcgcccttgcctttgacctggaccgtaccacgcgactccactttgtagcccacttggcgcactttatcgccggtgtacttcgatagctggatcttccagggatcactgctgctctccattcgcgaggcggtgttaacggtgtccccaaacagacagtatcgaggaaccttttggcccacaacgccagccaccacaggtcccgaattgatgccaactcgaatagccacgtcccccatatcgtgagccttgaactttttcatcacccttaaggccaaatcgcaggcgtgttcggcgtgcaggggattcacatcaggagcacccgaaacagccatgtaaaccatgcccacggtctccactttgtaaacgaatggggaaatgatctcctcatccagagcggaaaatactttgttcaaagtgttcaccgtctgcatagctccctgaatgctgttcaatccttcatcatagacgttcatcacctcgaggaagatgacggacacttcctcgaaactctggcaaacctgttcttcgctgagtcgcattctttcggcaatgggccgcggaatcatggagtagagcagctcatccccctgccgcttccaggaatctgccagctccagcgatttttccagctcatccgatcgctgctcctccttttcaaacatgatctccagcttggagcagtgctgccatcccgccatcacaagctctctactcagtccatgtggattaagatcgttcaaatagagaccgattccatgcagctcatcgagattttcgattagaggactgcacaggaagatcagcgagtccacatctttgatgtagaacatctgtcccttcaaaaggatggacctcaagccctgggaagatcgacgttccccagtggcagggtcgatctcatcctctctcgcagattcatcatcatccaccggatgggattcactgaactcctgagccttggccagcgccatagtttgggcttcgtttaagtccatctcgtcatagttctcaaagtccatgtttaagacagcatcgtaggcagcgcgattgtgacccgtgcgaatcaactcgaactcaaagagcacggctctcatctggatcagggtatcccagtcgatagtggtgtctttcggacgacggcattggaacaagtccattacgtgggtgccaatgaagctctttggattggcccctggattgtgcataatccaggtctcaacgatcttctcaccagcatgcgtgatcttcatgtcgtggttcagcacaaatgtgaagggaaaaagatcgaggaacacatccagtttcacggtgggcattttgagctgtgagggatgggcctccgtattgacgcgcttggccatgtactcccggttatcaaagtccagacgatacttcacaatcacggtcaagggaccatccgtgagcttgatgggaccagcagtgcctccactgatgtcattctggctctcgatcacgtaagccttgatctccaggccgtaaaactcgcgggccacctcggtcatctgcccaattaggtacttggacattccagtgcgactgcttctgtataggatcacagctccgttatcatccatattggtcaactgcatgctgggcgacttcatcttgggataggtgaaacgcataatcaagtgaatgttgtcgatggactgcaggaagtcgcagaagtatcgcccggtggagcggatcatcttgtcgtagccgaagttgctgaagaatcgcacaaaacagcgcccgaagaagttcatgcagaagtcgaaggactcgcccgtgcaggcggacaaagcctcggcgatatccggcatcagcttgtccggatagatctggtgcgtcttgaagctattgtgcttgcagtcgatgatgtgacacaccttccgccaaatgtccacgccatactcctcctgcacgtagtgctgcacactctcatacagcattccatacatggtttatgtttctgaaaaaatggaaaacaatggacgattaaatgtataacaagaaaacatgataaaacaataaaaacaacgagatacattgtctcaatttattgttcgattgttcctttataagaagttatatattataagaaattatatattataagaagttataagaagtgtctatcagaattaatttaccatctgcatataaaataaatttaacctttttttttgagtatattacatataaaatttaaacaaattaaaaacatgactttaaaagaatctctcttagtagttcaatttattccacttctcaacacttttctttaaatttcacttgctttgctcaacaggtccccgtggttaagtttcactttaaagtctccgtttaatattcaatcgccgccttgtaagtttttaaatttccttaatcgcgttgcttgtgattcactttaaatatgcactattactctgctaacttatttacaacttgaaatttacaactgaaaattcaatagattcccacacaatatgaaggagcacatatgctggctaaagttcccaaggcactaaacgcacgtatagcactcggagaataggttttccattgctattactttgatttttattggacgaaagcgcacgaggaggatgctgtagatgctggaatgacgtccctcggcttggactgtatgtgtgtatcgcgaatgggaagctttctaactggcatccaggaagctttctaactggcatccaggacgcgaatgaagcgcctgtcgttcgtcgctgggacttttatagcacctcggcaatcgttgtagactcatccttcccattcgccaagcggagggtctaaccccctttggcagtgttacatttcatgtcaatgctccttgttgatgccaattgacggttacttttcgatataatgtctgaaaatgaaagttttattgccttaccaccaataacttacacgcacaaacgcagtcctcgttggttttgt

SEQ ID NO: 36497 - DNA, 1950 bp, DROSOPHILA
atgtatggaatgctgtatgagagtgtgcagcactacgtgcaggaggagtatggcgtggacatttggcggaaggtgtgtcacatcatcgactgcaagcacaatagcttcaagacgcaccagatctatccggacaagctgatgccggatatcgccgaggctttgtccgcctgcacgggcgacaacttcggctacgacaagatgatccgctccaccgggcgatacttctgcgacttcctgcagtccatcgacaacattcacttgattatgcgtttcacctatcccaagatgaagtcgcccagcatgcagttgaccaatatggatgataacggagctgtgatcctatacagaagcagtcgcactggaatgtccaagtacctaattgggcagatgaccgaggtggcccgcgagttttacggcctggagatcaaggcttacgtgatcgagagccagaatgacatcagtggaggcactgctggtcccatcaagctcacggatggtcccttgaccgtgattgtgaagtatcgtctggactttgataaccgggagtacatggccaagcgcgtcaatacggaggcccatccctcacagctcaaaatgcccaccgtgaaactggatgtgttcctcgatctttttcccttcacatttgtgctgaaccacgacatgaagatcacgcatgctggtgagaagatcgttgagacctggattatgcacaatccaggggccaatccaaagagcttcattggcacccacgtaatggacttgttccaatgccgtcgtccgaaagacaccactatcgactgggataccctgatccagatgagagccgtgctctttgagttcgagttgattcgcacgggtcacaatcgcgctgcctacgatgctgtcttaaacatggactttgagaactatgacgagatggacttaaacgaagcccaaactatggcgctggccaaggctcaggagttcagtgaatcccatccggtggatgatgatgaatctgcgagagaggatgagatcgaccctgccactggggaacgtcgatcttcccagggcttgaggtccatccttttgaagggacagatgttctacatcaaagatgtggactcgctgatcttcctgtgcagtcctctaatcgaaaatctcgatgagctgcatggaatcggtctctatttgaacgatcttaatccacatggactgagtagagagcttgtgatggcgggatggcagcactgctccaagctggagatcatgtttgaaaaggaggagcagcgatcggatgagctggaaaaatcgctggagctggcagattcctggaagcggcagggggatgagctgctctactccatgattccgcggcccattgccgaaagaatgcgactcagcgaagaacaggtttgccagagtttcgaggaagtgtccgtcatcttcctcgaggtgatgaacgtctatgatgaaggattgaacagcattcagggagctatgcagacggtgaacactttgaacaaagtattttccgctctggatgaggagatcatttccccattcgtttacaaagtggagaccgtgggcatggtttacatggctgtttcgggtgctcctgatgtgaatcccctgcacgccgaacacgcctgcgatttggccttaagggtgatgaaaaagttcaaggctcacgatatgggggacgtggctattcgagttggcatcaattcgggacctgtggtggctggcgttgtgggccaaaaggttcctcgatactgtctgtttggggacaccgttaacaccgcctcgcgaatggagagcagcagtgatccctggaagatccagctatcgaagtacaccggcgataaagtgcgccaagtgggctacaaagtggagtcgcgtggtacggtccaggtcaaaggcaagggcgacatggagacctactggctgctggagggtcccgagggctag

SEQ ID NO: 36498 - protein, 649 aa, DROSOPHILA
MYGMLYESVQHYVQEEYGVDIWRKVCHIIDCKHNSFKTHQIYPDKLMPDIAEALSACTGDNFGYDKMIRSTGRYFCDFLQSIDNIHLIMRFTYPKMKSPSMQLTNMDDNGAVILYRSSRTGMSKYLIGQMTEVAREFYGLEIKAYVIESQNDISGGTAGPIKLTDGPLTVIVKYRLDFDNREYMAKRVNTEAHPSQLKMPTVKLDVFLDLFPFTFVLNHDMKITHAGEKIVETWIMHNPGANPKSFIGTHVMDLFQCRRPKDTTIDWDTLIQMRAVLFEFELIRTGHNRAAYDAVLNMDFENYDEMDLNEAQTMALAKAQEFSESHPVDDDESAREDEIDPATGERRSSQGLRSILLKGQMFYIKDVDSLIFLCSPLIENLDELHGIGLYLNDLNPHGLSRELVMAGWQHCSKLEIMFEKEEQRSDELEKSLELADSWKRQGDELLYSMIPRPIAERMRLSEEQVCQSFEEVSVIFLEVMNVYDEGLNSIQGAMQTVNTLNKVFSALDEEIISPFVYKVETVGMVYMAVSGAPDVNPLHAEHACDLALRVMKKFKAHDMGDVAIRVGINSGPVVAGVVGQKVPRYCLFGDTVNTASRMESSSDPWKIQLSKYTGDKVRQVGYKVESRGTVQVKGKGDMETYWLLEGPEG

SEQ ID NO: 36499 - DNA, 5466 bp, DROSOPHILA
tgtactcgaatttaatgccattctcctcctgcacacccagtggcatgtcggaatcgggcgcgacctctcgaaagctgtcagggatcgcggggaaaaaggtgtcgcaatcgaacttctgcattattttggtaatgtacagccggtgacaccttggcgaggccatggcctcctcgtagactccactaccgcccacaatccaaatgttctccacttcgttctgctcctcaaggatcttcatggccgtctcgagattggggcacaatagtactcccttgggcagatcactttcctgaagtgtggtgctcagcactatgttcagccgatcgggaagaggcctcttgctttccggcactccgaagtaggttttcctgcccattaccacggcattttgcttggtgggatcacttgttcgcttggtggtgcggctgaagtacttcagctcagatctgatggtacaaaagctttagctgcggttcaatccttgttaccaacttacttaatgcgccatggtagatcgcctctgatgccgattccgaaattctcgcaaactgccacgattaaattgaatcgaagcatccttaatccttactgagaaagcataagcttgaaaattatcttccaagctataaaattcaaacagctgatcaaggcaatgctggaaccgatttcgatagcttcgattacttacctattatcgaaacacgcttatgaagatcttagtcagatttcaggttggtttcgcgccactcccacgaaaacaatatttctagatacaatgtgtcttgaatttatttttatagtgatccacatatactttacaggggattaaaagttcgttaactattaccaaaaagttattagatacattagatataagaggttttcgagcctgattatttccaaagggttacaagattttctgtctcaaaatatgttttttatatttcaataccatagtggtgatattcctggattttccaagacaaacaagtctccagttctactctggtccctccaaaagccagtaggtctccatctcgcccttgcccttgaccttgacaaatccccgcgcttcaaccttatagcccaccttttgcaccttcagcgcagtatagttggacagctggatcatccagggatcgctgctgctctccattcgcgaggcggtgttaacggtgtctccaaagagacagtatcgaggaaccttcatcccaaccacgccggcgacgacgggtcccgagttaatgcccacccgtatagccaccccgggaagagcatgggctttgaccttcttcatcacccttaaggccaaatcgcaggcgtgttcggcatgcaggggattcacatcaggagcacccgaaacagccatgtaaaccatgcccacggtctccactttgtaaacaaacggggaaatgatctcttcgtccaatgccgaaaacactttgtttaaggtggtcaccgcctgcatggcatcctggatgttgttggacccactgtcatagatattcattacctcgatgaaaatgacggatacctcctcgaaactctgacacacgtgctcctcgctctttctcattcgctcggcaatgggtcgcggtatcatggaatacagtagctcatctccctgccgcttccaggaatctgccagttccagcgacttttccagctcatccgatcgctgctcctccttctcaaacattatctccagcttggagcagtgctgccatcccgccatcacaagctctctactcagtccatgcggattaagatcgttcaaatagagaccgattccatgcagctcatcgagattttcgattagaggactgcacaggaagatcagcgagtccacatctttgatatagaacatttgtcccttcaacaggatagatcggaggcccaccgaatggcgtctctgtcccgtggcgggatcgatttcgtccttggaggtggctgccgctgctgcctcttccttggcgttctccgcactaaactccttggcactggccaaagccatggcctgcgcctcgttcaggctgctggcttcatcaaagttttcaaagtcaaagttcaaggccgcatcataggcggcacgattgtgacccgtacggatgagctcaaactcgaagagaactgtacgcatttgcagaatggtctcccattggatctgagtgtccttgggacgacggcacttgaaccgctccaatatgtgactgccaataaaggtctttgggttcactccaggattatgcagaatccacgtctcgacaatcttctcgcccgcaagtgtgattttcatgtcgtgatccagcacaatggtgaagggaaacagctcgaggaacacattcaggtccaccgacggcatcttcagctgcgaaggatgcgcgatgacattgacccgcttggccatataatcgcgattatcgaagtccagccgatacttgacaatcacggtcagaggaccctccgtaagcttgatgggaccggctgtgccaccgcatatgtcattttggctctccaggacataggcagtcatgtctaggccgtagaactccttggccacctcggtcatctggccaatcaggtacttggacatgccagttcggccgctgcggtacaggatcacagccccatcgtcatccatgttggtcaactgcatgctgggcgacttcatcttgggataggtgaaacgcatctgcacgtgaatgttgtcgatggactgcaggaagtcgcagaagtatcgccctgtggagcggatcatcttgtcgtagccgaagttgctgaagaatcgcacaaaacagcgcccgaagaagttcatgcagaagtcgaaggactcgcccgtgctggcggacagggctgccgcaaagtccggcatcagcttgtccggatagatctgatgtgtcttgaagctctgatgcttgcagtcgacaatctggcagacctttcgccaggtctccatgccatactcctgctggatatagtgctgcacgctctcgtacagcattccgtacatgatggggcaggatgtgaatgtccttggtcctgtgaagtcctgcctatcgtcgaaattgccttcgtaaaagtttatcctgtaacgaaacaaagttggcagtcacatatttaggggtgtggttagccaaagtttttccatcgctctgagctggtaattaggtaaactgtgttcgtaccccggaggatttaggacaatttcgttgcgttgggtcagggattaggccaacaaactcgtacacaacttaagtgattggtagtaggctaggatgctacataaaaaagtcttgcgctgatatagtcttgagtaactacttagagtgaaaattaaattgtattcagtcgctgttcttatgcgtgaaatctgtttcctatttttagagacatgcatttaaaatccattaaacacgtaattaatgtaaggtgacatacatttggtgtatgtttaagccgtcagagtatatcctcttatctagccttcaaaaacacccaatgcttttcctccgtagcatttgatttattgccccgacagtttaatttgagttcatgtggcagacacgcggtggaaatcctcctatttcccacatcaaggtctttcaaatctgtcacgttcttcgcgaaaggaacatagctcattgtgctcaacttatttccgtttcctattgccggtaattcgctggtggcaacgccagtttttcattttttttctactcagactaactaactgagccacaaattctcgaacatctttcctgagtttagtgtatttaattttgacaaaaaacatgcaaatttccgacaagccgaaggtcgtaaaaagtggataaaaatgctgtttcaaaatgctaacgtttgattaatggtcagggaatccacgtagtcaaaaagaacataaaggcaatgcttaacttctgctcctttatactcaagttaacaatacgtagatttaatcgctcgtaatttatggtagcttgaaagtggcagggagaaccctaatctatataaattgataaataatggattggatgctaaagttaaatggactatagtgtaataatttgtggccaactcagttgcaactttaactttaagttttaacttaaatgatgtagttcctctgcttctcatattgcttcctaatcctttaaagaactgccttcttaaggatgtatgaaaatccccttatttctctcgatatatctctttgattagtgaaccgtgaaattagcttattatatccccagcaatccctgctaccttatattgctttccggctcgttccaatccactagatgaatcgcatgaagttctccagcatcggagccgcttgtcgtttgtctgtgcctcagaaagagttttaattatatccacgcggcatttgccagtcgcttatttataatttaaggaaggcatatacgcctgcacacgcacagcatccccggatgcgtaaagtcggggtacatatatatacgcgcactccacggcaaactctcacttttccgtactccgtgttgcgtcgtcggcagttgctattgttacactaaatttgttttgccgcctgtcgctgcttccttggcttctggctgcctgatttgcttttgcttcatgatttcctctgacagacgagcttcgtgagtctgtcggctctttcgcatccgtcggttccgtcggtaccgtcggtttcccctggagctttcccttttcgccgggacgatgtcggtcgactgaagcgtgcccctgtggcggtcaggccttttatagcccacccactagccaagttgcagttggagctgtatttccggcccacttaggacctacgtgcctgcgcttcgacacgcacttctctgtttgaccatcgtgatcatcatcggcagtcaatgctctttgccacaattgccactttgtctccttccgaaacagtaaaacattgtcacacaaccgaaggagtcatttttctccccgttcatttccttttatgggctcactcccccacatcgatgtacatatatatgtgtgcggtgtcctgggaaagtattgtcctttgggtctttaccagggctgaataacacctagtaatagactgacgactaggttagtcagttataatagatatgtggcttatacaaatgttaaaatttcaaacttttagtttcctttagataatttctttccaattgtattctctgtataaaacgctgttctaattttctgaaccatttcttacaatttagaaatactcgagtactttgaatgtatatcccaagccctgaagtatcgaaaaccgtctgtcaaatgtatcattgtaacagagtttttcgctttggccgtttgccatttccccgatggaggaatggttttgtggctctgtgcttaatgcttttccattttcacgcagttatatatacaaaaagatgtacatacacatgttagcctgaatcctgcacatatttgatgtgttgt

SEQ ID NO: 36500 - DNA, 2213 bp, DROSOPHILA
taccccgactttacgcatccggggatgctgtgcgtgtgcaggcgtatatgccttccttaaattataaataagcgactggcaaatgccgcgtggatataattaaaactctttctgaggcacagacaaacgacaagcggctccgatgctggagaacttcatgcgattcatctagtggattggaacgagccggaaagcaatataagatgtacggaatgctgtacgagagcgtgcagcactatatccagcaggagtatggcatggagacctggcgaaaggtctgccagattgtcgactgcaagcatcagagcttcaagacacatcagatctatccggacaagctgatgccggactttgcggcagccctgtccgccagcacgggcgagtccttcgacttctgcatgaacttcttcgggcgctgttttgtgcgattcttcagcaacttcggctacgacaagatgatccgctccacagggcgatacttctgcgacttcctgcagtccatcgacaacattcacgtgcagatgcgtttcacctatcccaagatgaagtcgcccagcatgcagttgaccaacatggatgacgatggggctgtgatcctgtaccgcagcggccgaactggcatgtccaagtacctgattggccagatgaccgaggtggccaaggagttctacggcctagacatgactgcctatgtcctggagagccaaaatgacatatgcggtggcacagccggtcccatcaagcttacggagggtcctctgaccgtgattgtcaagtatcggctggacttcgataatcgcgattatatggccaagcgggtcaatgtcatcgcgcatccttcgcagctgaagatgccgtcggtggacctgaatgtgttcctcgagctgtttcccttcaccattgtgctggatcacgacatgaaaatcacacttgcgggcgagaagattgtcgagacgtggattctgcataatcctggagtgaacccaaagacctttattggcagtcacatattggagcggttcaagtgccgtcgtcccaaggacactcagatccaatgggagaccattctgcaaatgcgtacagttctcttcgagtttgagctcatccgtacgggtcacaatcgtgccgcctatgatgcggccttgaactttgactttgaaaactttgatgaagccagcagcctgaacgaggcgcaggccatggctttggccagtgccaaggagtttagtgcggagaacgccaaggaagaggcagcagcggcagccacctccaaggacgaaatcgatcccgccacgggacagagacgccattcggtgggcctccgatctatcctgttgaagggacaaatgttctatatcaaagatgtggactcgctgatcttcctgtgcagtcctctaatcgaaaatctcgatgagctgcatggaatcggtctctatttgaacgatcttaatccgcatggactgagtagagagcttgtgatggcgggatggcagcactgctccaagctggagataatgtttgagaaggaggagcagcgatcggatgagctggaaaagtcgctggaactggcagattcctggaagcggcagggagatgagctactgtattccatgataccgcgacccattgccgagcgaatgagaaagagcgaggagcacgtgtgtcagagtttcgaggaggtatccgtcattttcatcgaggtaatgaatatctatgacagtgggtccaacaacatccaggatgccatgcaggcggtgaccaccttaaacaaagtgttttcggcattggacgaagagatcatttccccgtttgtttacaaagtggagaccgtgggcatggtttacatggctgtttcgggtgctcctgatgtgaatcccctgcatgccgaacacgcctgcgatttggccttaagggtgatgaagaaggtcaaagcccatgctcttcccggggtggctatacgggtgggcattaactcgggacccgtcgtcgccggcgtggttgggatgaaggttcctcgatactgtctctttggagacaccgttaacaccgcctcgcgaatggagagcagcagcgatccctggatgatccagctgtccaactatactgcgctgaaggtgcaaaaggtgggctataaggttgaagcgcggggatttgtcaaggtcaagggcaagggcgagatggagacctactggcttttggagggaccagagtag

SEQ ID NO: 36501 - protein, 669 aa, DROSOPHILA
MYGMLYESVQHYIQQEYGMETWRKVCQIVDCKHQSFKTHQIYPDKLMPDFAAALSASTGESFDFCMNFFGRCFVRFFSNFGYDKMIRSTGRYFCDFLQSIDNIHVQMRFTYPKMKSPSMQLTNMDDDGAVILYRSGRTGMSKYLIGQMTEVAKEFYGLDMTAYVLESQNDICGGTAGPIKLTEGPLTVIVKYRLDFDNRDYMAKRVNVIAHPSQLKMPSVDLNVFLELFPFTIVLDHDMKITLAGEKIVETWILHNPGVNPKTFIGSHILERFKCRRPKDTQIQWETILQMRTVLFEFELIRTGHNRAAYDAALNFDFENFDEASSLNEAQAMALASAKEFSAENAKEEAAAAATSKDEIDPATGQRRHSVGLRSILLKGQMFYIKDVDSLIFLCSPLIENLDELHGIGLYLNDLNPHGLSRELVMAGWQHCSKLEIMFEKEEQRSDELEKSLELADSWKRQGDELLYSMIPRPIAERMRKSEEHVCQSFEEVSVIFIEVMNIYDSGSNNIQDAMQAVTTLNKVFSALDEEIISPFVYKVETVGMVYMAVSGAPDVNPLHAEHACDLALRVMKKVKAHALPGVAIRVGINSGPVVAGVVGMKVPRYCLFGDTVNTASRMESSSDPWMIQLSNYTALKVQKVGYKVEARGFVKVKGKGEMETYWLLEGPE

SEQ ID NO: 36502 - DNA, 2599 bp, DROSOPHILA
gtatgtcatttattggtttgttttctgaaacagagctcattttccatacgagatgttcttttatttataatttacccccaagggatgaatccacgacagattgaacctacactgcacatgtgatgattatatatatacaaaccatgccacaaataaatcattatataaaaagacctgcagttttaaaatgcttgaaatcgcttggggattgataaaaaaaaaccatttgaaaaaaacattttctttttacattatttggtttgcggaagtgtggttcaattcgaagtgcctaacttaaatataatatgaaaatagcattgaacttttaaaggtgacaattcaaatgcgcgccaaacttttaatacgttgccacctgccaactcaatttgacgttagccaacactggctgcgacaaaacagttgttattcgctcgtatttagtttttagccggctgctaaatagtatagtattagtatgttatatgatatgaactcaggatgtccagaattttgatgagccaactgacccaccctcagagggtccgactgctgtacaaaacgatcttgcgactgcacagaggtaagatgaaaaattccctattactataaattgcatgcatttcaactaaacttctgtactccgtaggacttccagcggaacttcgtgctctgggcgataactatgtgcgggacgagttccggcgacacctcaagtgcaatcccatggaggcacagctctttatgacagagtgggccgtaagttttacgtaataaacaaaaaggcgccatactaagcaaatcttccattgcagcgatatgcgtccacaatcacccaacaactagggattcggggcaagcccaagggagagctgggcgaagagattgaccccaagactgtagaaatgttgaaagacgaccaagtagtccaactatacgagctgatgctggcggccaagggagtagaagatgcgcaaggcaaataaatcagtgtattattttattatgagtgtttctccaaaatcttgtactcgaatttaatgccattctcctcctgcacacccagtggcatgtcggaatcgggcgcgacctctcgaaagctgtcagggatcgcggggaaaaaggtgtcgcaatcgaacttctgcattattttggtaatgtacagccggtgacaccttggcgaggccatggcctcctcgtagactccactaccgcccacaatccaaatgttctccacttcgttctgctcctcaaggatcttcatggccgtctcgagattggggcacaatagtactcccttgggcagatcactttcctgaagtgtggtgctcagcactatgttcagccgatcgggaagaggcctcttgctttccggcactccgaagtaggttttcctgcccattaccacggcattttgcttggtgggatcacttgttcgcttggtggtgcggctgaagtacttcagctcagatctgatggtacaaaagctttagctgcggttcaatccttgttaccaacttacttaatgcgccatggtagatcgcctctgatgccgattccgaaattctcgcaaactgccacgattaaattgaatcgaagcatccttaatccttactgagaaagcataagcttgaaaattatcttccaagctataaaattcaaacagctgatcaaggcaatgctggaaccgatttcgatagcttcgattacttacctattatcgaaacacgcttatgaagatcttagtcagatttcaggttggtttcgcgccactcccacgaaaacaatatttctagatacaatgtgtcttgaatttatttttatagtgatccacatatactttacaggggattaaaagttcgttaactattaccaaaaagttattagatacattagatataagaggttttcgagcctgattatttccaaagggttacaagattttctgtctcaaaatatgttttttatatttcaataccatagtggtgatattcctggattttccaagacaaacaagtctccagttctactctggtccctccaaaagccagtaggtctccatctcgcccttgcccttgaccttgacaaatccccgcgcttcaaccttatagcccaccttttgcaccttcagcgcagtatagttggacagctggatcatccagggatcgctgctgctctccattcgcgaggcggtgttaacggtgtctccaaagagacagtatcgaggaaccttcatcccaaccacgccggcgacgacgggtcccgagttaatgcccacccgtatagccaccccgggaagagcatgggctttgaccttcttcatcacccttaaggccaaatcgcaggcgtgttcggcatgcaggggattcacatcaggagcacccgaaacagccatgtaaaccatgcccacggtctccactttgtaaacaaacggggaaatgatctcttcgtccaatgccgaaaacactttgtttaaggtggtcaccgcctgcatggcatcctggatgttgttggacccactgtcatagatattcattacctcgatgaaaatgacggatacctcctcgaaactctgacacacgtgctcctcgctctttctcat

SEQ ID NO: 36503 - DNA, 549 bp, DROSOPHILA
atgcttcgattcaatttaatcgtggcagtttgcgagaatttcggaatcggcatcagaggcgatctaccatggcgcattaaatctgagctgaagtacttcagccgcaccaccaagcgaacaagtgatcccaccaagcaaaatgccgtggtaatgggcaggaaaacctacttcggagtgccggaaagcaagaggcctcttcccgatcggctgaacatagtgctgagcaccacacttcaggaaagtgatctgcccaagggagtactattgtgccccaatctcgagacggccatgaagatccttgaggagcagaacgaagtggagaacatttggattgtgggcggtagtggagtctacgaggaggccatggcctcgccaaggtgtcaccggctgtacattaccaaaataatgcagaagttcgattgcgacacctttttccccgcgatccctgacagctttcgagaggtcgcgcccgattccgacatgccactgggtgtgcaggaggagaatggcattaaattcgagtacaagattttggagaaacactcataa

SEQ ID NO: 36504 - protein, 182 aa, DROSOPHILA
MLRFNLIVAVCENFGIGIRGDLPWRIKSELKYFSRTTKRTSDPTKQNAVVMGRKTYFGVPESKRPLPDRLNIVLSTTLQESDLPKGVLLCPNLETAMKILEEQNEVENIWIVGGSGVYEEAMASPRCHRLYITKIMQKFDCDTFFPAIPDSFREVAPDSDMPLGVQEENGIKFEYKILEKHS

SEQ ID NO: 36505 - DNA, 2747 bp, DROSOPHILA
aaattgcgttaatacaagcagacttctggcacagagcagtttcagaatggaatggaaacaaggagctgcagctaccccacacaatcgagagaaggtcagggagcttatcccgccgcgagagtgtcgcaaaagttttcaaaaagtattttaagcaaaatttatgcaaaccacaaggcaaactggcactctccgagtgcttatttatgcatgtatgtatgtgcgtgtgtgtctctgggagtgtgtgtgtgtgtgtgccgggaagtgctctgctaatccccgagtaatcaaagtttcggtaatgtcaccagagacaggcagcaggcaaaggaaaaagctgtggaaaaaatgtagatgagaaaattgggaaaaactgaagtccaccacctccacttctcaattttcccataaggtttgtgtgtggggaaaacacttttccaattaatgaaatctctaaactgccataaatttggcccggacgcaaataattaaatttcgtggaccacacgaacacgcacaataggctcacacagactggcccaacgacttgttgacttacggctgtatgggtgtagctgtgacagtgtgcgtgtgtctgacatttctgaccaattgcgcgctgaccgcaaatgtaggcggttcatgttcatggccaacattgtggctgccatattgacaagacacgccaatgtgaagggataggtcctttattaaagaggtagaagcgtttaaagaaatcactagttggttaaccgaaatgttgaacgtaaaaactaagatttacatcaattcttagtaaagtgctagcataattgttatcaactaacagattgcggataatcaatgtattgatggaaatggaaatatgtaactgttctcattttactactttctttaacttctgtagattttgttctaactagatatttttgtattaaaggatttgaaaagagtttgtaaataggaatgagcatcaaatttgaatttcatgttttttatttaatcaagaatatattatattacctggctgacactggcactgcccacctccggatcctccctctccgctggccgctgctgccgccgcctctgctgcctgtcgtcgctgctggcgtctcgtgagctgcagatgcgaaacatcccgtcgcagacggtgcaactcccgtcgaacgtgcaactcgaggtgctggctgccgttgttgctattgctactgtctctgtcgctgggatgactggccaggacctgggtctgttcggcgggccagtggagcagctgctgctgctccagtcgcaactccagctctacgatgcgggcgtccagctgttggaggcgctgcatccgttgctccagccgcgtctgccgcacattgccgtagagggcgaagctgaaggcgcacaggcacagcacgtagctggccacgtgcagcagggatatgaaccggactgtggggcgaggtcgctccttgctgctgctgctgttgctgctgttgttgctgatgttgctgttgttgttgctgttgttaatgggatgctgacaggggggcggggccaggcgactagctactgctgctgcggaggcatccgctgcattgtggcccagtagcagactctgctgtggggcttccacggatgcggctgccgctgttgttgctgcgggtgattccccgttaccacccgatggctccgattgcgaattgtcctgggccattgtccttggactgccgctgggcggcgctttgtgcttgcgcatactgctgcgtcttagttggaaggctctccacgaacgaaaaactcgcgtatgttgctgtcacttgaagtgtccttgtgtccttgtggcatcacagaaaaaaagcacatatgctgcaccgcagtggttgtccttttttttttttttttgtttattttcgtctctacttgcttttttacgctttttatttgggcaaggccttcgagtgattttctattcttcgactgcggtagttggccagaacattgcgccccgttgctgctgcagttttccgtgggccatggaacggaaaaacaacgctaaacttttgctgctcgtgccactcgagcgcgaagtcctctcagctagttgggctttgtttttgtcctgtcaatcgctgctgtggcagctggtactgccagtcgtcgacaagtcctgttcctcggttcgcacttgtcctttcagggctcttcacattgcaacttatttagctctgcgttcacttttcaactgcaacgacatggaatgagaagaaaagtgaaaaataaagttgggcgaaacttttcttaagggtacgatgcaactcgtatatacattttttaccccatgaattatgtgcaaactggaccgtcaacggtgtcgccacattttcaataatcagccgggctcggcggccggaggatgacccaccgccgacttggcttcaacgaagttcaaccaggcgaacccaacgcggcaactgagttcagttctaagcacctcgcaagactcgggcaaccgaaacttttcgcacaaaacttttttctagctcaagtagcagtaacagccactgacaaaaaatacgaaaaaaaaagacgatgacgacgagcattaaaaaagaaatacgcaaagaacatgaaacaaataaaaaacatccgaagcagcagcaacaagacgtgaaggggcatttgacccatggacttgtcgtgtcaaaaacatttgttgccttcaactctgccccacatgccaacgccagcagaagggg

SEQ ID NO: 36506 - DNA, 747 bp, DROSOPHILA
atgcgcaagcacaaagcgccgcccagcggcagtccaaggacaatggcccaggacaattcgcaatcggagccatcgggtggtaacggggaatcacccgcagcaacaacagcggcagccgcatccgtggaagccccacagcagagtctgctactgggccacaatgcagcggatgcctccgcagcagcagtagctagtcgcctggccccgcccccctgtcagcatcccattaacaacagcaacaacaacagcaacatcagcaacaacagcagcaacagcagcagcagcaaggagcgacctcgccccacagtccggttcatatccctgctgcacgtggccagctacgtgctgtgcctgtgcgccttcagcttcgccctctacggcaatgtgcggcagacgcggctggagcaacggatgcagcgcctccaacagctggacgcccgcatcgtagagctggagttgcgactggagcagcagcagctgctccactggcccgccgaacagacccaggtcctggccagtcatcccagcgacagagacagtagcaatagcaacaacggcagccagcacctcgagttgcacgttcgacgggagttgcaccgtctgcgacgggatgtttcgcatctgcagctcacgagacgccagcagcgacgacaggcagcagaggcggcggcagcagcggccagcggagagggaggatccggaggtgggcagtgccagtgtcagccaggtaatataatatattcttga

SEQ ID NO: 36507 - protein, 248 aa, DROSOPHILA
MRKHKAPPSGSPRTMAQDNSQSEPSGGNGESPAATTAAAASVEAPQQSLLLGHNAADASAAAVASRLAPPPCQHPINNSNNNSNISNNSSNSSSSKERPRPTVRFISLLHVASYVLCLCAFSFALYGNVRQTRLEQRMQRLQQLDARIVELELRLEQQQLLHWPAEQTQVLASHPSDRDSSNSNNGSQHLELHVRRELHRLRRDVSHLQLTRRQQRRQAAEAAAAAASGEGGSGGGQCQCQPGNIIYS

SEQ ID NO: 36508 - DNA, 4522 bp, DROSOPHILA
atcaacaccatcaatccgcaatccatcaattggttaaagaaatttccagtgtcagccggacaacaattttatggaccatcaatccatctaccacatccatcagcctgaactcgtacgattgcttatttattggacgcactgagtgcccctagtaaaacaatagtacaagctgtcccactgaggtcgggaactaacccaatccaatccactctatcgcatccaatcccatattgttgtactccaactcgatggtagtcatgctaatgagccgctaaaagcaacataaatgacataaagttgcatttttacgactgcggccagtgccacaagttctcggggtctacaaatttttacgagaatcactagatttgtatttgattcccgcgctcgtttcaactattttggaacggcatgtttttggggctattttcgtgtattaaattcgtataaagtgcagaaatgtgttggggccggatcataaaagcgagccgaatggaaattccattgttgttgtgggcgaaattccaaactcccaacatttctatgcgcatttaattgacgttgaagtccgaactgggcaaacaacaaaggtcgtaaaagttatagcaaaatgcagcagcggaaaacgaaattttaaaatttccaaatatggcagagtcatcgaataaaatatttaaaatatgtgtgaggtcataaaaaaccgggggaaaaatgtgaaaagcgagtgatgccgcgctgatttccatttaggcgagtctaccaaaaataaaggcacatctaatgggacaccacgctagtcaatggctctattaatcgaggatgggggcatttggtctattggttccatgttccatgtgaccatgctctgtgtgagctgtgagagcatttcccagttgcggatgacaataaattaggcgacccgcagccgcgtggccacacttcaaaaactcatcgaacgatccatcgaatcgatgcccgagctgtacaagtatctttgtatctaaatctgtgtatctgtatatccgaatgcgttaagtggctgttggatgatgcaagcacaaacaaacacacgcgccttcagctggcacttaccaggtggtcccgctggtcccggcggaccctcgatgatgccagtggggaactcgtcacccttgatggttgtggttagtccacgatcgcctcgatcgcccttgtcgccctggaaagaagtcagccgccagagggtgagtgagtcattgtggaaattaagtggaaaaccgagagtcagacagccttaatgcataaataaacgataaatactgcggaaaacccgagacccgcacccaacataacgacatcaagtaaatgggaaagtcgacagaacaaaagaggacgacccgacccggcaggatggcagcgaatcactgggcgtcacttaagtcgtcgccgtgtttatccaacagatacaaataatgcattaatcctggtgacatcttcctccccagaatctcgttattgttatgggtgtgtgcgtccttatctgcgccttttgtttgggttttcttcttttctctcatgtacgttattttcggtgaatcaccggcaaaaactcaccttcgtgccaggtgcaccggcaacgccgggcggtcctgcgactcctggctgtccggcctcgccctgtggtccttgcgctccgatttcgcctggtggtcctcgctcgcccggcgcacccggctgtcccgcttcgcccggaggtcctggcgggcccggctcaccgggctctccctgtgaggacgaggaaacatgtttattagctcaggatctctcgtcgagttgaccgagggtggggctcgtgcaggatataaactaaacacaggacatgctgagacaaaggaggtgcaagacaactcaccttcagctttatgactgtggaagcggatacattgacgcctgcttcttgcaagtccttacagcgtcaaccataccaaccaaaacaacaagttttaatgtaaatataaaaatatattaaaaaaccaaatgggttattcaaaaacaatggttaataaatcatcaaaataaagttagtttcagctgctgcaaaagctagattagccaaattaaaagcaaataatccaaattaaatgttcttaaagggtaactcaaaactacgaaacaaataggatggaaattccattaaaaactaccaagagatctgtccgaaaacttgccgctgccaaaggaaaagaaagtgggaagggaaagtctaccaaactacgatgttgcaacgaatttatggcgcagtttaaacaaaagagccaaggcagcagcacaacaggacaacagacaggagacaacttaaaagcattacaaacgagaattaagcgagacaataaacacaactctacacaactaagtaaaaggacgagaggactacgatgactggaccagaaggacaaatccagaaaccgagcgattcagccaaggacaacaagttgcaaataatttgttgtatgctacgggctgccatctctgggccatctgcatttggcccctgaaaaatggtcttgaccatgccaacgtctaaagtataacaaagaaaggggagcccaagtggcaaagagtacggttgatgagtgggtggtggcaataccttaacagcaactatctccgcatagcccagcgtgccgccatgcagcgttgtcaccgatctcttcagaccctaggaatgcaaagcaatttagatccggttagactctatttaatttgtagccagaaattgcagcagccttagcggatttcgagagctggaagtggcggcggagctgggactcctacttaccttcacggtttggaagacatccattccggggtggccgacatcgcccttctgtcccttgtcaccgggcttgcccgccgcgcccttctccccactgatgccattcaggccctggataacgagaaatgtttaatgttaacttaaataataataccatctccagcctctgtttctaccagttacataccagttacataaaaacgtttttttagttcaatttcaagtaatagctgtgttttttttaaatctttctttttagtcgacctatcgtgcctttaaatactaatcattaacttaacgcgaaggagtctcaacatgaagaaaccatatctgaagataacacttcattttttagtcgtgtacaatttgttaatatgtttgcaatccgagtgtcaacttccaattggaagttccttgagcatatggactccatttcctgttctcaactgctacttaccggatcgcccttctcgccgctatctcctttcttgccgcgcttccctcgttttcccggtggacccggcggacctggaggacctgcaatggaaagtttcgaagttagtagtgaaaagcaatctaaaggtcgcctcattagttgcccattgaacttgccgctgacccacaggaaactggttggcgacgaccagtggcaagccattttcttgggtcacatctctttgcccctctcgaatcccccatttccccatttgctgttaagatacttttttgggcgttgttttttgcgcagttggcgcaaattcatttagctgaaaaatgacttttcgcagcattttgtcacgctgcgggctgagaagctgctggcgaatggcgaatggcgggcacaaaatatttacaaccacttttgctgctattatttcggtgctgcgaggaaactttatctacccaaaggatccaaaggagcagcaaggagcaggacaaagctgcagtcgatgcttttcaattatttcgcatgcaattttccatggcataaaactccgagccgaggtccttcgtgtcttgtaattttccactgctgctgcctgccagtctgcccatggcaattatttttattagagccgactcgatgcacttgttgttttttgcattcacggaacaggaaattaacacctaaaattccaagacacaggcaccaaatggctgttatatggtccaatgtatcagtcggaaggtgtgaaaatgtttaattaaattaacagacaacagcaacagcaggtcgcctacaggaaaccccatcccaccgtcccttagaagtttttagggccgttccatttaataattgttgtaattaagtaatttcgtttttctacttctacgctgaaaatgaagaagaaaaagaccaagagcagcagggtcttcgaaaggaagctgcccttaatgcaggaaacgccggcaaacaatttaaattcatttcgcgctaaaatggtgccgcaaactaccaaaggcacgcgcgcctcctgtcggtgggtggtaacatgggtgggggcggcgctcgtgggcgtggccttgttgcagactatgttgaaggtgcgaagtgaggcagccagcatgactgcgatgccggtgcctgtgatgcccctccacctaatccacggatgcttatttaattaaaaaaagatttctctgttcacgcacccgagaacatgaaagtatggaggtaaataaaaagcaaaagatcccagaataata

SEQ ID NO: 36509 - DNA, 690 bp, DROSOPHILA
atggggaaatgggggattcgagaggggcaaagagatgtgacccaagaaaatggcttgccactggtcgtcgccaaccagtttcctgtgggtcctccaggtccgccgggtccaccgggaaaacgagggaagcgcggcaagaaaggagatagcggcgagaagggcgatccgggcctgaatggcatcagtggggagaagggcgcggcgggcaagcccggtgacaagggacagaagggcgatgtcggccaccccggaatggatgtcttccaaaccgtgaagggtctgaagagatcggtgacaacgctgcatggcggcacgctgggctatgcggagatagttgctgttaaggacttgcaagaagcaggcgtcaatgtatccgcttccacagtcataaagctgaagggagagcccggtgagccgggcccgccaggacctccgggcgaagcgggacagccgggtgcgccgggcgagcgaggaccaccaggcgaaatcggagcgcaaggaccacagggcgaggccggacagccaggagtcgcaggaccgcccggcgttgccggtgcacctggcacgaagggcgacaagggcgatcgaggcgatcgtggactaaccacaaccatcaagggtgacgagttccccactggcatcatcgagggtccgccgggaccagcgggaccacctgatacacagatttag

SEQ ID NO: 36510 - protein, 229 aa, DROSOPHILA
MGKWGIREGQRDVTQENGLPLVVANQFPVGPPGPPGPPGKRGKRGKKGDSGEKGDPGLNGISGEKGAAGKPGDKGQKGDVGHPGMDVFQTVKGLKRSVTTLHGGTLGYAEIVAVKDLQEAGVNVSASTVIKLKGEPGEPGPPGPPGEAGQPGAPGERGPPGEIGAQGPQGEAGQPGVAGPPGVAGAPGTKGDKGDRGDRGLTTTIKGDEFPTGIIEGPPGPAGPPDTQI

SEQ ID NO: 36511 - DNA, 4186 bp, DROSOPHILA
cgtcctttgcctagtttgagcgttgaaattgaaaatgctgcagttactcgtaaattttaatttatgcattcatttttgttgttgtataaatagaattgttttgcgttacattgtttgagatgtccatgaaaccaataggatacatacttgtggtaagattatgtatttattgtttttttatttcgcatttcaggagaaaatctccagtttcgaagctttttcaagcttgggtttcaattgaaaagcatcagttatcgactatagaattcatctttcgcctaactagtttctgcacatttgcttgtttattgaagttgtgttcattaacactgaaaaatatgcacaattggtttgaatagctctttgttatcgatattagagtacgttaccgtgtatgtataaacctcttttatgtggattttgtgtgcttgcgtataagtaactaaactgtacttattaattgtagacatcaagagagttctgaatgaaaatatcttacaattcttttgtttcgacacctttaattagcacaattccttatttaaacaaacacttatgggatttctgcccttagccttgtgtttcacatcgaagctttggcaataatgctttgtatgaacgagttctattcgaatattcagacatagcccatggacggcacctaagacaatgcaaaatgcagcaggagcagacgcagcataagtggcacggagtcattcggttcaattgttaagaataatctgattaagcaagtaattaagtcacttatggctaattgccgatgattgcgacttggtttcgtcataatccagaaattattgctttgcactcggggaagcacttgaaattcagtacatcccatcgcatggtgttttcacgtaccacggtgcgtatgatttatgcattttcaagcggctttcctgctcctgtagcaattgcttcgcatagaacggcggcgaatgaaatgcaattaaaatatttgcattgcatatttgttagttggtttgttgtacaactgtttgatgtgtgtgtgtgtgtgtggttgtgtgggagtgggagtgagtatgcatgttagtgtgggtttgggttcaaagtgtgtgttagttgattcgattgattgatgtttgtaaatacgcttctgtagacacacgtatgtttgcgctatttgattgtatacataaatacttatttgactcttggggcattttaaatgatatgaatattaatttttttctcatgcgggttgagtggagggggttttcggttctttgccttgtgcaaccaattgatttgcttacacggcactgacatgctgctatttcgaatttgattttctgtacatgggtgcgttttgtacaaattgatatacatatagtagtacgcctgtcatatacaaatttatatatatctatgtatagacgttaactgagcacatttgacaagcgttgcgcggcctcttaactttgaacattgttttgctttgattaaattgagtttttcatcttaaggacttgctgttcgattgtgtgtatgagtgtgttctggcgtgggtgtgcgtgtgcgtgagttttgaatggttttatttcaagtcgcatttcatttcgactttggcgcaatgagtgctggttatattttttaatagggactgccttttaactagtattagtagtcgccccacacctgtttcaagtagaaaaagaaagagagatgagaacacataatttggttagtcaaaacgtttagtaacgagatccacgagtacgaaagtaacaaaagccaggagggttacgattagctaagcgggataatagccccaattttggtgatgtaacaaaataaaagccaaacaacacgggtttccagtgttcaattgaaatttaccggtatgccagcctttccagagggtccagaaggtcctgactcgcctctcatgcccatcggaccctgcaattatattatttcattataattacgggctaaacttttcgctattttgccacttaccggcagacccataggtccctgatctcccttgtgtcccttttcaccctgccaacgagatttaaaacagatgtagagatgcaaatctggaaatatctggcctattgactcttaccggatcccccttgcgaccgtccaagccgcgttctccctgactgccggtgtgtcctggcggacccatgggtcctggaggtcccggggggccatataactgcgaaggaaattacatcagtttggattaatccacaaggtggtggttgaaatactgtggcttacgtattcgatggtgggcatgtggggggcatcggacatcccgtcatcctggcgacgacgcattttgcggtactgtaagggaattcggattattcatgctcaaaataggattccgattgtggtgtaaggtcacgatagctagatagcatacatccttcaagaactgaactcagacagtacttaccgagtcaccacgatctcccttgtcccccttgacgccagggtaacctggaggacctggcaagcccgggggacccattaatcccggtgggcctatatcaccgcgatctcccttttctcctggtggaccctggtatcctggcagtcccggtggtccttcgatgcccggctcaccgggcagtccgtccaatcctcgtggacccaaagatccgggctctcctggctcaccaggttctcccttactgccgtcccgtccatcgcgtccatcctttccagcgattcctggcggtccaggtggacctcgcaacagtgtcaccggcggatcgtcgtagtcttcgtctattttggtgcctccgggtccgaatatctgcgcgcattacaagtgcgtgtgtgagtgcaagggttggagaagagaagatggcaaatttagtgggaagattaatttatgccacgtggcaccgcccgaggcgttgcacgcgctcgttccacacgctttgatggggaaaacaaaagcggcgcgtaattcgcaggtaaggaaaaaaagttcgcccacaggagaggattgggattgggatgcggatggggatggggtggttttcgtggtggtgcggcgtgttctggtggctgttccgcagcgaaagtcttttgtgtgccacgaaattgtgttaagtgcaagttggagcatccgtgccatcgcaccaccaccatctccccgtcgcccacacttcgcatcccgttgagacaatggctgcatagaaaatctttaaacccgtggaactcaggctcgtacggggctttacgagagtcgaaaataaagtcaagtcagcgacagcgacttctatacgtgcttcgagtgcctatgtgtgagtgccccccgttcgagtgtgtgggtgctctttggcccttgccattgtgtgcgcgcatgtgtgtgtaagtgagtgagtgcattgcgaaagacaattaattctcttttttttagccgtgtttttttggtggtttaatgtgcacgcttcggggcaaatttgcaaggcacagacaaccaggcaagccccaaaaaatacataaagtccaaagttttggatggggcttaaacgtgcactgctcagggtaaagcaattcgaaattaatgtcttaaatcgggatttagcctgaatagtcagaaggtaaaggtttcataagtttaatggctgcaattttagtacaattttttataactaaggaagacacttatagtagctatgccttattaagtcattcattgtaaaggctttcttgtctatgaagtgcttttcctcagtgcattgtggctgacgggaaattaccaaaagttttggaaggcgggggcattcagaccgcattgcacccaaacaaaaacccctattaggcgaatgctaagcgacataaaagggaaactcccgctaaaacaacgagtgcagcggaatatgttaaggagccatggaaaatggctggaataaaggcaaatacggaaaaccacttacacatgtggctcaagtaaatagacacacttgtcgtttgctgaaatattcaatcgcatttgggccccaaaccagttggaaataaaatgggcctcagcttggcattaaagctgagtccttcgtggaaataaggaaaattgctctcctagtagtactgcaggaaatcagattgagagtatccggttagtcctttgattgtgcatatgcattacgttcagttgttcacctctatccag

SEQ ID NO: 36512 - DNA, 1349 bp, DROSOPHILA
atgcgaagtgtgggcgacggggagatggtggtgatattcggacccggaggcaccaaaatagacgaagactacgacgatccgccggtgacactgttgcgaggtccacctggaccgccaggaatcgctggaaaggatggacgcgatggacgggacggcagtaagggagaacctggtgagccaggagagcccggatctttgggtccacgaggattggacggactgcccggtgagccgggcatcgaaggaccaccgggactgccaggataccagggtccaccaggagaaaagggagatcgcggtgatataggcccaccgggattaatgggtcccccgggcttgccaggtcctccaggttaccctggcgtcaagggggacaagggagatcgtggtgactcgtaccgcaaaatgcgtcgtcgccaggatgacgggatgtccgatgccccccacatgcccaccatcgaatacttatatggccccccgggacctccaggacccatgggtccgccaggacacaccggcagtcagggagaacgcggcttggacggtcgcaagggggatccgggtgaaaagggacacaagggagatcagggacctatgggtctgccgggtccgatgggcatgagaggcgagtcaggaccttctggaccctctggaaaggctggcataccggtgtggggcgactactaatactagttaaaaggcagtccctattaaaaaatataaccagcactcattgcgccaaagtcgaaatgaaatgcgacttgaaataaaaccattcaaaactcacgcacacgcacacccacgccagaacacactcatacacacaatcgaacagcaagtccttaagatgaaaaactcaatttaatcaaagcaaaacaatgttcaaagttaagaggccgcgcaacgcttgtcaaatgtgctcagttaacgtctatacatagatatatataaatttgtatatgacaggcgtactactatatgtatatcaatttgtacaaaacgcacccatgtacagaaaatcaaattcgaaatagcagcatgtcagtgccgtgtaagcaaatcaattggttgcacaaggcaaagaaccgaaaaccccctccactcaacccgcatgagaaaaaaattaatattcatatcatttaaaatgccccaagagtcaaataagtatttatgtatacaatcaaatagcgcaaacatacgtgtgtctacagaagcgtatttacaaacatcaatcaatcgaatcaactaacacacactttgaacccaaacccacactaacatgcatactcactcccactcccacacaaccacacacacacacacacatcaaacagttgtacaacaaacca

SEQ ID NO: 36513 - protein, 228 aa, DROSOPHILA
MRSVGDGEMVVIFGPGGTKIDEDYDDPPVTLLRGPPGPPGIAGKDGRDGRDGSKGEPGEPGEPGSLGPRGLDGLPGEPGIEGPPGLPGYQGPPGEKGDRGDIGPPGLMGPPGLPGPPGYPGVKGDKGDRGDSYRKMRRRQDDGMSDAPHMPTIEYLYGPPGPPGPMGPPGHTGSQGERGLDGRKGDPGEKGHKGDQGPMGLPGPMGMRGESGPSGPSGKAGIPVWGDY

SEQ ID NO: 36514 - DNA, 3468 bp, DROSOPHILA
attttatcggtttttattttttaattttcgttttaaatagtgttttttgttgttgtaaaaatagctggttttatttcttgcttaaagtattcgatacagctgtagtggatacaatttatatagtagtaggtaaggtaaaactataattaaaggttgcgacgtcgaggggccggaaacgccgaactggaggcaacctggagcaatttggcacagatgcagatacagattatacagtgcttatgataggatgtttttatgcaatggatgtagcagctatagctcggttcgatgtctacatttaacaataacaagttactaaaattataaccaaagcgcttagatggatgtggatattgccgggccactcctttgctgcagccgccgaggggtggtcgctggcaattagttttttgagcgcggatgctgcagcgcatttagctcgtccttgagccaggcctgccagttttcctgctaggggcgagacagaagttcagccagaaacggccgcagttggatgagcgaatttcagcgagagtgatagagatggttgtaatggtagagagagccaggacccgtcaccaaactaagccagcgtgtgtgttagccaaaccaaaggataattgtgtgcgtgcgcgtgtgcgtaaggcagagggagtgagtgaggaatagggttaaggacagagatagagtatgctaatagcatctactttgcagaaccgttagacgcagcagccacttggcatttgttagcgctaattgcaaatgtcaacagagcgaaacagagccaggactcgtagcggaaatcggaaatgcttaactagtcgtctgtgtcggtgtgcgtgagcctgtctctgtaccagtgcaagtgcctgtgtgttggtggtgtctctgctgttgatggtgcatggtggtaggtaggaaggacgttggttcttagggtctgttcgcctttatgcgcctgtgtttgccatttactgggctggctgactgcttccttttttcactcattgttatgcaaattatcctgatattcatcatattcgttttcattatcctccgcctgttcgtcgtcctcctcctcctcctgctcgtaatcgctggtgttgctttccggctgcgttacatcgggcaaataatccttgtgcacgggcgtcgagatgattggctcctgtgttaggtattcgtgtgtttttgtgtgttcgtggttgtgcgagtgtgtatcccagtgtgttggtgttagtgagagtgtgagtgtttgtgcgaaagcaaaagttagttaaccaacttggacaacaacaagatactctaccaagtagatggaggccacgagtggtgcatgcaatagttccaacgatcaactttccgacagccaattggggttgcacagaaaaaaattatgtaatgcttcaagtcaatccttcaggagctatttaaattgtaggccattcaagtaggcaaatcaatagtttattttctcaaagaagcactaaggcgagaggatatagtagatatcccaatgttaataactttaaatcttttataaaagaaaattcgattcttaaaataactaccaagatatgcgtgggatttatgatttaaagttacaattcaaaactcgagactatgacagatatattcccgatttattagtttttttctgtgcaagataggagttagggaatggggattttcgatggctcttagtcgataacgaataacgcatgctaacctttggcggccgccatccgcagccgggcagcggcagcccatcggcgccgagggggcagggggcgtccagtccgggcacgccctgctcgcccttgtcaccgcgatctcctttccgtccccgtttgccgggcgggccggcatcccctctggagccctgctccccgcgtggcccctcctgcccgggaatgccatccgtgcccttttgtttcgattatccggaggtgtgttcgagtgtttaacggggtgaatggggtgggaggttggtgttgtcagggggtcagaggtcgaaagtggttgaggggtgttcgagagttgtgcatataggtagtgaacgacgccaagaaagagagatacgcatgcaaacagaggtaaaaacaataaaaatggagaaagagaatacacgtattatttaaaattagcgaccacacggagtagaagagcactttctacggaaatatcctacgggcaggtaattcctgcagttgcttaccggcagtcccggatccccgcgctcacccttgtgtcccgtctcgccctgggcgccctgcgaatacagaaaacaaaaaacagatcggttattaccatattgttttcacatcaacggctgttttgcggaaaataccttcatgccatccaagcccggaggaccctgcagcaaatgaaagaaaaacaagagaatgggaaaagcgtgtggttagctcggcggcgtgaagtggaaatactgcctcgaaaataagcattagatgtcctgcggacattgttttagtaaaaaaccatcactttattggaaatgcataattaattcgaaaattatgttagtttcgtttagccattatacaattcggtcattctagtcattccatcgaacgttcgccgtttgagttcgcacacatgccacggcaaagtaccagattaccagaattcacattcgtttcaatttcattcgaatcatacatttgaaatgcagcagcacggataaaaatatttcattttttgtttgttgtgggataatgcactcgaacatcgacattttggtatatgcatgaatatagacataaatacacgtaaatatatatttatttgtatattttttgtccgtttgcaaactcctcatgtttattgggtaattaacaaatttacacttaaaattagcggcttattaggggtttaacctttcgttcgtctacccatataagatatagttatttattgagttaatgttaggttttaatcgcaaaaacacaattcattattctagcctattgatcgagaaagttgagttcgtagttattaagtgagagaatctagagatagtacagatgtcaagtatctatataaagacatagctagatgcaagtaaacacgttgagaggtcaaaagggatagaaaaaattaataattaattacgattaagttacgttctttaccgttaccgcttatgtacacatttggggttgtttgacatttagtggattaaatgaaaattgacatgcaatttgcttgtgtattttgttttccatttgggattattacaacaacgagacacatctaattgaaaacaaattgacatattctttctgattttcgatgccgtttgccgtttgagtaaacattaaagctgcaaacatttccatttgccatttgcatattcgataattcacattcaacttttatgcgaaaatatgcagggctgaggccgtcaaatggcagtatatatactcgtatatatacttttattat

SEQ ID NO: 36515 - DNA, 465 bp, DROSOPHILA
atgcttattttcgaggcaggtcctccgggcttggatggcatgaagggcgcccagggcgagacgggacacaagggtgagcgcggggatccgggactgccgggcacggatggcattcccgggcaggaggggccacgcggggagcagggctccagaggggatgccggcccgcccggcaaacggggacggaaaggagatcgcggtgacaagggcgagcagggcgtgcccggactggacgccccctgccccctcggcgccgatgggctgccgctgcccggctgcggatggcggccgccaaaggagccaatcatctcgacgcccgtgcacaaggattatttgcccgatgtaacgcagccggaaagcaacaccagcgattacgagcaggaggaggaggaggacgacgaacaggcggaggataatgaaaacgaatatgatgaatatcaggataatttgcataacaatgagtga

SEQ ID NO: 36516 - protein, 154 aa, DROSOPHILA
MLIFEAGPPGLDGMKGAQGETGHKGERGDPGLPGTDGIPGQEGPRGEQGSRGDAGPPGKRGRKGDRGDKGEQGVPGLDAPCPLGADGLPLPGCGWRPPKEPIISTPVHKDYLPDVTQPESNTSDYEQEEEEDDEQAEDNENEYDEYQDNLHNNE

SEQ ID NO: 36517 - DNA, 3488 bp, DROSOPHILA
atgtactcgtatttttacattttacgtaaggggtgttcacactgatgaccattttccaagctactattcaaattactcgaccagttgcttatatatttacggcattttgtcaaggttatatctatttttagcgtgagcattaaaatatctaaatatttgagtgttgatatacattggtaagatacgtacccataaaaatatttgtagaaaaatatcgatgtattgatatttttacatttttatcacatccctaactcaaaaaaagtaaacacatttcggaattcatatatttcacagaacatgagtaatattgtacagtatattgtagttcgcagcgacttgcgttccgcccttagttggcccttgggggcggtgatcgctcagagttgccatgccacagccgccgtcattcacttgaattccgaggacgccgacactgtggcctacttgaacgatctggataatatgcacaaagtggtgctggaggtaatgaaatgggtttatattttaaataatgtatatcataggacttctacaacactttactttcttttcaaaatcttaatatttgtgtattttcaatcaaagagatggaattaaagtattacactttttcaggccaaagatgagagtgctctggtcaagctcagtgaaaagttaaaggagaacgagattaaacacaagttgtggatcgaacagcccgaaaatatcccaacctgcatcgccttgaaaccttatgttaaggacacggttcataaatatgtcaagcaccttaagcttttaaaagagtaattcattattgttgtatatgcttattgacactaaaaatttaagaaaaagaaaagcgttgtttttgctttgtattctgtcaaaaacatgaccggagcactttattacataagctcaacgggtccaatataaagttaggccaatacaaatttacattttacaaagaaagcaggatagatataaaaacattgttgttgagccgcagctgaacctaaaagtctacttgaagcttaggattcccttctaggatcttggttaattgtcgtgtgataagaggacagaaatcaaccttcaaccggcgcagtccgctaagcgatttggtcaacttcgcaacgacctcattggacagattgggcgagccactcaggtccagaaactccaaggtagacagtttttgcaatcccattaggtgtagcgttgtaaagttctgattatgtaatatcagggtccgcagttctttaagctgggagaaaatactcagatcgaaggaagtatccgacataggtccaaaagaatccagaatctctagatggcgcagcgaatacgattccgcgatcgacgtaagcagcacgttattcacatggtagtcaagctgggcggaagagtgaataaccaaggtgtggagacgagacagaccgcccagctgtatcacattcatgaagtcggtaagctcgagaacctcgagcatggggcagtaatgtgcgagccgtccgtacagctcattatctttcgcaaacttgacaatgccagggcagcgcagttcgcggagatgcgacagggccgcaagttggattagacacttgggcgacagatctacgcatcctgaaacatttaaaatctccaaggaaattggcagagattttaaactgtcgcctttaatactaaagttttctctgatgtccagactctttagtttcgatagcatctgcaagcagtaaatgtgagcatctttcaggttacaacgcctcaaggatatgttggtaatattaatcaacccattggcaccatcgaacaggtgagtcatgtgggctaggctgacagaaattttgaagaagcttagctctgttagattgggacagcttacacccaacagctgcacaaactcggtcaaatacggccaattcggatgaagcgggccacctgttacacaatgaatgtgttttcctgatagcagcatcaatcttttaatgacccggtgggtcagtgtgcaaacgtccttcatattaagaacatgattgatccgatgcgaatccaattcgtagatcgcctggaatctttcacaactggcggcaaagttgagacgttcatttagtgatagataatcgagcactttccaccaaatgtcatcggtaatgggtagatcgtaggcagaaagagttcctgattcctccaccggcgttgggtgccaggaggtgctggcctgtaaataaagatcatgtccatcgatagtgtgcttagtacaatacaaagcctttgccgcatgggtagcctcataaaaaagaaccgatcccgatctttttttctttttccaatggagtttctctacttttccgaaaatcgagaagtacttcaggagctggtacttcaaaaaccgcctactcccggagatcgtcagctgtcgcacaacctcgcgatcttcggtgtacgccacaccacgctcaatgtaaaaatttttaatatctggcctcatgcggaacattgcttttgatttgggcttactttgatttcaaaaagatgtgaaactcaccgattactgtgagatatcatgttttttaaagccgtgcttataagacccattccaaaaaaaaatatcatttcattttatcggtttttattttttaattttcgttttaaatagtgttttttgttgttgtaaaaatagctggttttatttcttgcttaaagtattcgatacagctgtagtggatacaatttatatagtagtaggtaaggtaaaactataattaaaggttgcgacgtcgaggggccggaaacgccgaactggaggcaacctggagcaatttggcacagatgcagatacagattatacagtgcttatgataggatgtttttatgcaatggatgtagcagctatagctcggttcgatgtctacatttaacaataacaagttactaaaattataaccaaagcgcttagatggatgtggatattgccgggccactcctttgctgcagccgccgaggggtggtcgctggcaattagttttttgagcgcggatgctgcagcgcatttagctcgtccttgagccaggcctgccagttttcctgctaggggcgagacagaagttcagccagaaacggccgcagttggatgagcgaatttcagcgagagtgatagagatggttgtaatggtagagagagccaggacccgtcaccaaactaagccagcgtgtgtgttagccaaaccaaaggataattgtgtgcgtgcgcgtgtgcgtaaggcagagggagtgagtgaggaatagggttaaggacagagatagagtatgctaatagcatctactttgcagaaccgttagacgcagcagccacttggcatttgttagcgctaattgcaaatgtcaacagagcgaaacagagccaggactcgtagcggaaatcggaaatgcttaactagtcgtctgtgtcggtgtgcgtgagcctgtctctgtaccagtgcaagtgcctgtgtgttggt

SEQ ID NO: 36518 - DNA, 1488 bp, DROSOPHILA
atgttccgcatgaggccagatattaaaaatttttacattgagcgtggtgtggcgtacaccgaagatcgcgaggttgtgcgacagctgacgatctccgggagtaggcggtttttgaagtaccagctcctgaagtacttctcgattttcggaaaagtagagaaactccattggaaaaagaaaaaaagatcgggatcggttcttttttatgaggctacccatgcggcaaaggctttgtattgtactaagcacactatcgatggacatgatctttatttacaggccagcacctcctggcacccaacgccggtggaggaatcaggaactctttctgcctacgatctacccattaccgatgacatttggtggaaagtgctcgattatctatcactaaatgaacgtctcaactttgccgccagttgtgaaagattccaggcgatctacgaattggattcgcatcggatcaatcatgttcttaatatgaaggacgtttgcacactgacccaccgggtcattaaaagattgatgctgctatcaggaaaacacattcattgtgtaacaggtggcccgcttcatccgaattggccgtatttgaccgagtttgtgcagctgttgggtgtaagctgtcccaatctaacagagctaagcttcttcaaaatttctgtcagcctagcccacatgactcacctgttcgatggtgccaatgggttgattaatattaccaacatatccttgaggcgttgtaacctgaaagatgctcacatttactgcttgcagatgctatcgaaactaaagagtctggacatcagagaaaactttagtattaaaggcgacagtttaaaatctctgccaatttccttggagattttaaatgtttcaggatgcgtagatctgtcgcccaagtgtctaatccaacttgcggccctgtcgcatctccgcgaactgcgctgccctggcattgtcaagtttgcgaaagataatgagctgtacggacggctcgcacattactgccccatgctcgaggttctcgagcttaccgacttcatgaatgtgatacagctgggcggtctgtctcgtctccacaccttggttattcactcttccgcccagcttgactaccatgtgaataacgtgctgcttacgtcgatcgcggaatcgtattcgctgcgccatctagagattctggattcttttggacctatgtcggatacttccttcgatctgagtattttctcccagcttaaagaactgcggaccctgatattacataatcagaactttacaacgctacacctaatgggattgcaaaaactgtctaccttggagtttctggacctgagtggctcgcccaatctgtccaatgaggtcgttgcgaagttgaccaaatcgcttagcggactgcgccggttgaaggttgatttctgtcctcttatcacacgacaattaaccaagatcctagaagggaatcctaagcttcaagtagacttttag

SEQ ID NO: 36519 - protein, 495 aa, DROSOPHILA
MFRMRPDIKNFYIERGVAYTEDREVVRQLTISGSRRFLKYQLLKYFSIFGKVEKLHWKKKKRSGSVLFYEATHAAKALYCTKHTIDGHDLYLQASTSWHPTPVEESGTLSAYDLPITDDIWWKVLDYLSLNERLNFAASCERFQAIYELDSHRINHVLNMKDVCTLTHRVIKRLMLLSGKHIHCVTGGPLHPNWPYLTEFVQLLGVSCPNLTELSFFKISVSLAHMTHLFDGANGLINITNISLRRCNLKDAHIYCLQMLSKLKSLDIRENFSIKGDSLKSLPISLEILNVSGCVDLSPKCLIQLAALSHLRELRCPGIVKFAKDNELYGRLAHYCPMLEVLELTDFMNVIQLGGLSRLHTLVIHSSAQLDYHVNNVLLTSIAESYSLRHLEILDSFGPMSDTSFDLSIFSQLKELRTLILHNQNFTTLHLMGLQKLSTLEFLDLSGSPNLSNEVVAKLTKSLSGLRRLKVDFCPLITRQLTKILEGNPKLQVDF

SEQ ID NO: 36520 - DNA, 3957 bp, DROSOPHILA
gcaagaacaatcgttgcctcaagaagggtgttggcaatgtgtcaccctgttactacagtgagtaccgatgaccttaatcaacattagactgtgtatttactagaccctctctcaattccagacattcctttagccattacgtatccgcatttcatgcatgccgatcccagtctgctggagccattcgatggactgcagccgaatgtgtcgcgcttcacctccaccttcgtggtgcaaccggtgagttgaatcgaaagtagtcccagtttgtcaattcaataatactttatgggtttcagcaactgggagctccgatgcagggcacccacctgcgattgcaggccaaccaggtggtggggaaggtgaacttcaatcggatgatgacgcccttcgagaacatgatcctgccgctgctgtgggtggatctgaacatcgatgtcctgtgcctgaccctgcgtctgctcattcatggcatcaagtggggcttcccgctgctgcagtggagcgctgccttgggaatgctgctggccggcgtttaccagctgtgcagcgccctgttgctttgcttttggccaacagccaggcagttccagaaggtggatcaagtggaacgcggcacggcggttcaggtgattggagttggactcggtttggccaccggacttcgaaaaccatcgattcatttggaccctgaggagcagcaccatctgctcctcggcggcggcagcttcattcccaagatggccaagacgtaacccagcggaggatcggaatgcatacctctaattaagatggggcaacactgtgatatttaggcttaagattcggtgtaaattattgtgctcatcggaaacaacttagggaacgtccttgcctacgtactagttaacgataactataagctagggcaacagttagagtggtaacaataagcaatatacagctgagcttgcactcgataaatacaggtcgatagctatgtaaacaacgtatccttgattcagtgggtggcgatcgtgtcctcaatccacttcatatagtacgaggtgcgggtgtagacgtctggaaagccttccagggcacagcccgatccgaaggaggtgactcccaccagaatccagggcccgtcgcggctcaagcggcactgcagcggtccgccggagtcgcccacgcaggtgccgccctccccgttcagcttgccggcgcacaggtgaccaccgtggatgttgacgaagctgccgtaggcatctctacacctgcaaaaaggtaatagtaaactattatccaatttaaagagtacacaggcttaagacgtcacttacctgccattctggtgcaatggcacctgtgttttcagcagctgattggagagatcaccactaatgttggccttgccccatcccgtggcaacgcagtccacaaaggcaatctcctttggctcatcactgacttttgggtgcttctgctcagcagaatcatccgaatcccggcgaggacccagcttcattagcttatcgttgcgtcttcgcgaacgcttgtggctgcgcggggagcgttgcgccagcgcttgacgcatcctgctgaggatcttcatgttcatcagttccttcatgctgggggccgtgacatttcgatagcgccgacgactctggacgctgcgcagaaagttatcgatcttttcgggcacatcttctagctccagctgctggattagcacatcctcatcggccgatgaaggtggagacactgtctctgactgggcctgatccggcgattcggctaggagaaagggcaaacagatccgccggatattggaggccctggtgagatccgctggctttgaaagcttcatcagcaccacgtcgtgcttgaagttgtggtagcgatggtgcatcacgatcttctcgacgggaatacgctgctcgttgcccgactccacatcgcgatcgtgctcgcctaaaaccaccgtccacagcggtggaatgggcaggttaaagagatcgctgggtaaggtattgcacatattaaaatccagtttatggggtttgtgttgattcaacttacttgtgaacacagtgggcggcggagaggatccagtactggtggatcagcaccgccccgcaccagtggcccaggaatccgagcgaggggtgcaacagctccagcgaggcctgccaggggaactggccctcattcgtggcagctccagcaatgatcctcggacctctacgcgccggacgacatccacagtctgcgattaaattagaatcaccataatcgtttacatatgtgtcagtaagattattacaaattattcagaaattaataccccttggtctcgttaaaattattttacaggtttatttggctcgtacgagtacactactaaaaagttgattaatagtttcatcacctttcaaagtaataacttagttacgaggtgttgaaatacgaatggtgatcgatcaatctattgtagtttacgattttcctttttttttatgagcatacttcttccgatataaaactcatttgtataaaataagcgtaagagatatggaactaaattaatttattaaacttggtgttatgacataattcggtaaaaatttataaaaatatataaaatttgattatagatgctattttgcagaagttagtctaaataacataatccacttcttaaaacttgtctttggaaacccatttaaatttttctattttcgttatagttctatagttttttacccacccgtttcgaactgcctggaagagggcagcagcaggagtaggcacagccagctcaaggtcgctgtacttgtcgccgggatctgccagtggcattgcgactgtgacagcgactgtgaccgcgactgtggccgcgactgtagccgcgactttggccgcgactgtgtttgcgactgcgaatgcaattgcgattgtgatggcttcatcatcttggtggccgctcctcgggcagctggcgcagctcagctgctcatcgcgcgcatgactgacccacagaggccgttttcggatcgtatctctatatagtatctgtaaatctatctgtatctgcagctttgtcctgctgctgatgaccagatgcttttcactttcacgctgccattcaaatgggcggtcgagggtttttctttttccggggagactggctcggggatcgggaactgggatcggaggcggatcgcgtctctcggcccaagcgcttttttccggccttaagtactataatttacgagatctcccaacttcgctttactttacttttccttccacgaacgcgcattaattagtccgatggctgggcggcgacgacttggcgaatagtgtgcagaagctgtgctttcggtttattttattttttttttatttttttgccagaaactctggctctccagtttccactctcgattatataacgactttagatgctgactacgcctgcggctcgacgataataacggtcactctgactgactgcttttcgttttcgatttcgtttagcgcgcgtgcgcatgcgcgacaaccagcaaggttcggtgttttgacggcttttgatttggctttttgtgctttggcgccagatatgcgagtgcgaatcgctggggacgagcgccaaaatgcaactgtgctatgctcgggtttgccagcaaacatttaccgtttcgacggcagagcggcgcaaacgtcgccgtcgactgcgatgtggcatgcccccgctccaccaccaccaacaacaacaacaacaacagccgcaacaacacctataccaacgccaacagaagcgcagccaacgaaagtgaaaagacagcgggacgctggggggcaatcaaaagccacatagatgatgatggccagctgagatggcgttgggagaaaaaaagggtaagttgggcctgctcaacccacggaaatcatttaccgtggaaagcggca

SEQ ID NO: 36521 - DNA, 1329 bp, DROSOPHILA
atgatgaagccatcacaatcgcaattgcattcgcagtcgcaaacacagtcgcggccaaagtcgcggctacagtcgcggccacagtcgcggtcacagtcgctgtcacagtcgcaatgccactggcagatcccggcgacaagtacagcgaccttgagctggctgtgcctactcctgctgctgccctcttccaggcagttcgaaacggactgtggatgtcgtccggcgcgtagaggtccgaggatcattgctggagctgccacgaatgagggccagttcccctggcaggcctcgctggagctgttgcacccctcgctcggattcctgggccactggtgcggggcggtgctgatccaccagtactggatcctctccgccgcccactgtgttcacaacgatctctttaacctgcccattccaccgctgtggacggtggttttaggcgagcacgatcgcgatgtggagtcgggcaacgagcagcgtattcccgtcgagaagatcgtgatgcaccatcgctaccacaacttcaagcacgacgtggtgctgatgaagctttcaaagccagcggatctcaccagggcctccaatatccggcggatctgtttgccctttctcctagccgaatcgccggatcaggcccagtcagagacagtgtctccaccttcatcggccgatgaggatgtgctaatccagcagctggagctagaagatgtgcccgaaaagatcgataactttctgcgcagcgtccagagtcgtcggcgctatcgaaatgtcacggcccccagcatgaaggaactgatgaacatgaagatcctcagcaggatgcgtcaagcgctggcgcaacgctccccgcgcagccacaagcgttcgcgaagacgcaacgataagctaatgaagctgggtcctcgccgggattcggatgattctgctgagcagaagcacccaaaagtcagtgatgagccaaaggagattgcctttgtggactgcgttgccacgggatggggcaaggccaacattagtggtgatctctccaatcagctgctgaaaacacaggtgccattgcaccagaatggcaggtgtagagatgcctacggcagcttcgtcaacatccacggtggtcacctgtgcgccggcaagctgaacggggagggcggcacctgcgtgggcgactccggcggaccgctgcagtgccgcttgagccgcgacgggccctggattctggtgggagtcacctccttcggatcgggctgtgccctggaaggctttccagacgtctacacccgcacctcgtactatatgaagtggattgaggacacgatcgccacccactga

SEQ ID NO: 36522 - protein, 442 aa, DROSOPHILA
MMKPSQSQLHSQSQTQSRPKSRLQSRPQSRSQSLSQSQCHWQIPATSTATLSWLCLLLLLPSSRQFETDCGCRPARRGPRIIAGAATNEGQFPWQASLELLHPSLGFLGHWCGAVLIHQYWILSAAHCVHNDLFNLPIPPLWTVVLGEHDRDVESGNEQRIPVEKIVMHHRYHNFKHDVVLMKLSKPADLTRASNIRRICLPFLLAESPDQAQSETVSPPSSADEDVLIQQLELEDVPEKIDNFLRSVQSRRRYRNVTAPSMKELMNMKILSRMRQALAQRSPRSHKRSRRRNDKLMKLGPRRDSDDSAEQKHPKVSDEPKEIAFVDCVATGWGKANISGDLSNQLLKTQVPLHQNGRCRDAYGSFVNIHGGHLCAGKLNGEGGTCVGDSGGPLQCRLSRDGPWILVGVTSFGSGCALEGFPDVYTRTSYYMKWIEDTIATH

SEQ ID NO: 36523 - DNA, 3775 bp, DROSOPHILA
cctacgagaggcagcttctggagtacaaggagatcatcgagaagatcaagttgctctacggcgaggaggacgcggaccgactggtggcccagttcaagcgtcaggaggacgagaactttgcccttttcaactatgtaaacgaactgagtcacgaggttgaagtactcaacgattccactcaggagctccaagatgaaataggtgtgttgttggattctgaattaggctatagactagtctttatactaaaatttgtacataataatccaaacagagcgccagaaatcggagcagaccgagaaggagttgaagcttaagaccgaggcacttgactatctaaatgccgagaaggagcggatcgagcagctggcggaggagaccagagaaaggaagcgaaccctgagcatcagattagaacagcttctcaagggcatcgaggatatattcaggtgcaatctgcgagtatatatccttactattgactgtctaccaaattccattttaattttagacaattggcctgtgacgatgctcctatccttaatgtgctcagtaccaaaacctttttgacagttcacaatgtgaagcttttcattggcgtcattgaacgccgggtcaacctgatcatcagcgccatcaatatcgaggataactccaacaaaatactggcccgaaaggatcgtgttcccaaattcaacatacgggaatcggcgaaaactaaaaactaagaattagtaggcattcatttttctccaaaatattaaatgataaccaaagtatctacacataccgataaaacttatatcctaatcttataaatatatgaaatacatgctgccgaagtttacaacaagctagttaaatggaaatccgattggacgattcaaattcgatcttatttgtttaatttaaactgtccgtttattgcttaaacctataaactacagtctattcaatgaacacccaaggtttttaatagttcgagttctgattgaggccattagattaaataaataacctgacaagcgtccacaataagaagccagctatgacacagagtagggtcacaaagctgtagtgcaggatcttcaatctaataatgtatatgagatcattttatgcaaatatagaacatctttccacaagaacataccgataaaagagtcgccgaccctgttcaagagattcctgcgttggaggttccttggtcaggtaaagtcgcatgccgaagagggccttccggaagtactctttccagtccaaagtctccatatcgaagttgtacaatcgccgatcctccggagacatcatcactctcagccgatccgtgcttttcgtctcaaagtgccaactgttgttcataaagtgctctagtaccgcaatgttggcatgtatacttctgtacagcttcaccagacgaggctttcttcccgagagtctcagggctagatcatagaaatagcctggtaaagtgtgatagaagaaggcggctaaggggaaaattcgtggatttgagatgttgtgcacgaacgggtaccatatcatcttggtaagtggaaaatcattccggtggatcagtgagtgctttatgaagtccgtgttgagtagtagattcttttcactgggagctaaggtgtagatggcgggctgggatatagcatttcgttgggatttgtctttggatgtttgccatatgctggccagagccgcatttgcacagtagtccacgggcaccaagctggcatagccatctttatcgtaggtggtcaggcggaggactccatggctcacgccataaatgtgagcaatgggtccgtagagattatcgatccaaccggaaacaggctcctcatgggtcgcaattactgtgagaaagccatgtttatcagtttatcctctccttttaaccacattgaatactcactgactgatggccggaagatactcaggggaagatcgccgaactctcgtaggactacatcctccgccaaggctttggtgtaggtgtaggtgttgggaaagttcccaactagagtgggtgccagtttgtccatcatttgctcactcagtagctcactcatggccagaaccgagttcgcgtcgcaggtcaggtgttcgggatagaatttctcctcgatgcgaaaaataacgcagttggagaacgccgttgaaatgtgcaaataggcctccagctgaagcatctccttggccaactggagcatgagtctggtgccacgtgtattgatggccagtgccacatgaagtggctcattgaaacgcacggtggctgctccatggatgactatgtgcacctcagaaactaggagcttgcgatctgacctattaatgcccagatcggggtccagacagtcgccagcgatgacgaagattctcttcagggcatctggctttgcctttagcaggacttcaaaaagcttgaaaagtgaaagcaaatcctatgaggggctctaccttgttgtaacttttgacttactgggtccttctgccatatggcaagacgttcctgaatatcctttccccttttgggtctcatcatagcgtagatacgttttacttccgtcgttcgcaagagcttctcaataatcactaggaaaatgtaggtgaaatacaaacagttcacgtgggttcctttcctcggctcataccctttcccagaaacccggtggcgcctgttaggaacaccaccttgtctttataaaatccttggatgccgttgtccatttccgttctggatacgatattgttcggcgtcattgtgaacaaattccaccgatgcgataattgcgagttaaagacacacttcaataggaaatcaattgggtatggtcgcgctttttatatttgctgcgacggtagacgcagtgccatttgaacagtgacccggccaatcgtatgctaaattatatgaaatacacctgaaatacctaatgaatagtcacagctacggttgaattgcatttctcggttctcggctgatttgagaactgcactgtcatccgtgctcgtttgttttactttaaacactgttgcagcacaattggaaattttgttaaataatgaaagttcgttctccacgccattttgattagcgtaactcagaaattaaatgcagatattatgacaaatattcttcctggttttatttgaagaaaaggttaacagggactggaaatattcgttttgtaatatttaggatcggcttttgggatccaaacaagaatatttctctttccctctttttccaaataatttaaatattttaaaaaccgctgaaaaaaacttaagtcgaacatttttacggattataccttgatcgtacgaaacatacaaaaaatatagatatgtaaaatatagatgtatgtagaaagcttaaaataaatttgtcaaaaataaattgggtccttgaataaattttcaacgaacggaagcctttttaaatttgtagaaattttgtagaaaaagattataaattcccgacatatcttagaaattagtttataaatttcaaagcatactcttaggcatccacctaaaaggagttgtaaaaagttgctaacgaagtcatacaaatgtgctctactctttttttttatcatatcgagtgatccaggaatcgaaaggtgaagaataagccaaaaaggatcgcatcccaatggctttgatggctccgtaccaaaaatttacaaatacaacaaactgtatttatttagtcgattgcaaatttatttttcgtctctaaaataaatctctgctg

SEQ ID NO: 36524 - DNA, 1491 bp, DROSOPHILA
atgacgccgaacaatatcgtatccagaacggaaatggacaacggcatccaaggattttataaagacaaggtggtgttcctaacaggcgccaccgggtttctgggaaaggtgattattgagaagctcttgcgaacgacggaagtaaaacgtatctacgctatgatgagacccaaaaggggaaaggatattcaggaacgtcttgccatatggcagaaggacccactttttgaagtcctgctaaaggcaaagccagatgccctgaagagaatcttcgtcatcgctggcgactgtctggaccccgatctgggcattaataggtcagatcgcaagctcctagtttctgaggtgcacatagtcatccatggagcagccaccgtgcgtttcaatgagccacttcatgtggcactggccatcaatacacgtggcaccagactcatgctccagttggccaaggagatgcttcagctggaggcctatttgcacatttcaacggcgttctccaactgcgttatttttcgcatcgaggagaaattctatcccgaacacctgacctgcgacgcgaactcggttctggccatgagtgagctactgagtgagcaaatgatggacaaactggcacccactctagttgggaactttcccaacacctacacctacaccaaagccttggcggaggatgtagtcctacgagagttcggcgatcttcccctgagtatcttccggccatcagtcataattgcgacccatgaggagcctgtttccggttggatcgataatctctacggacccattgctcacatttatggcgtgagccatggagtcctccgcctgaccacctacgataaagatggctatgccagcttggtgcccgtggactactgtgcaaatgcggctctggccagcatatggcaaacatccaaagacaaatcccaacgaaatgctatatcccagcccgccatctacaccttagctcccagtgaaaagaatctactactcaacacggacttcataaagcactcactgatccaccggaatgattttccacttaccaagatgatatggtacccgttcgtgcacaacatctcaaatccacgaattttccccttagccgccttcttctatcacactttaccaggctatttctatgatctagccctgagactctcgggaagaaagcctcgtctggtgaagctgtacagaagtatacatgccaacattgcggtactagagcactttatgaacaacagttggcactttgagacgaaaagcacggatcggctgagagtgatgatgtctccggaggatcggcgattgtacaacttcgatatggagactttggactggaaagagtacttccggaaggccctcttcggcatgcgactttacctgaccaaggaacctccaacgcaggaatctcttgaacagggtcggcgactcttttatcgctggcttcttattgtggacgcttgtcaggttatttatttaatctaa

SEQ ID NO: 36525 - protein, 496 aa, DROSOPHILA
MTPNNIVSRTEMDNGIQGFYKDKVVFLTGATGFLGKVIIEKLLRTTEVKRIYAMMRPKRGKDIQERLAIWQKDPLFEVLLKAKPDALKRIFVIAGDCLDPDLGINRSDRKLLVSEVHIVIHGAATVRFNEPLHVALAINTRGTRLMLQLAKEMLQLEAYLHISTAFSNCVIFRIEEKFYPEHLTCDANSVLAMSELLSEQMMDKLAPTLVGNFPNTYTYTKALAEDVVLREFGDLPLSIFRPSVIIATHEEPVSGWIDNLYGPIAHIYGVSHGVLRLTTYDKDGYASLVPVDYCANAALASIWQTSKDKSQRNAISQPAIYTLAPSEKNLLLNTDFIKHSLIHRNDFPLTKMIWYPFVHNISNPRIFPLAAFFYHTLPGYFYDLALRLSGRKPRLVKLYRSIHANIAVLEHFMNNSWHFETKSTDRLRVMMSPEDRRLYNFDMETLDWKEYFRKALFGMRLYLTKEPPTQESLEQGRRLFYRWLLIVDACQVIYLI

SEQ ID NO: 36526 - DNA, 2927 bp, DROSOPHILA
gtggtggcctgcagttgacgcacacttcaagaatgtctatgaaaagcaggccttgctctaatatcagcgattggtagtactcggtggcctgtttagaggacagacaggacaggaaacaacgctctttgtcatcgcttgtaaatccggccagggcgctgaggagctgcttctgcggaacaaaattaagggagaggcagtgggtaaggatctcccggggagtagtagttgctggaatgtgggcgggtagcttagcattcttattggcgcagttgaacaccaactttaagtggcaagtggtgtcggcctggtctaacagttccagccgatggagcagactttccacttgttcgagtttattagcaggcaaaattccaatggtatccccgggctggtaatcgaacgtggactccagagtcagctccaccacgcgttttgtctctgtagccttatcagcagacacgagcaccttgctctcctttatctccactgaacttggctggaaatcagggcgggcgaatgggaactttaaaatatcgcagcatttaagttggccgcatgtttcggtgggtctctacaaagataggcttgaaaaggctattctcacggtagctcctaactcacctgctcttcgtccgtgaaacacaactccagattaccgaccagcggcttggcggggatgtattcactcaatttataagctcctaagtccatttttcccgtatttaccaattcgcatgggcagcagtcaaatcgttaacaagcggtagtgttggaaagagtttatttacagcttcccttatcaagggaagctgtaaaagattaaatgtttattttaaattggtcttcatctttgccaaatacaacattaaggattatccttaaattatttgttttaaaaattatctgtacctaacatttcttagcttgggaaggtacctaatcagaaacctacctttgtcaacactgtacgacatcggtgttatcgatatgcacagttatcgttagcatgaggagctttatttgttgctgaacaacaaaccgaaatctccagtaaattcggtaaggatcaattttaaaaagaatggcaggcaacgccaacagtgacgacgaattccatgatgcgatcggggaggagataaccgaaaaagaggccaccagcacgcggcagagcgaaaaggacgtggatgagatcgtggagaagcaaaaccagctggcgttggatgacgaagcggaacagggcgcggctggtggagattccatcgcgacaccaacgacagtggactctgagctaaccattgaggagttgcgcgaacgggagaaggatctcagcccagagcagctgacagctaacaaagaaaaggccgataagctgaaagttgagggcaacgagttgttcaaaaatgacgacgccgaaggcgccgccaagacctacacagaagccttagacatttgcccctcggccagctccaaggagcgagcagttctctacggaaacagggctgctgccaagattaagctggaggccaacaaagcggccatcgacgactgcacaaaggctatagaactgtggccggagtatgtgagggtgcttttaaggtctttattttaatatctcccttaaaatttctaaagtctaattacatcttacaggcgcgccaagctctatgagcaagaagacaagcccgacgaggctctggaggactacaaaaaagttactgagatcgatcccggtcagcaggaggctcgcgaggctcagattcggctgccgccaattataaacgagcgcaacgagaagctcaaaaacgagatgatgtccagcttaaaggacctgggcaacatgatactcaaaccgttcggactgtctacacagaatttccaaatgcaacaggatcccaacacgggctcgtattccatcaactttaaataaaaacctagctagctaatgctctgcagatcaacaaataaagccgtattcgtggatgatgtgtaaaataatagtcaaactgtagcaaaacgtatcaaattcagttctcgtacattttcacctctgtagaatatgcaaatgtgaacccattttcataacaaacggtaccaaaaaaatccattaattatatttaatgtaaaatgcatggtgtgatatgctattaatatatgaggtttgttccaaattttactgtctggttttacaaaattcaaacggttcttttgagaggtttttaaaagtcgtgaaccagtcgcagttctcatgcaatcacaacaaaatagccacttgtcatctctgttacttcgataccgataaccataaatatgggcggaagcaacagctgactgtgacacttgtgttccccgtgaagaagaagagcaatttgttggaaaaaatcgccattcgcaaattacaatattagattcgtgcaatcgcaggcattaggtgcccccttattgtgggccaacccagtggcgtgaccgtgagcagtagtgcatgcaaagatccaagagaacagcgctcccgcactcctccttaccctgatatgagagcagtcaggcggatcgtggccagttgattccatcctagttgccaacatgttccggagtcgcagctggtttggcggaccctggggtgggcggcccaaaaaccgcttgtcgctggagcaccttaagtacctgtacagcattctggagaagaacaccaccgtgtcggaaagtaatcgtggcctgctggtggagtcgctgcgctgcatcgcagagatcctgatttggggcgaccagcatgactcgctggtgtttgagtgagtattaagcatctcaatgtaataaaccttaatctaattatttgcaacagcttcttcttggagaagaatatgctatcgtatttcctgcacataatgcgacaaaagagtggaggctcgagtttcgtctgcgtgcagctc

SEQ ID NO: 36527 - DNA, 852 bp, DROSOPHILA
gttagcatgaggagctttatttgttgctgaacaacaaaccgaaatctccagtaaattcggtaaggatcaattttaaaaagaatggcaggcaacgccaacagtgacgacgaattccatgatgcgatcggggaggagataaccgaaaaagaggccaccagcacgcggcagagcgaaaaggacgtggatgagatcgtggagaagcaaaaccagctggcgttggatgacgaagcggaacagggcgcggctggtggagattccatcgcgacaccaacgacagtggactctgagctaaccattgaggagttgcgcgaacgggagaaggatctcagcccagagcagctgacagctaacaaagaaaaggccgataagctgaaagttgagggcaacgagttgttcaaaaatgacgacgccgaaggcgccgccaagacctacacagaagccttagacatttgcccctcggccagctccaaggagcgagcagttctctacggaaacagggctgctgccaagattaagctggaggccaacaaagcggccatcgacgactgcacaaaggctatagaactgtggccggagcgcgccaagctctatgagcaagaagacaagcccgacgaggctctggaggactacaaaaaagttactgagatcgatcccggtcagcaggaggctcgcgaggctcagattcggctgccgccaattataaacgagcgcaacgagaagctcaaaaacgagatgatgtccagcttaaaggacctgggcaacatgatactcaaaccgttcggactgtctacacagaatttccaaatgcaacaggatcccaacacgggctcgtattccatcaactttaaataa

SEQ ID NO: 36528 - protein, 256 aa, DROSOPHILA
MAGNANSDDEFHDAIGEEITEKEATSTRQSEKDVDEIVEKQNQLALDDEAEQGAAGGDSIATPTTVDSELTIEELREREKDLSPEQLTANKEKADKLKVEGNELFKNDDAEGAAKTYTEALDICPSASSKERAVLYGNRAAAKIKLEANKAAIDDCTKAIELWPERAKLYEQEDKPDEALEDYKKVTEIDPGQQEAREAQIRLPPIINERNEKLKNEMMSSLKDLGNMILKPFGLSTQNFQMQQDPNTGSYSINFK

SEQ ID NO: 36529 - DNA, 3710 bp, DROSOPHILA
gaaccacttgaccagcatcgatagtcctataaaagtgtcgatgtttcgataaaaggccacacagtggaatactcgcccaacttagctgcggtcacacttagtctgcaattttcaagaattacacacgcgcggatgtttttcggttcatcctaagaaacataaaattgcaacgcaaagagcagcttaaaatcgcgaattaacctttaggcttaatagtaaaaataaagagtgtacatcgtacacaattcgcatttgtcggcacaattggtgcgagtgcgacaacaatagcaggccgagtgcagcagtgcgattgcagcaaagcgaagggaaaaaccaaagaagttattaatttcggagtgttgctctgaaagcggcttagatatacccaaatcaacaatatacttccgtatagttatggaagcctggaagggctaacaaaaaactatacgggaaggcagttttcggcccgcgtaagaacagcaacaacaacagacactggaagaacaagactgcgacggccactccttttgtgtccgacttcgagatgtgtgcgtgttcgtgtccgcgtccgcctttgtgtgttgagcaattgaaaactggtgattgctgaataaattaaggtagctaaattaataattagcaaagcgagtggggccaataaaaagtgaaaatcttctgcgttttcgtaaagcgaaagaaactacagctacagttagagataagaagagctctcgcacacatacacaaagcgcaggccgaacgagcgagtgtgcgtgcttgtgcatgtgtttatgactcacggctggttcagtgagagagagaaagagagcgagagtggtggcttgagtaacagtaacattaacaataccgaacgcgaaacaacaacaaatctgccgagcgtttagaatttcccaagtcgagcgttactaaacgcattgaagaaaatcccccccacccacacacactcttatacaataaagagagagaaagccgctggaaaatgagcttcaccaagtggttcaagaagaagggcggagatgggggatcgatctcagagatcggtgcacccacaaacttccaacggcacttccatgtctcgcgcaaccaggaaaccggcgacctggaggggcttccagctccatgggtgcgcctaatgaactcacagatcactcgcgatgagcaggacaagaatccagatgctgcctaccatgccgttaagtactacaactattcgattaagaagaaagagaacgaggtcttcaagcccttcatcaccgaagatgtgatccacgaggagtccaaggagatagaaaactatgtcaactacaaaaacaagcacaagtctcaggatcccgaaaagtccgacgacgatggcagttcgacggccacggagacggaaagtagcagcggttgtggctcctcggcaggtaatagtaacagcagcagcatcaacgacagcagccagcagtcgacggtgccgctggacgccctagaggaggtgttcaaggagctcaagaccaatctggagcaccgcgaaacgctgaaggccgcaccgcaagagcctccaccagtaccgcccaagaaatcgccccacaccataccgcccaaaccgcaaatcaagcccaaacctcgtgtcacacagaagttctcacgcacttcggatatacgtcgagatgaggactccgacaaccagcacaagatcaacacagacacaatcatcatcaagccagccgtaggggcccaggatgctggagcggatgataatcccgacgagacgatactgcgccgctccaaggagaagagggcccagaaaaccgatgccgaaatctacgttgagctgcgggcaatttgcaattcagatgacccaagggaacgctacaagaccacccaggaggtgggcaagggagcttctggcatagttttcatagccgccgatttgcagaacgaatcgcaggtggccgtcaagaccatcgatatgaagaaccagtcctcgaaggatctcatactcacagaaatccgagtgctcaaggacttcaaccacaagaatctggtaaactttctggatgcctaccttctggagcccgaggaccaactgtgggtagtcatggagtacatggatggcggcccattgactgacgtcgttaccgagactgtgatgaaggagcgccagattgcctgcgtctgccgcgagacactctacgctattagttttctgcacgctaagggcattatccaccgggacatcaagtcagacaacgtgctgctgggcatggatggcagtgttaaggtgacggactttgggttctgcgccaacatcgagggcgatgagaagcgccagacaatggtgggaacgccgtactggatggcgcccgaagtggtcacgcgcaagaagtacggcaagaaggtggacatctggtctatcggcatcatggccatcgagatgatcgaaggccagccaccctacctatacgagactccactccgcgccctctacctgatcgccgccaacggtcggccggatatcaagagctgggataagctgagtcccaaccttcaagactttctcgatcgctgtctccaggtggaggtggaccgaagggccaccgccgacgagttgctcagccatccgttcctcaacgactgcagcgaggtcaaggccctcgtgcccaacatcaaggcggccaagaaggtgctccgacgcaacgtatagttgctatgcaatcaccggacggccaggctgctctacgcgtgatcggaagcggaatcgggttcgggttcgggatctgccccgtgtgtataatgagttttcaatgtaaatttgttttgtgtggacgaaaccggaactggaactggaatagaatgctgaccgtagtctttgtagtatgtacaaccgtagaaatggcgaaagcaggactaggacccggcaactccccttcgaaaacaggtaagtcccaggtagcccatttggccaagctcattattcaagcgaaacgatatccatttcaacggaaaccttttcgcaatcgcacatgtggaaacagaggctgtcggtttattgtccgatgggttagtttctctttgctgtctaaattttgtcaaagacctagacccaaaacagcgatagttgcctatcttgggacttttaatcagtaactcacttcggttcgaacaacagattaaattcgatcaaggttgcgaagtgcacgaggcttttgtctctgattaattttatttcttgtatacctgggaaagggaatctttaacgcggtcaattgcttgcaacgccctatagagcaaatatgttatggtgccaagacagcttaatatgatttagaaagtcatccatcagagaaatggactgggaccagtggggttggatttaatccaaaaatgattcacttctacaaacagttatacttaaaactcatgttttattcaacaaatatttaattttcttcgtttcatatgattcaaacatgatttgaaaaaaccagatgatgataacttaatgcgttattataaaagacacattttttagttttctggtatagcaaaaatattattatttcctgaattaaaaaaattctttgccatttccatgaacatctctccgtaataatgaagtttgggattttcctacatgagagcacacaccgttacttggctagcgctgcaattgtttatgtctcattcgtttggacacctattac

SEQ ID NO: 36530 - DNA, 1710 bp, DROSOPHILA
atgagcttcaccaagtggttcaagaagaagggcggagatgggggatcgatctcagagatcggtgcacccacaaacttccaacggcacttccatgtctcgcgcaaccaggaaaccggcgacctggaggggcttccagctccatgggtgcgcctaatgaactcacagatcactcgcgatgagcaggacaagaatccagatgctgcctaccatgccgttaagtactacaactattcgattaagaagaaagagaacgaggtcttcaagcccttcatcaccgaagatgtgatccacgaggagtccaaggagatagaaaactatgtcaactacaaaaacaagcacaagtctcaggatcccgaaaagtccgacgacgatggcagttcgacggccacggagacggaaagtagcagcggttgtggctcctcggcaggtaatagtaacagcagcagcatcaacgacagcagccagcagtcgacggtgccgctggacgccctagaggaggtgttcaaggagctcaagaccaatctggagcaccgcgaaacgctgaaggccgcaccgcaagagcctccaccagtaccgcccaagaaatcgccccacaccataccgcccaaaccgcaaatcaagcccaaacctcgtgtcacacagaagttctcacgcacttcggatatacgtcgagatgaggactccgacaaccagcacaagatcaacacagacacaatcatcatcaagccagccgtaggggcccaggatgctggagcggatgataatcccgacgagacgatactgcgccgctccaaggagaagagggcccagaaaaccgatgccgaaatctacgttgagctgcgggcaatttgcaattcagatgacccaagggaacgctacaagaccacccaggaggtgggcaagggagcttctggcatagttttcatagccgccgatttgcagaacgaatcgcaggtggccgtcaagaccatcgatatgaagaaccagtcctcgaaggatctcatactcacagaaatccgagtgctcaaggacttcaaccacaagaatctggtaaactttctggatgcctaccttctggagcccgaggaccaactgtgggtagtcatggagtacatggatggcggcccattgactgacgtcgttaccgagactgtgatgaaggagcgccagattgcctgcgtctgccgcgagacactctacgctattagttttctgcacgctaagggcattatccaccgggacatcaagtcagacaacgtgctgctgggcatggatggcagtgttaaggtgacggactttgggttctgcgccaacatcgagggcgatgagaagcgccagacaatggtgggaacgccgtactggatggcgcccgaagtggtcacgcgcaagaagtacggcaagaaggtggacatctggtctatcggcatcatggccatcgagatgatcgaaggccagccaccctacctatacgagactccactccgcgccctctacctgatcgccgccaacggtcggccggatatcaagagctgggataagctgagtcccaaccttcaagactttctcgatcgctgtctccaggtggaggtggaccgaagggccaccgccgacgagttgctcagccatccgttcctcaacgactgcagcgaggtcaaggccctcgtgcccaacatcaaggcggccaagaaggtgctccgacgcaacgtatag

SEQ ID NO: 36531 - protein, 569 aa, DROSOPHILA
MSFTKWFKKKGGDGGSISEIGAPTNFQRHFHVSRNQETGDLEGLPAPWVRLMNSQITRDEQDKNPDAAYHAVKYYNYSIKKKENEVFKPFITEDVIHEESKEIENYVNYKNKHKSQDPEKSDDDGSSTATETESSSGCGSSAGNSNSSSINDSSQQSTVPLDALEEVFKELKTNLEHRETLKAAPQEPPPVPPKKSPHTIPPKPQIKPKPRVTQKFSRTSDIRRDEDSDNQHKINTDTIIIKPAVGAQDAGADDNPDETILRRSKEKRAQKTDAEIYVELRAICNSDDPRERYKTTQEVGKGASGIVFIAADLQNESQVAVKTIDMKNQSSKDLILTEIRVLKDFNHKNLVNFLDAYLLEPEDQLWVVMEYMDGGPLTDVVTETVMKERQIACVCRETLYAISFLHAKGIIHRDIKSDNVLLGMDGSVKVTDFGFCANIEGDEKRQTMVGTPYWMAPEVVTRKKYGKKVDIWSIGIMAIEMIEGQPPYLYETPLRALYLIAANGRPDIKSWDKLSPNLQDFLDRCLQVEVDRRATADELLSHPFLNDCSEVKALVPNIKAAKKVLRRNV

SEQ ID NO: 36532 - DNA, 4720 bp, DROSOPHILA
aaggttgatattatgtcagaggaaattgtcaaagagcagcaaccacagccaggtgacccagctaattccagctctacaggccagggacctgaatcaacagtagtcgaagccattatcgtcttacctcacgaagatgccgttgctaaaatagaacctgcaccattcaattcttctactaattctttggttgtaccttcagcaaacgagccacatgaagtagtcagtattgaagaatctgccgactccacaaaaacaagtcaaggtgaagactctacggataatttacaaggaaaaggcaattttccaatggaaccagatactaatcaagagcaagaagacggaacacttaccaagccagtatctggagatacatctctaacaaaaacagagtccacttctgcagttgattcggatcagaatttgttatccgttaaagatgaagctgggtctagccaggacaaaccatctgagaagtctattcatagtacttcaacagactcgaaaagtaaagaacgaacagacattacaacttccaaacgaacaatattcccagagtccacagagatgtccggacttatcagcaagccttcaaactcagaagaaaagttaacccatgaagaagaatctaaaccagtaaaaagagtgaacaaaaagggatctgcttccgctgatggggcgactgaggctgaacgtccaaagagagtgtcgaggaaaccatctgctgaggttttggaaatagaagaccatggaagcgacactaagcaagaagatgatcacagtattaaatctagggggcgagctagaaaaccatcatcagatgtagatgaggacaaaaaggaagctattacagaaaaaagaagaggacgagtacgcactccatccgtagaactttctgaaaccacagcaaatgtcgaacagaaagaaatcgcaggccataaatctgatgaagctcttaaacccatcctagaagaagaaccagagccagaagttgagaaaagaatcgagtcaaatgcagaacaggtgatcatcatagacaaacccaaaaaacgattaaggaaggcatcttcaaaggaatcggatactctattggataataaagaaaaaattaatacggacttggaagttgccaacaaagctgaaagtactcattcgaataacagcgagcaacgagatgtccgagagccttttgtatcgacaactaagtcagaggtggaagccgatttagaaggtgaaatggaagtgcaggaaaccaaccagaaacacaccactaaagaacgacccaagagacgcgggagaaaggcatctgctaatgaaacggaggacgcatccgagaaattagaaaaagctgaagatcatttgaaggccattaatacagatggaaagttagcagttgttttaccaactacaagcaatgaaatagataacacaaatacagaaattgtagccgacttagagataaagccaaaaagacgggcgcgaaaagcatctgcaaaggaaacgaacacgacgtcggacaaaaaggagaagactgtagatattttagcaccagtcaaagaagtggaaccttcgctgtccatcaaaaagaattcggatcactcggaatcaaaggggccacaagagcctgcaccggttgctactttgaatatatccaaggaagaacaagatcccgataatgtgccaaatgtctcttcggaaaacatggcgcctaaggagccaaagaagcaggagagaccaaagcgaagagttcgtaaggcatccgaagatatagtagaagtcaacgcagcaatagacgcacataatcctgaaacggctttggcttccgtccaagaggatcacttaaatcaagctgatcaagaaatgccgaaaaagcgaccacgaaaatcagctgaacttatgctcgcaaatgtagaggagcatgctaaggaagatcaccttgaaagaccgaagcgtaggggacgcaagccttctctagacactgatcatgtttcccaagatgttccagaaaaaccaaagcgaaggggaaaaacaccagcagatcgtgaaactcaacctctgggcgatgaaaagcaggagccatctttgccagttgtagagcctgcgaaaaagaccaggcgtaatgcacgcaaagcttctgcggaaactgttgaagccgtttcaactagcggcgaagagcaccttgcgcaaatcgaagaggcaaccgagccagtaacagaatcagaaccggcacaatctgaattacttccagaagagggcgaggagaacaagactcggcgacgcggtcgtaagccaactgtggatacagatgaggggccgattaaaaagacaccagcagaggaaccagttccgcttccctctcattcacgcagacgtggacgcaaagccaccgaggatgaggtcttaccaacagcagatctggctgtgccgaaaacaaagcttcgtggacgcagggcgtccatggagccagaacataaggacgagctcacagcggagtctagttccgaggtcgtggaactgccaacggccaagacaacgcgccgcggtagaaagccaagtgtagacatggaagcgaccataccggagaagaaaccaccatctcgacgagggcgcaaggcttccgcgagtgtcgatgaggaacagccagcggccaagaaaacggcaattcgtcgcggtcgtaaaaacgaagctcatgaagacgaggaaagaggacatatcgacttgcaggacttgcctaccgaaattgcttctccgctggtggacacatcgggttccccttcgaaggcctccgatgccgaagaacttactccacgccgccgagagggacgcaacttgccacgtaaaaactacgaggaggcaccggacgatgagaagccgcattcaggactgcgacgggcacgcaagccagcggcaaccaagagtttggccagcaaggcgccagagccagatccagttacaccttcgcccgtaaccaatcaaccacccgtgaaatcagaggatacacccgacaacacagtttctctttcggagcccacaacctcgcagcgacgcgaaggacgaaacctgccgcgcaagaactacacggaggatctggacgacgaaatgccgacaccggctcgtagtcgccgcgtacgcaacctgactgcaaaggccctggaattaattgtggactcttcaccgcgaccagtgactccgaaaaggccgaagggcaaggcagcgaactctgaggagccaccggcaaagaagcccaccccagagtttccatcaacaacagaagctgctgggccggagcatgagccgatcccagcaaccaaggggcgtggaactcgtcgaaaggccgacgataccgatttagagaagccggacgtcaaaacagccaaaaagaccgtccgcggcgcgggaggcaaaaccaaagtcgagactgaaacggagaagcaaccacccatcaaaaagccgcgaggcggagcacgcaccaaaacaccatcggaagaggctcctcaggaggaggaacaggtaaagaagtctgccgctcgcagtcgagcaaaaggcaccaaggcagtagaacccgaggagcccgccgaagatccccaagtcgaagccagcttctccaaatcgacggcgtcagttcgaggtggccgagcccggaaggtacacttcgaggccgcgccggagacctctgccagtgaggttgcaccacagcgcgcaactcggtcacgacgaaagtaatatcacatctattttatttataagctttgtactaatctgtataattttttgagttcgtttttaattttacgttaacttgtgtaaaaaaaattcatttatgtatcaattaatgaaggcgtgttattttttaatttctcttgttaatccaacccatttcggtgggataccgttgaatggaatggctcccctcgctcagaacaaaaactaaccttaatagatttaaggcatttaaaaatattaataaatatatatacatagtttatcacttaagacattatcagaactccccaaaaataataaagtttcgtaaaccaatcggaaaaagaaaaacacattattgaagaggcaggtgtatgaacttaaatcaatcgttgcaatcatctttattttcttttataatcacaataaaagtagtttttaattctggtttttggtatagacatatacatataatgctggtaaacattttgtagggatttgatggaatacattcgggtaacaaggggaattgaggaaagcttgttgtatgtatatatagcatccaaaaatcatacaccatataaggcatatgattgtgttgagtacatagtagaaatatagtacatcatacaaatatttgagaacattttcgtatcaaatacaggagtcgttaaacaaaagaaaaccataaataacaacatcaataaattaggacgtcaataaaatgaataaaagcttcaggtaaacaaaagtaaagcacataaactatctaaattatatcttccatttcactggtaccggtaagcttgggataatactttctaaagcttctacaaaaacacatgcgtacttaagtttgtcttaagggctaagctctgccagctaaatgcaaacagtttgtgtatgtgtgtgcgtcgatctaagtcgttatcgttcgttcaaatcctgaaggactcttaggctttcataagtaggtgcggctctgaccgcaacgagtctgtaaggtactggatcttcatgg

SEQ ID NO: 36533 - DNA, 2720 bp, DROSOPHILA
tcgagtcaaatgcagaacaggtgatcatcatagacaaacccaaaaaacgattaaggaaggcatcttcaaaggaatcggatactctattggataataaagaaaaaattaatacggacttggaagttgccaacaaagctgaaagtactcattcgaataacagcgagcaacgagatgtccgagagccttttgtatcgacaactaagtcagaggtggaagccgatttagaaggtgaaatggaagtgcaggaaaccaaccagaaacacaccactaaagaacgacccaagagacgcgggagaaaggcatctgctaatgaaacggaggacgcatccgagaaattagaaaaagctgaagatcatttgaaggccattaatacagatggaaagttagcagttgttttaccaactacaagcaatgaaatagataacacaaatacagaaattgtagccgacttagagataaagccaaaaagacgggcgcgaaaagcatctgcaaaggaaacgaacacgacgtcggacaaaaaggagaagactgtagatattttagcaccagtcaaagaagtggaaccttcgctgtccatcaaaaagaattcggatcactcggaatcaaaggggccacaagagcctgcaccggttgctactttgaatatatccaaggaagaacaagatcccgataatgtgccaaatgtctcttcggaaaacatggcgcctaaggagccaaagaagcaggagagaccaaagcgaagagttcgtaaggcatccgaagatatagtagaagtcaacgcagcaatagacgcacataatcctgaaacggctttggcttccgtccaagaggatcacttaaatcaagctgatcaagaaatgccgaaaaagcgaccacgaaaatcagctgaacttatgctcgcaaatgtagaggagcatgctaaggaagatcaccttgaaagaccgaagcgtaggggacgcaagccttctctagacactgatcatgtttcccaagatgttccagaaaaaccaaagcgaaggggaaaaacaccagcagatcgtgaaactcaacctctgggcgatgaaaagcaggagccatctttgccagttgtagagcctgcgaaaaagaccaggcgtaatgcacgcaaagcttctgcggaaactgttgaagccgtttcaactagcggcgaagagcaccttgcgcaaatcgaagaggcaaccgagccagtaacagaatcagaaccggcacaatctgaattacttccagaagagggcgaggagaacaagactcggcgacgcggtcgtaagccaactgtggatacagatgaggggccgattaaaaagacaccagcagaggaaccagttccgcttccctctcattcacgcagacgtggacgcaaagccaccgaggatgaggtcttaccaacagcagatctggctgtgccgaaaacaaagcttcgtggacgcagggcgtccatggagccagaacataaggacgagctcacagcggagtctagttccgaggtcgtggaactgccaacggccaagacaacgcgccgcggtagaaagccaagtgtagacatggaagcgaccataccggagaagaaaccaccatctcgacgagggcgcaaggcttccgcgagtgtcgatgaggaacagccagcggccaagaaaacggcaattcgtcgcggtcgtaaaaacgaagctcatgaagacgaggaaagaggacatatcgacttgcaggacttgcctaccgaaattgcttctccgctggtggacacatcgggttccccttcgaaggcctccgatgccgaagaacttactccacgccgccgagagggacgcaacttgccacgtaaaaactacgaggaggcaccggacgatgagaagccgcattcaggactgcgacgggcacgcaagccagcggcaaccaagagtttggccagcaaggcgccagagccagatccagttacaccttcgcccgtaaccaatcaaccacccgtgaaatcagaggatacacccgacaacacagtttctctttcggagcccacaacctcgcagcgacgcgaaggacgaaacctgccgcgcaagaactacacggaggatctggacgacgaaatgccgacaccggctcgtagtcgccgcgtacgcaacctgactgcaaaggccctggaattaattgtggactcttcaccgcgaccagtgactccgaaaaggccgaagggcaaggcagcgaactctgaggagccaccggcaaagaagcccaccccagagtttccatcaacaacagaagctgctgggccggagcatgagccgatcccagcaaccaaggggcgtggaactcgtcgaaaggccgacgataccgatttagagaagccggacgtcaaaacagccaaaaagaccgtccgcggcgcgggaggcaaaaccaaagtcgagactgaaacggagaagcaaccacccatcaaaaagccgcgaggcggagcacgcaccaaaacaccatcggaagaggctcctcaggaggaggaacaggtaaagaagtctgccgctcgcagtcgagcaaaaggcaccaaggcagtagaacccgaggagcccgccgaagatccccaagtcgaagccagcttctccaaatcgacggcgtcagttcgaggtggccgagcccggaaggtacacttcgaggccgcgccggagacctctgccagtgaggttgcaccacagcgcgcaactcggtcacgacgaaagtaa

SEQ ID NO: 36534 - protein, 828 aa, DROSOPHILA
MEVQETNQKHTTKERPKRRGRKASANETEDASEKLEKAEDHLKAINTDGKLAVVLPTTSNEIDNTNTEIVADLEIKPKRRARKASAKETNTTSDKKEKTVDILAPVKEVEPSLSIKKNSDHSESKGPQEPAPVATLNISKEEQDPDNVPNVSSENMAPKEPKKQERPKRRVRKASEDIVEVNAAIDAHNPETALASVQEDHLNQADQEMPKKRPRKSAELMLANVEEHAKEDHLERPKRRGRKPSLDTDHVSQDVPEKPKRRGKTPADRETQPLGDEKQEPSLPVVEPAKKTRRNARKASAETVEAVSTSGEEHLAQIEEATEPVTESEPAQSELLPEEGEENKTRRRGRKPTVDTDEGPIKKTPAEEPVPLPSHSRRRGRKATEDEVLPTADLAVPKTKLRGRRASMEPEHKDELTAESSSEVVELPTAKTTRRGRKPSVDMEATIPEKKPPSRRGRKASASVDEEQPAAKKTAIRRGRKNEAHEDEERGHIDLQDLPTEIASPLVDTSGSPSKASDAEELTPRRREGRNLPRKNYEEAPDDEKPHSGLRRARKPAATKSLASKAPEPDPVTPSPVTNQPPVKSEDTPDNTVSLSEPTTSQRREGRNLPRKNYTEDLDDEMPTPARSRRVRNLTAKALELIVDSSPRPVTPKRPKGKAANSEEPPAKKPTPEFPSTTEAAGPEHEPIPATKGRGTRRKADDTDLEKPDVKTAKKTVRGAGGKTKVETETEKQPPIKKPRGGARTKTPSEEAPQEEEQVKKSAARSRAKGTKAVEPEEPAEDPQVEASFSKSTASVRGGRARKVHFEAAPETSASEVAPQRATRSRRK

SEQ ID NO: 36535 - DNA, 7116 bp, DROSOPHILA
gcgtgttccatgcgtcccacctctttggccgcttccatgtaggcggtcatgtactcgtacgcttgtgcctgggcattgacgcgggtttcagtgccctccactggcagtgcaaatgcatccatgacaatctgcacgggaatgacttataaattgaggaccttttttacattcaataactcaccattgtgttgtcctctaccttgccaagcattagacccatcacctccaaagtaccgccagagcgagcgtgcatcaccatctttaggagcgccagagccgagatcttaatgtccttaaagaagtggggatctttctcccagggcttcgcatcgatgatctgccgctgctgttcggcgtcgtagcgaaagatctcgtcacaactgggcaacgtctggatgttgttctccagctcccaggtcttttgtgcggcgtcggagtccattgtgattgtacttatgccgaaaattgtagtcttttgttgcaagtttttgttttccggctcaattctagagatgaacttgtcggtaccatctgtacaatcaatttcatgaaggtacaatcgatattttttataaatcgattattataagttaagaaattaaaatattgattaaaaaatttaaaatttatctatattaacaatttatttgtttaataaataaaatgtatttttaatcgttaattttttaccaaggaaagttttttaatttaatttttctgtttacgatacgcactctaatttgcagcatttttgactaaaaaaaacttaaaaccttatttcatagtgacaaaatgattcatcgcagtatctgtaatctgtatctttcttttcacttcttgagattaaccattattaataatcacataatataaaccacttttaattcaagtaagttgtcagttcctgcaccccgaattttaaatgtaacgcataagccggcgcattaaaagcaggttggcagggcttgcgcgtccattgcaaaaaaattcctgcacagagttttcgctacaattaactttggcaagctcgtgatgtgggccgtaaaaacagtgtctggtggaaaagtgtgaaagaaatcagtgaatagtttgtgggtgttttgtgtacgtgcatttaccgtattattcccaatagctttgcggcttttcaaagtgctcgcttcggtattcgttttccccgcacccaagccgcatttgcgacgccgcttggaaaatgtcgctggatggcggtaggttgcgctacgaagacgaaaatggtaaaaccgtggttctggcagccaaagggcgcaccttccaggtgggctcctactacaattgcgacctcatcctggaggggccagaggaggagcgtctaatttgcgaaataaactgcgatgccttcggcagggtgagtctggatggcaggaatcccccttaaccgccctaacatactgcttcttccgcccttaggtcatcatatacaacaagtccagcggagaccccattcatctcaacgacgtggccatccacgctgcaggcaagcgtcctttgctacacggtggcaagattaccattcgagacaaggtctacacgtgggagttccccaagacctccgaggtgcaggatgccccatgcaccccagaacgcctattgcccaacgaacaggcctcaaactcctgcccttcattgaaggtaatagccgccatctgttccagatagtacagtattccaagtcctacaatttccccatttttatttgatttagcaatcgcatcgtctacaagccgaaaaacgcctgacagttcacaagtaagtgaaaacagcaggcagacccctaaccgactacctggccaacccctaaaatgtctttgggcaacaacaataggaaaaagtccctactgcaagcatgtgttgtctgcctgttaatagtcctcataaaaccttatctctgcttataccttttcagttttcactacagcatcaattcggacgacgaaggaaatacttctatagagtctcgtgatcagagtgagtctcacttggaggatgtctcactgaatgaatcaattcagcgcagcacagaggagacagcttacgagtcccccaaagtaaatcttctggaggctacgcagaataaggagaataccgcaacgccaccaggtagccaccaaaagctactaaggctgtgcgccatctccgacgtggttattacctcttattcgccgcgcgagactggcgtgaagatcgagaaatccttttcatgtgttcgaaaacctggctacaccacgacgtctttggctgtttccacgcccaagagcgtatacagcacccccaagggcaatgtgctctctgaactaaacgaagacagctgcagccgagatctaatggactttagcacgccatccacctcaaaaaaaaccaagcgggattcgtccatgttcctgatcgacctgaccaccccatcaaagctacgacaaacacccaaacagacgcttggattcaagctcacacccaaacagacgcctatcagtgtagacagcaccgacgaatcatcagatgcatccccattagtcatagacataactaactctgacaccccgccatcagcaagcccttcgcaacggtataaaactcctaagcgtccggctggaatcaccacacccaatagaacgccccagtcactgatgaaacgagcgttgcttaccagcattaaaaagcagatcgcctccaaccaaccagataagaccacccccatagccacccccaagcggacatctcttctggaggctcgtcgccactgcctgactacgcctcggcgtttgccattccatccacatcgtcgtacgccagtccagcgagaaggacatacgagaggaaacgcacccaagacctcgccacgcaagcgtatatccctaatggagtctcccagagagaacaaggtctcccagctcagaaaatcgtttgcggctgccaagcgtagtcccggcgttgacaagagcaacaagctcgtagccaaggcacgtcgttcgcttaactcgccgaaaagtggctcccctaagcctggatcatctaaaccgtcatctccatgtcaaaaaaaaatcgatgtgtcccagatcaagagctccactccggaagaaccggacgattcaaaggacgagctgagccgcacgttcactatactgcatgatactacccaaggaaacgatcagagtggcgcagcattggcaatcgaagcggttacagctctcataactggggaagtagacgatgatgtatcctttcagctaagctcgctaattgaaaagaggcttccgtcagtgacctcagaagagcctgcacctatccaagacaaagttgagtcgatcgggtcagaatctgatgtggtaggcgagttaaaatatgcacaggaagatatgaatcctaagccagatgcggtcatactcgaccagaatgaacgtgacgaaaatgaattgaaaaccggcaaaaatgaagacgaatgtaaagaaaaagactgtgaacttccaatcgacaaacaacttgaggatgctgttattgaggataacatttgcgaagaggttcatgcgaatattcctcaacaaactaagaattgtaagtacctataatatgaaataaatattatgaaatcttatgttccaaaaccgtaacagctaattctgagaaaataatcgaggaaagtatttgcgaagagctgccattggagagtactactggtaattcaaattcaactggtaagcgatttaaatttgaaaattcccaaaatacatttttattttattgcgacaggagggatatctcaaaaagagaaccaaccaactccaagtgcagaaacccccgtggctcgcagaagcttgcgccgtcattctgttgagcagagggcagtgtcaacaacgccacggagaagcactcggcgatcctcgatggaggccagcagtaaggcattacctgagaaggacaacaagcgttctcgtcgtgcatcctgttcagcaatggacagccaagtcgctgttactccccggcgcaagcggcaatttacgcaagaaatgtccacgccaacgcgccaatcattgcgtattaagaacacacccaatagggaacttcaggtggatgaatctgtgggcgatatgggagtcatattggaagaagttggttccgaagatggtaagttgagtcaatatcatttatgaaatggaatggaaatataatggcttatttgatttaaattatattttttacagatagcaaatctttcatcgctgacgacgaaaattatggcaacgagctgccaaatgatgatattgacaaggtagatttccacggcctcagagatttattgaaaacaccaaaaagctgcagcacaccccgctttaaagggctaagggaactgatgcgcactccgaaaattcctgcctcaccaattataggaaacatggcagaactattagaaacctctgttggtaggactccttaccacgatagaagaagcactgcactagctcgcatggagcaaggaaagcctctggacaatgttctgaagacgcccagcgcccggaatatcatggtgccaaatgaaccagctagcacagtgttaaagtctcgcaaagattttctgggggcaaccacggaatacgatctgaatgtgacgaacaacacattgcatttggacaagattttcgaggacatgtccgaaacgactggggccaatatggaagacacggaagaaattaatgtgacaacgatcagcacagcgactggagttgatcctttggattcaataaatcagaataaaacagtggcatcagaggcactgatgaatgttgggcatacagccacagcgagcgcttccctagaggatcctctgacaagcaccacctacaaagctaccatgcatgccaatcccaatcttagcgacttcaggtctgtttcgcccaacccgaacgagatgagtggaattcagttgttggaccagtcgtcggactcaatgttctccgaagcactagtagtttcgggcgtggagtcgtgcgaagtcaccgtggatgagacgaggcctttaggccagaccaatccacctattgataacattgaggatcgctcagatacagactcaaatgttggccttactgagcccttggtatttagtgatgatgaagaggagccaaagaaatcggaaggaactaccaaacaatctgacagtgctcaggaaccatctatagcctacaagcttgaagaatctgtcaatctgacggaacacaaaactgtcgatgagaattcaagtaaatatgatgtcgaaacgggtgctatcagtgaaatttcactaattgaagtggaagataccacaattgaggcaagtacttgcgagcaaaatctcgaaagctgcaaacttcaagaagagaaaagtgtagatatcgcttcagttaattcagatgaaaatatcgaatctgcagtggtggaattgacgatcctagagtcagagatatttcctttagacacaacagcggatagttcgatcaattctactaatgtcctcgacagtagtgtggaaaaaactatacctgaccgaaatctcaaaggtggcaaacttcaagaagagaaaagtttagatatcgcatcagttaattcagatgaaaatattgaatctgcagtggaattgacgatcctagagtcagagatatttcctttagacacaacagtggatagttcgatcaattctactaatgtccttgacagtagtgtggaaaaaactatacctgaacataatcttaatcaagaagatgccaaggccacaaacgatgcccaagacacttcagttacagatgaaaaatcctctactgacttatatcgttcagttggcgaagtattaccatccaataaaagtgatttgcatactgatgaaccaccaatcgtaatatcctcttctaaagaactggcaaaagaggcgaaatctggtgatggtaaccccatcgacaacgacaactccaaaccatatattgagcgctctgaagaactttccgaagaaaccaaaccagataaggtttcgagtgctgcagaatcggatcgaccagtcacagaaacttcgccgactccaaaagcccctggcgcagagtctaagcaaccgttgactgaatcacattccgatgaacttgtaaaagaaaccaactccaatgaggtttccgttgatggggaactcattcaaccagccattgagactttgccttttgtggaacaaaaacaagaacctgatgtttctactgatgcggaatctaatcaacattgcatcgaaagttcgcctctcaacgaactttcagagaatatccaacgtgaggaggtacacactttagataatactaaacaagaagtaaaaccgtatcccgtcatggaagttttaaaggaaacaaaaactgatgaatctatccaatccgtcaccaatacgtatccaaccgaggaacttcaagaagaagctaaagctgatgagttgcctactgttagtgaaatggttcaagcattcaaagagacgaaaacagatgatactattaaaccaatcatcgaaacatcgcctgaaagagaacccttagaagaggcacatcctgatgagttgccttcttctagtgaaaaggatcaagtaattgtcgaaacaccatctgctgaaactaggccaaccatcgaaacttcttgtgacgaaccactatcaacagcaggaactgatatagtgcctgatttaagtcaaattgatcaactaatttttgaaaaatcaccagccgaagaaccgcatgagaaagcaaaacctgatgagactacccaggaagtcatcgaaacatcacacgcggagaaagatccaatagaagccagtcctaaagaggattcatctgttagtaaaatggataatgcagttgtggaaactaatcctcaaacagataagctaattcctccggatgaaattacaaattgcgggccggtagatatatgcatcgatgagttctctttaagaaattctagttcagcatttgagatcgaacactcagaagaagtcgcgacgacttctttagacttagatctttccgagataagtaaagaaaagggaaatatggaagctttgccgaatgacaacgcttgtgttaagca

SEQ ID NO: 36536 - DNA, 4110 bp, DROSOPHILA
ttttcgctacaattaactttggcaagctcgtgatgtgggccgtaaaaacagtgtctggtggaaaagtgtgaaagaaatcagtgaatagtttgtgggtgttttgtgtacgtgcatttaccgtattattcccaatagctttgcggcttttcaaagtgctcgcttcggtattcgttttccccgcacccaagccgcatttgcgacgccgcttggaaaatgtcgctggatggcggtaggttgcgctacgaagacgaaaatggtaaaaccgtggttctggcagccaaagggcgcaccttccaggtgggctcctactacaattgcgacctcatcctggaggggccagaggaggagcgtctaatttgcgaaataaactgcgatgccttcggcagggtcatcatatacaacaagtccagcggagaccccattcatctcaacgacgtggccatccacgctgcaggcaagcgtcctttgctacacggtggcaagattaccattcgagacaaggtctacacgtgggagttccccaagacctccgaggtgcaggatgccccatgcaccccagaacgcctattgcccaacgaacaggcctcaaactcctgcccttcattgaagcaatcgcatcgtctacaagccgaaaaacgcctgacagttcacaattttcactacagcatcaattcggacgacgaaggaaatacttctatagagtctcgtgatcagagtgagtctcacttggaggatgtctcactgaatgaatcaattcagcgcagcacagaggagacagcttacgagtcccccaaagtaaatcttctggaggctacgcagaataaggagaataccgcaacgccaccaggtagccaccaaaagctactaaggctgtgcgccatctccgacgtggttattacctcttattcgccgcgcgagactggcgtgaagatcgagaaatccttttcatgtgttcgaaaacctggctacaccacgacgtctttggctgtttccacgcccaagagcgtatacagcacccccaagggcaatgtgctctctgaactaaacgaagacagctgcagccgagatctaatggactttagcacgccatccacctcaaaaaaaaccaagcgggattcgtccatgttcctgatcgacctgaccaccccatcaaagctacgacaaacacccaaacagacgcttggattcaagctcacacccaaacagacgcctatcagtgtagacagcaccgacgaatcatcagatgcatccccattagtcatagacataactaactctgacaccccgccatcagcaagcccttcgcaacggtataaaactcctaagcgtccggctggaatcaccacacccaatagaacgccccagtcactgatgaaacgagcgttgcttaccagcattaaaaagcagatcgcctccaaccaaccagataagaccacccccatagccacccccaagcggacatctcttctggaggctcgtcgccactgcctgactacgcctcggcgtttgccattccatccacatcgtcgtacgccagtccagcgagaaggacatacgagaggaaacgcacccaagacctcgccacgcaagcgtatatccctaatggagtctcccagagagaacaaggtctcccagctcagaaaatcgtttgcggctgccaagcgtagtcccggcgttgacaagagcaacaagctcgtagccaaggcacgtcgttcgcttaactcgccgaaaagtggctcccctaagcctggatcatctaaaccgtcatctccatgtcaaaaaaaaatcgatgtgtcccagatcaagagctccactccggaagaaccggacgattcaaaggacgagctgagccgcacgttcactatactgcatgatactacccaaggaaacgatcagagtggcgcagcattggcaatcgaagcggttacagctctcataactggggaagtagacgatgatgtatcctttcagctaagctcgctaattgaaaagaggcttccgtcagtgacctcagaagagcctgcacctatccaagacaaagttgagtcgatcgggtcagaatctgatgtggtaggcgagttaaaatatgcacaggaagatatgaatcctaagccagatgcggtcatactcgaccagaatgaacgtgacgaaaatgaattgaaaaccggcaaaaatgaagacgaatgtaaagaaaaagactgtgaacttccaatcgacaaacaacttgaggatgctgttattgaggataacatttgcgaagaggttcatgcgaatattcctcaacaaactaagaattctaattctgagaaaataatcgaggaaagtatttgcgaagagctgccattggagagtactactggtaattcaaattcaactggagggatatctcaaaaagagaaccaaccaactccaagtgcagaaacccccgtggctcgcagaagcttgcgccgtcattctgttgagcagagggcagtgtcaacaacgccacggagaagcactcggcgatcctcgatggaggccagcagtaaggcattacctgagaaggacaacaagcgttctcgtcgtgcatcctgttcagcaatggacagccaagtcgctgttactccccggcgcaagcggcaatttacgcaagaaatgtccacgccaacgcgccaatcattgcgtattaagaacacacccaatagggaacttcaggtggatgaatctgtgggcgatatgggagtcatattggaagaagttggttccgaagatgatagcaaatctttcatcgctgacgacgaaaattatggcaacgagctgccaaatgatgatattgacaaggtagatttccacggcctcagagatttattgaaaacaccaaaaagctgcagcacaccccgctttaaagggctaagggaactgatgcgcactccgaaaattcctgcctcaccaattataggaaacatggcagaactattagaaacctctgttggtaggactccttaccacgatagaagaagcactgcactagctcgcatggagcaaggaaagcctctggacaatgttctgaagacgcccagcgcccggaatatcatggtgccaaatgaaccagctagcacagtgttaaagtctcgcaaagattttctgggggcaaccacggaatacgatctgaatgtgacgaacaacacattgcatttggacaagattttcgaggacatgtccgaaacgactggggccaatatggaagacacggaagaaattaatgtgacaacgatcagcacagcgactggagttgatcctttggattcaataaatcagaataaaacagtggcatcagaggcactgatgaatgttgggcatacagccacagcgagcgcttccctagaggatcctctgacaagcaccacctacaaagctaccatgcatgccaatcccaatcttagcgacttcaggtctgtttcgcccaacccgaacgagatgagtggaattcagttgttggaccagtcgtcggactcaatgttctccgaagcactagtagtttcgggcgtggagtcgtgcgaagtcaccgtggatgagacgaggcctttaggccagaccaatccacctattgataacattgaggatcgctcagatacagactcaaatgttggccttactgagcccttggtatttagtgatgatgaagaggagccaaagaaatcggaaggaactaccaaacaatctgacagtgctcaggaaccatctatagcctacaagcttgaagaatctgtcaatctgacggaacacaaaactgtcgatgagaattcaagtaaatatgatgtcgaaacgggtgctatcagtgaaatttcactaattgaagtggaagataccacaattgaggcaagtacttgcgagcaaaatctcgaaagctgcaaacttcaagaagagaaaagtaactggcaaaagaggcgaaatctggtgatggtaaccccatcgacaacgacaactccaaaccatatattgagcgctctgaagaactttccgaagaaaccaaaccagataaggtttcgagtgctgcagaatcggatcgaccagtcacagaaacttcgccgactccaaaagcccctggcgcagagtctaagcaaccgttga

SEQ ID NO: 36537 - protein, 1298 aa, DROSOPHILA
MSLDGGRLRYEDENGKTVVLAAKGRTFQVGSYYNCDLILEGPEEERLICEINCDAFGRVIIYNKSSGDPIHLNDVAIHAAGKRPLLHGGKITIRDKVYTWEFPKTSEVQDAPCTPERLLPNEQASNSCPSLKQSHRLQAEKRLTVHNFHYSINSDDEGNTSIESRDQSESHLEDVSLNESIQRSTEETAYESPKVNLLEATQNKENTATPPGSHQKLLRLCAISDVVITSYSPRETGVKIEKSFSCVRKPGYTTTSLAVSTPKSVYSTPKGNVLSELNEDSCSRDLMDFSTPSTSKKTKRDSSMFLIDLTTPSKLRQTPKQTLGFKLTPKQTPISVDSTDESSDASPLVIDITNSDTPPSASPSQRYKTPKRPAGITTPNRTPQSLMKRALLTSIKKQIASNQPDKTTPIATPKRTSLLEARRHCLTTPRRLPFHPHRRTPVQREGHTRGNAPKTSPRKRISLMESPRENKVSQLRKSFAAAKRSPGVDKSNKLVAKARRSLNSPKSGSPKPGSSKPSSPCQKKIDVSQIKSSTPEEPDDSKDELSRTFTILHDTTQGNDQSGAALAIEAVTALITGEVDDDVSFQLSSLIEKRLPSVTSEEPAPIQDKVESIGSESDVVGELKYAQEDMNPKPDAVILDQNERDENELKTGKNEDECKEKDCELPIDKQLEDAVIEDNICEEVHANIPQQTKNSNSEKIIEESICEELPLESTTGNSNSTGGISQKENQPTPSAETPVARRSLRRHSVEQRAVSTTPRRSTRRSSMEASSKALPEKDNKRSRRASCSAMDSQVAVTPRRKRQFTQEMSTPTRQSLRIKNTPNRELQVDESVGDMGVILEEVGSEDDSKSFIADDENYGNELPNDDIDKVDFHGLRDLLKTPKSCSTPRFKGLRELMRTPKIPASPIIGNMAELLETSVGRTPYHDRRSTALARMEQGKPLDNVLKTPSARNIMVPNEPASTVLKSRKDFLGATTEYDLNVTNNTLHLDKIFEDMSETTGANMEDTEEINVTTISTATGVDPLDSINQNKTVASEALMNVGHTATASASLEDPLTSTTYKATMHANPNLSDFRSVSPNPNEMSGIQLLDQSSDSMFSEALVVSGVESCEVTVDETRPLGQTNPPIDNIEDRSDTDSNVGLTEPLVFSDDEEEPKKSEGTTKQSDSAQEPSIAYKLEESVNLTEHKTVDENSSKYDVETGAISEISLIEVEDTTIEASTCEQNLESCKLQEEKSNWQKRRNLVMVTPSTTTTPNHILSALKNFPKKPNQIRFRVLQNRIDQSQKLRRLQKPLAQSLSNR

SEQ ID NO: 36538 - DNA, 2470 bp, DROSOPHILA
tgttggccacatctactacgtgctggaggacgtctatcctacactgtccaacggctacagactgatcaaaaccccctactttttgtgagtttactttgaattgggatataacttttgcaataacgacttgttgtccttaggaaacgtctcttcaatgagcacatcgaacgcaacttccaggcggctgctgaggatcgacctggcggatttccttggggcggagagggtcagcccctgctaccggaagagattgcggctgatggacaggatgaggagccagcgaatcgagcggcgcctgttgctgccgcgccgcaatagcaaaactagaaaacttgattgttaaaacgttcttctgttcaaaacgacgacgatgacaacaatgttgtgtaccctccgccaccttctgtttggtgcttggtgtaattaggcgtatagtagtgagagaaaggcgtgcaatagttagccaaagttggtgcagagcgtgtgtgtatgtcatttattggtttgttttctgaaacagagctcattttccatacgagatgttcttttatttataatttacccccaagggatgaatccacgacagattgaacctacactgcacatgtgatgattatatatatacaaaccatgccacaaataaatcattatataaaaagacctgcagttttaaaatgcttgaaatcgcttggggattgataaaaaaaaaccatttgaaaaaaacattttctttttacattatttggtttgcggaagtgtggttcaattcgaagtgcctaacttaaatataatatgaaaatagcattgaacttttaaaggtgacaattcaaatgcgcgccaaacttttaatacgttgccacctgccaactcaatttgacgttagccaacactggctgcgacaaaacagttgttattcgctcgtatttagtttttagccggctgctaaatagtatagtattagtatgttatatgatatgaactcaggatgtccagaattttgatgagccaactgacccaccctcagagggtccgactgctgtacaaaacgatcttgcgactgcacagaggtaagatgaaaaattccctattactataaattgcatgcatttcaactaaacttctgtactccgtaggacttccagcggaacttcgtgctctgggcgataactatgtgcgggacgagttccggcgacacctcaagtgcaatcccatggaggcacagctctttatgacagagtgggccgtaagttttacgtaataaacaaaaaggcgccatactaagcaaatcttccattgcagcgatatgcgtccacaatcacccaacaactagggattcggggcaagcccaagggagagctgggcgaagagattgaccccaagactgtagaaatgttgaaagacgaccaagtagtccaactatacgagctgatgctggcggccaagggagtagaagatgcgcaaggcaaataaatcagtgtattattttattatgagtgtttctccaaaatcttgtactcgaatttaatgccattctcctcctgcacacccagtggcatgtcggaatcgggcgcgacctctcgaaagctgtcagggatcgcggggaaaaaggtgtcgcaatcgaacttctgcattattttggtaatgtacagccggtgacaccttggcgaggccatggcctcctcgtagactccactaccgcccacaatccaaatgttctccacttcgttctgctcctcaaggatcttcatggccgtctcgagattggggcacaatagtactcccttgggcagatcactttcctgaagtgtggtgctcagcactatgttcagccgatcgggaagaggcctcttgctttccggcactccgaagtaggttttcctgcccattaccacggcattttgcttggtgggatcacttgttcgcttggtggtgcggctgaagtacttcagctcagatctgatggtacaaaagctttagctgcggttcaatccttgttaccaacttacttaatgcgccatggtagatcgcctctgatgccgattccgaaattctcgcaaactgccacgattaaattgaatcgaagcatccttaatccttactgagaaagcataagcttgaaaattatcttccaagctataaaattcaaacagctgatcaaggcaatgctggaaccgatttcgatagcttcgattacttacctattatcgaaacacgcttatgaagatcttagtcagatttcaggttggtttcgcgccactcccacgaaaacaatatttctagatacaatgtgtcttgaatttatttttatagtgatccacatatactttacaggggattaaaagttcgttaactattaccaaaaagttattagatacattagatataagaggttttcgagcctgattatttccaaagggttacaagattttctgtctcaaaatatgttttttatatttcaataccatagtgg

SEQ ID NO: 36539 - DNA, 348 bp, DROSOPHILA
atgagccaactgacccaccctcagagggtccgactgctgtacaaaacgatcttgcgactgcacagaggacttccagcggaacttcgtgctctgggcgataactatgtgcgggacgagttccggcgacacctcaagtgcaatcccatggaggcacagctctttatgacagagtgggcccgatatgcgtccacaatcacccaacaactagggattcggggcaagcccaagggagagctgggcgaagagattgaccccaagactgtagaaatgttgaaagacgaccaagtagtccaactatacgagctgatgctggcggccaagggagtagaagatgcgcaaggcaaataa

SEQ ID NO: 36540 - protein, 115 aa, DROSOPHILA
MSQLTHPQRVRLLYKTILRLHRGLPAELRALGDNYVRDEFRRHLKCNPMEAQLFMTEWARYASTITQQLGIRGKPKGELGEEIDPKTVEMLKDDQVVQLYELMLAAKGVEDAQGK

SEQ ID NO: 36541 - DNA, 3134 bp, DROSOPHILA
caacaacacggaagttttatgccccagacatgcgaaggcccacttggagctgcgccagccaaatacggacagcaggtgggtagaagagtgtgctttatttcggattgccttcttaacatttgaaatctcattgcaacagtgacacctatgaggactctctgaagacggacgagccactggtggcgcataactgtcgcagtgccaattgtgagcaccgccagcaccagcagcaccccagtcaccatccccactaccagaacacgcggttcgagaagcgctcctgcgtgcgccactccttctccggggtcaaggacgacctcatgcagcagtcaccgcagatttcactgcgtccccggggccacgccctccgcaactcgatgaatgacctggagcagcggctgcacaacctggagcagtcctttcgccgcccgctcgaatttagcaaatctaattcattgttttagttcattttttagctagacaaaacgcagtgcaatttttagtgtagtcaacctagaatagactttagatattaagaaacaagtgcaataaatttgagagatgttacaattaatatagcccccaactctgaaaaagaaagtgatatatttgaaatccgggaaaatcaattgagcagtagaaaaactcaaaagaaaatttgattaatttccagtttaagtataaacccattgaagatatggaaatacaatatataatagtatagaaattcattctgatcatatagtagcttatggatttcaaagtgaaaatcatattgaacttatctgttattataaatattatttccattcaaatattggatgaactactcttcgatagacgacacaatcttaagttcttccttctgttaaccacataaataaaattaatttaaagtttcgtgtcacgattacggcttatcgatatctggcgccagtgtcactagtatttgtaccatcactaaccttggtcataaaaataaaagctagcgttccatttattttccatcgcccgagcgctgttccctatccattaacacgtctcaatcctggagtgcacaacatccggtgagaggactaccaaaaagagatagtccgccgctggttgtaggtgaataaacagtgaagaagcgaagagtccaaaggatacaatcgcaacccacttgccaagctgcacactttgagtccaacgttggaggaggagccgccatgaatgccctgcggcagttctacctggagatcccggtggtcacacgagcctacaccacggtctgcgtgctgaccaccttggcggtggtaagtgtatcccgtagtgcgttctaaatcgcggatgacgtgtacgtgtattatcttcgattatattttttgccaacttttaagcacctggacctggtgtcgccgctgcagctctacttcaatcccacgctgattgtgcgcaagttccagatctggcgcttggccaccacattcctgtactttggcacaataggcatcagtttctttttcaatatggtgtttacatatcgatattgtcgaatgttggaggacggatctttccgcggacgcagctccgactttgtcatgatgttcatctttggcggcgtgctaatgaccttcttcggaatcttcgtcaacctgttgttcctgggccaggccttcacattaatgctggtctatgtgtggtcacgacgcaatccactggtgccaatgaatttcttcggggtgcttaacttccaggcgccgtaccttccgtgggtgctcctctgctgctccatgattctgggaaacaccgtgtgggtggatgtcatcggcatgggtgttggccacatctactacgtgctggaggacgtctatcctacactgtccaacggctacagactgatcaaaaccccctactttttgtgagtttactttgaattgggatataacttttgcaataacgacttgttgtccttaggaaacgtctcttcaatgagcacatcgaacgcaacttccaggcggctgctgaggatcgacctggcggatttccttggggcggagagggtcagcccctgctaccggaagagattgcggctgatggacaggatgaggagccagcgaatcgagcggcgcctgttgctgccgcgccgcaatagcaaaactagaaaacttgattgttaaaacgttcttctgttcaaaacgacgacgatgacaacaatgttgtgtaccctccgccaccttctgtttggtgcttggtgtaattaggcgtatagtagtgagagaaaggcgtgcaatagttagccaaagttggtgcagagcgtgtgtgtatgtcatttattggtttgttttctgaaacagagctcattttccatacgagatgttcttttatttataatttacccccaagggatgaatccacgacagattgaacctacactgcacatgtgatgattatatatatacaaaccatgccacaaataaatcattatataaaaagacctgcagttttaaaatgcttgaaatcgcttggggattgataaaaaaaaaccatttgaaaaaaacattttctttttacattatttggtttgcggaagtgtggttcaattcgaagtgcctaacttaaatataatatgaaaatagcattgaacttttaaaggtgacaattcaaatgcgcgccaaacttttaatacgttgccacctgccaactcaatttgacgttagccaacactggctgcgacaaaacagttgttattcgctcgtatttagtttttagccggctgctaaatagtatagtattagtatgttatatgatatgaactcaggatgtccagaattttgatgagccaactgacccaccctcagagggtccgactgctgtacaaaacgatcttgcgactgcacagaggtaagatgaaaaattccctattactataaattgcatgcatttcaactaaacttctgtactccgtaggacttccagcggaacttcgtgctctgggcgataactatgtgcgggacgagttccggcgacacctcaagtgcaatcccatggaggcacagctctttatgacagagtgggccgtaagttttacgtaataaacaaaaaggcgccatactaagcaaatcttccattgcagcgatatgcgtccacaatca

SEQ ID NO: 36542 - DNA, 994 bp, DROSOPHILA
ttttccatcgcccgagcgctgttccctatccattaacacgtctcaatcctggagtgcacaacatccggtgagaggactaccaaaaagagatagtccgccgctggttgtaggtgaataaacagtgaagaagcgaagagtccaaaggatacaatcgcaacccacttgccaagctgcacactttgagtccaacgttggaggaggagccgccatgaatgccctgcggcagttctacctggagatcccggtggtcacacgagcctacaccacggtctgcgtgctgaccaccttggcggtgcacctggacctggtgtcgccgctgcagctctacttcaatcccacgctgattgtgcgcaagttccagatctggcgcttggccaccacattcctgtactttggcacaataggcatcagtttctttttcaatatggtgtttacatatcgatattgtcgaatgttggaggacggatctttccgcggacgcagctccgactttgtcatgatgttcatctttggcggcgtgctaatgaccttcttcggaatcttcgtcaacctgttgttcctgggccaggccttcacattaatgctggtctatgtgtggtcacgacgcaatccactggtgccaatgaatttcttcggggtgcttaacttccaggcgccgtaccttccgtgggtgctcctctgctgctccatgattctgggaaacaccgtgtgggtggatgtcatcggcatgggtgttggccacatctactacgtgctggaggacgtctatcctacactgtccaacggctacagactgatcaaaaccccctactttttgaaacgtctcttcaatgagcacatcgaacgcaacttccaggcggctgctgaggatcgacctggcggatttccttggggcggagagggtcagcccctgctaccggaagagattgcggctgatggacaggatgaggagccagcgaatcgagcggcgcctgttgctgccgcgccgcaatag

SEQ ID NO: 36543 - protein, 261 aa, DROSOPHILA
MNALRQFYLEIPVVTRAYTTVCVLTTLAVHLDLVSPLQLYFNPTLIVRKFQIWRLATTFLYFGTIGISFFFNMVFTYRYCRMLEDGSFRGRSSDFVMMFIFGGVLMTFFGIFVNLLFLGQAFTLMLVYVWSRRNPLVPMNFFGVLNFQAPYLPWVLLCCSMILGNTVWVDVIGMGVGHIYYVLEDVYPTLSNGYRLIKTPYFLKRLFNEHIERNFQAAAEDRPGGFPWGGEGQPLLPEEIAADGQDEEPANRAAPVAAAPQ

SEQ ID NO: 36544 - DNA, 10565 bp, DROSOPHILA
ttgttaattaattcattattttgatgaaaagaggttgaaagcattgaatttatacagcgtgaaattgtaaatagttcagcttataaaaacataataagaaatttgataacatttattgttatagttatagtatagttgtggcgcatcacaacattcgagaccacctttttccaatttattttgtattatttgtagtgaaactcattctttattattttaataaaaatcacaaattcaacactgattaataatttcttagtcaaatttctgcttctgctgcacatatctgacaagtgaaaccctgcaacacaaacaattcacaccgaagtgagccagaaactgcaagtaaataatagaaattgcagctcaaattacaactgcggcaatagcaagaagcagttacagcgaaaatggaataaaactaagccacaaataaaacaataaaacagcaatgcctacgacgacaagggaagaccgacaaagtcgctggctgcagtagaagatacttgacgatggccaagatttcactgcatctgcatctgaaagcaacaatgataatttcccgctgcagaagatcttccgaaaaatagtaatacaaaaaaataaaaacaagaaagaaaatgaagcgcggagaaatgtcagcgagtcagacgacgatgtggtgcgcgatgtcttcttgtcactcggaacgcatttggctgggatgcctattgggccaaaagacagccgagccgtgggcaaacaaaaaatgcttaattatgtcatgagggtgggaactaaggcagcagaaaataatttgcaaaggctgattgcagccaggccgtgagcaacatggacccctccatctgagatggcgagaatccgagacagggagacagctgaatgcatgtggaaaagtgttgcaactgcacatgaaaaccgcagctgaatgggccacgcgacaaacgtagaaagtttttggttagctggcgccagttctgccacgccccctttgccacaaatgccgcccccttgggagccccacaatttggtccgcacgtcgctgtgcggtgattttccaattgtgttttcctggcacttttccgttttcggttctcagagtgtgcgaaaaaatttgcatgcccaaataaaaaacaacagcgacaatttgtcaaagttttacttttcttctacatgccccacacacaacatatatagtaatctgtaatctcgtgccccactttttagccagctccggcagttgtgcgtttcacacgctcgacggcgtcgccgccgaaagcgaaggtgtgcgcttcatccgactgcgcgaagatgcccaggtgggcaaggagatcctacggctgcaggcctatccacgttccacggccgccctcaaaggcgccgatgccagtggagaccacaagtacttcaacctaacggagcacaatgccaccacgctggtggtcagcctggcgcgctcgctggaacgactggtggaccgggatgtgccgcgaaacttactaaagttccggatactgtgcgccggcaaacaggagaagctcgaggaggtgggtacttcatatgggtatagtgctaactatatcttaaatatattttaagtcttccattgacatattttacataaatattttaaatagttttttaatacatagctaacatccctacttggctttctgcttccagggtagctatctgtccatcactgtgtatatcgaagatgtgaacgacaatgcaccggagttcctcaacgtaccctacgtggtggatgtggatgagaacacctccattgagagcatcatctttgagggagtccaggccttcgatcgcgacaagcccaatacaccgaactccgaggtgcacttcagtatgtccacggtgccagagcaactttcggccgacggaagtccatactttgccctcaagagtccccatcggccactgttgattttaaagagggaactggactttgataatggtatcaggcaattcaagctgccaatattcgcctgggatcgaggtacaccagccaaccaggccaacaccacgatcacgataaacgtgcgagatgtggacgatttgccgccaaagttcaccgaaggcgtctatcgcaccaggatcaatgagttctatccgatgacgggagtgcccataagaatacctctatactttgctccacccataatggccttcgatcaggattcgctgaacgcctcgctagtttatgacattatttcgggtaacgagcgacagcttttccgggtgaatccccacaatggagtcatgtatctgcagaaggaaattgatctggaagaggagagtctaccgggcaacacttttgtccttcagctagaggcacgacaaaaggacaatcccctcaagaaagctctagcacggttagtgaaacagtaatcaaattacaaataaatctttattatctgaactatatcaacagcatcgaagtagaggttttggatctgaatgacaatgttcccgagtttgaggccgattattacaatatttcaatagtggaaaatctacccactggctttagtgtactacaggtaaatgccgtcgatcgggatcagggcgaaaactcggagtttctgtacaatctagttgagaccaaggatgcggcaggtgcttttcgaatcgactcccgaactggatggattacagtgcgtgacgatcgcctactagatcgcgaacagcgtagatctattcagctgaatgtggaggccttggagcggaatccttcgtacctagatgataagcatctgaagaaaccgggacctagcaaagttcaagtagaaatcacgctgctagacacgaacgacaacacgccaaagtttgagcatggaaatctgtacgaatttaaggtacccatcaacgcacctacgggctatgtcataggtcaggtggtcgctcacgatccagatgagggtccaaatggccatctgctatacgaactgcaacgacctaagggtagtgggtatatcccattccgactggacaacaagaatggcactatttatgtgggtggtccacttcgaaggggtcgcattgcagtcttcgtggaggccactgatcagcctactaatccctcggagcggcgtttctccttggcagtgatcactattgaagtgtatgccaccattgatgaccaggccattgatttcgtgggtgctccatacgagttttgggtgggagcgaacactccgttggggacctcagtgggccaagtgcgaaccactctgatttacgaaggtggcgatgaaataatgtatgacctcctgcacacttactcggaaggggtacctttcgccatcgaggagcgatccggcattatcactgtcattcgagagttatctgaatttaaacgcaaagtctaccaatttgaagcggtggccaattatgtaagtttacctcattatcattgaaatcttggatttctgtaaatttccattattgtttgtttactgctttcagctatttgccaactcctcccaatcacttgtcatgtcgcgaagttcatctccactgaccacaatagcctcgccggctgaactcagcgatgaaggtgtactcatcaccaatctcaccatccacatagtcaacaagccggagcaaaaggtgcccctaagacctgtcatagagtaagtattgtttttactttttatcaaaccataatatttaaatgttttcaccacataattgttttcatatttgcatcatttcagagagatcaacatgaacgtaatccactttcacgtggaggagaacgttgtgggtggcatcattggacagctgctgtacaagaatggcatcaatctggtcaacaacgaactgggaacttaccgagaaatgccatcggagccaactagtcgcaatattaccatgggcagtaggttccgcagccgaaacaggagtcgcagttccaaatcgaagcgtcgattgccacgacgtttggtgggcgatgcgaatataaagcttcgctacatcattgccaaccagcaagaggtggtgaacaagatctccatcacggaggatggcactttgctcactttgaccggactggatcgtgagcagcaaccgagctatgagctaactgtgatcgtggagtacagcacaggactggtgagcggagctgggatctaccaggtgaacatcaaggtggacgatgtcaacgacaatgctccgaagttcaatgctcttacctatgtgggtttgatcaacgaaaactgtgttgtgggcacagaactgtccatgaatcatgccatactcattcaggatgctgatgagggacccaatgccgaattcagagtacaactccaaggcgactatagcgacgagttcagtatagaatacgtaaatggaacatcctcggaaaactctactcatcataaaatgccatccactacaggggcatttaatatcttcaacctgacggatcaatggaacgatgagttcaaataccaggagctgcacaccacttttatgcagacgaactttaagctcagttcgggtccgtatttccgtatctcctatacgggaaagaggggattggatcgtgagaaacagcagctgtacaacttgaagatcatagcagccgatactggaggtctctcgggatatgcccatctcacagtcctcgtggcagatgtcaatgacaatgctccgatgtttgaacgcatctccgtgttcaaggactcgcgtttggagatccgtgagtacaccaccgatatggagatctactttgtagagagttcaagtggaatgacagctcctcaggcaacggcagccatgatgctagccccacctccatatcacattcccggatcaccgagattcaacgtggatcgagagagatctgtgggtgcaggactgggagtggtagctagagctaagtcccggcggagaatggttcgagctttgacaaccaaatgtcctttgttcgccatttatgaggacactccagtgggtacgaaagtcctacaactgagcgcaagtgatgaagacttcggaaagaacgccctactgcactacgagctccaaggggagcaggtggagcggacacccggaatgcccatgttacgtgttcatggagtaaagtattttgcaatagacaaactaagcggggagctgtcggtcaactatcctctgtcggcaaacatcgaaataatgttaaatctgacagtgacggatattgatggtctaaaggattccacatgtctgcgattcactgtgatggatgtcaacaatcatgcgccgacgttcaagaagtcctggtatagcttcgataccccagaaggggagtataaggacagtgtgctgggtcagctaaccgccatagacatggactttggagagaatgctaatataacgtatacgctcagtgattcccatctgccatttaccatcaaacctgcctcgggagttctgaagatcggcgggcagctcgaccgggagctgaaggacaagtacagcttccaagtgatagccacggacaatgcccctgtgatgcagcgaatgtccagcagcgtggatgtggaagttaatgtcctagacatcaacgacaatcggccggagttcattggctacgacgatcaaacgaaggcggtgaagttcatcccaagtgtggcagatcgcacgttgatgttgccggtgtataaggcatatctggatcgaagtactcagcctggcacatttgtgaggcaactcacggccatcgataaggataatgtgggtaatggcaatggactggttttgtactccattcgtcatcaggaaatgcaagcaccactcttccaaatcgattcccgggatggtaccatctccacaatatcacgtataaatggctataacgactatgagcatctgaatgtgtctgtgattgcctcagatgtgggcagtccagctttatccgcgacagccattgtaattgtgaacctccaggggcaggcagttacggatcctccaaaatcgactcccaaaccagaacctccagcaaatgtcaccgtattccagcacgcttattatgaggttaagctcacggagaacaatgaagcacccattgaggtgatgcgcttgaacctaagcgctggtcttaatcccgagaactatcgctggtctttgtggttggaggagggcttggatgaaacggatgctcatccgccatttgaatatgatgccaagaatatgcttttatatgccctcaagcccttcgatcgggagcacatatcccgataccaacttaggattcgagcggatcgattgagtcgggaagctaggaactacgccagggtctcgtacccagtggtagacgaacgaatagagggtctgtcgctaaacgagtgtcgaattttggtccacattgcggatgaaaacgataatgcacccaagttccgaggcaatgggcaaccgattgtggcggttctaccgcaaagtgccagctttggataccccgtgacccgagtggaggccaacgatctggatgaggggctaaacgccgagatacgctatcgacttctaaacgagcccgctcgcctgtttggcatcgacgagctatcgggcaatattcgcctgcttggagaactttcccgcaccgaacacatctacggattcgatgtgaaggccacagatcgaatgggtgcagacgatggcagaagcggcatcgtcaacgtgttcgtctatatcatcaatgaggccaagcaggtgcgtctggtggtggccggaatgcctgtcgaggtggagcgtcgcattgagggcctaatggaggcactaagcgatgccattggcaaggatgtacgtgtcagactattggagccgtattctggagggctagagcctgcgtaagtaactatatatcgattgtagtcttaataaaacaataccccatgtaatgatagtctgccagtgtaaaagcagtatttaggcatggtgcttagaccataagaagatttactaccaataaacgtctttataaaatcaccaccaatttaaatgttaatttagatagatggttagatatagattaatggatcgataacttgccaacaatccgttcatgctttctaaccaattattttaagtaccagatacagatacaagttataggtataggtttaaactctcatatttgattattatgtgcagcttttgaccgcattgcataacataattggccattagttgccatcaaaacactgcagtgtcatcacctaacaggttctctaccctctccatttgcagcaccaatgcctatatctatgccgtcgatccgcacacgaattccattatggaaatggagcaactgcaggagtaagttttctcccattccccacaccgactcccttcccggccccgggcggcatctaaaatcgattgacccagaactgccatgcgaattaatggccttgaattgcttctttcagcgccctggctggcctccaactggacgcactgcaactgcagcagcagaaactcgacggcggcaagcccatgccccgcatcctcgagctggccgagtttgggcagttggcccgacctgcacacgcctccgcgtccagtttcatgggaggattggagtttgtgacggtggttctgcttgcgctgatcagcctgggtgcactgatagccgcctgctgctacgtatgcatgcgccaaaaacggtatgaatgacgagtgcacgagtgtcatgcaagtgcaactgcaactgcaaccgaaagactgcttactgggcgctcaaatgtagctcatagatgcatttcatgttagccatagttttagcctaagctaaaggcccgataataaatcttaagtcaattgcaaacgttgttgttgctgccgctgctgctgttggtgtgtttgttgctgctgctgctgctgctgctgctgctactgctaatggccatgatcgtggccaagttgcttgatgccactgagtctgcataaaccggctggcattgggcctttcctgtccgattaaattataacggtaaaaagcaacaaacacaacatcaaatgcaacaatgcagcaatagcaacttgaggcaattagatgaagatcgtgtgacatcgctgcaactacatcccaaatgggaaagccaatcaaatgggatgtcatctcatcagctcagctcatcctgcacagagaaaaataaataatatgttcgaagttatgttgttatattgaaaggaaactacgatcaggtttaactataaatttacatattgaaaatgaaaacaagtaactatactagagcttaatgatgatttaaacgattgatatgagccgtctaaaactactacaaattcttcccgtgtctcttgcagacgtctctggtctcagcgtgatttctccgcctccgatgccggtctcacctataccatcgctggcatcggatctcctcgtggccagaagcagcgccgtcagcggcagcagcggcacacacagcgctgtagcaagggcagcacgggcagccaacgacccaccagtgccttcatgcccgagtccgtctgctcctcggcccaaacgcagtctacggccaccgccaccgagaaactggagcagcagctgcaccatcaccaccagcagcaggcgatggccacacagcagcagcatcatcagtacctgaacgagtgagtgaatggccgtggtcaagaccgcgtctagtcaaacgtgtttccattctggacactaattgccatcatccccgaaacaggcaacagcgacagcaaaagcgcgagtacatagacgttcctcttcccaagtccattgccaaggctgcggcggtgacgagtgggggcgatggagctgtgggcgtcgggagcactccgttcgtactgaagtacaatgcctgtcagcccgttaacaatctgtaagtctatagattatatttaatatggtttcaaatttggcacaattgttatgaactagacttaacatactaaactgcaacctatcatcacaacagtaacaattacgaaacctcgctgttctcacttcactcgacgggccaggactctggtgtggagttcctgagcagccgcgagctgtacgagacctcgccggattcctttcagcacggaggctctaagcgcggcaacaacacggaagttttatgccccagacatgcgaaggcccacttggagctgcgccagccaaatacggacagcaggtgggtagaagagtgtgctttatttcggattgccttcttaacatttgaaatctcattgcaacagtgacacctatgaggactctctgaagacggacgagccactggtggcgcataactgtcgcagtgccaattgtgagcaccgccagcaccagcagcaccccagtcaccatccccactaccagaacacgcggttcgagaagcgctcctgcgtgcgccactccttctccggggtcaaggacgacctcatgcagcagtcaccgcagatttcactgcgtccccggggccacgccctccgcaactcgatgaatgacctggagcagcggctgcacaacctggagcagtcctttcgccgcccgctcgaatttagcaaatctaattcattgttttagttcattttttagctagacaaaacgcagtgcaatttttagtgtagtcaacctagaatagactttagatattaagaaacaagtgcaataaatttgagagatgttacaattaatatagcccccaactctgaaaaagaaagtgatatatttgaaatccgggaaaatcaattgagcagtagaaaaactcaaaagaaaatttgattaatttccagtttaagtataaacccattgaagatatggaaatacaatatataatagtatagaaattcattctgatcatatagtagcttatggatttcaaagtgaaaatcatattgaacttatctgttattataaatattatttccattcaaatattggatgaactactcttcgatagacgacacaatcttaagttcttccttctgttaaccacataaataaaattaatttaaagtttcgtgtcacgattacggcttatcgatatctggcgccagtgtcactagtatttgtaccatcactaaccttggtcataaaaataaaagctagcgttccatttattttccatcgcccgagcgctgttccctatccattaacacgtctcaatcctggagtgcacaacatccggtgagaggactaccaaaaagagatagtccgccgctggttgtaggtgaataaacagtgaagaagcgaagagtccaaaggatacaatcgcaacccacttgccaagctgcacactttgagtccaacgttggaggaggagccgccatgaatgccctgcggcagttctacctggagatcccggtggtcacacgagcctacaccacggtctgcgtgctgaccaccttggcggtggtaagtgtatcccgtagtgcgttctaaatcgcggatgacgtgtacgtgtattatcttcgattatattttttgccaacttttaagcacctggacctggtgtcgccgctgcagctctacttcaatcccacgctgattgtgcgcaagttccagatctggcgcttggccacca

SEQ ID NO: 36545 - DNA, 6615 bp, DROSOPHILA
atgccgcccccttgggagccccacaatttggtccgcacgtcgctgtgcgccagctccggcagttgtgcgtttcacacgctcgacggcgtcgccgccgaaagcgaaggtgtgcgcttcatccgactgcgcgaagatgcccaggtgggcaaggagatcctacggctgcaggcctatccacgttccacggccgccctcaaaggcgccgatgccagtggagaccacaagtacttcaacctaacggagcacaatgccaccacgctggtggtcagcctggcgcgctcgctggaacgactggtggaccgggatgtgccgcgaaacttactaaagttccggatactgtgcgccggcaaacaggagaagctcgaggagggtagctatctgtccatcactgtgtatatcgaagatgtgaacgacaatgcaccggagttcctcaacgtaccctacgtggtggatgtggatgagaacacctccattgagagcatcatctttgagggagtccaggccttcgatcgcgacaagcccaatacaccgaactccgaggtgcacttcagtatgtccacggtgccagagcaactttcggccgacggaagtccatactttgccctcaagagtccccatcggccactgttgattttaaagagggaactggactttgataatggtatcaggcaattcaagctgccaatattcgcctgggatcgaggtacaccagccaaccaggccaacaccacgatcacgataaacgtgcgagatgtggacgatttgccgccaaagttcaccgaaggcgtctatcgcaccaggatcaatgagttctatccgatgacgggagtgcccataagaatacctctatactttgctccacccataatggccttcgatcaggattcgctgaacgcctcgctagtttatgacattatttcgggtaacgagcgacagcttttccgggtgaatccccacaatggagtcatgtatctgcagaaggaaattgatctggaagaggagagtctaccgggcaacacttttgtccttcagctagaggcacgacaaaaggacaatcccctcaagaaagctctagcacgcatcgaagtagaggttttggatctgaatgacaatgttcccgagtttgaggccgattattacaatatttcaatagtggaaaatctacccactggctttagtgtactacaggtaaatgccgtcgatcgggatcagggcgaaaactcggagtttctgtacaatctagttgagaccaaggatgcggcaggtgcttttcgaatcgactcccgaactggatggattacagtgcgtgacgatcgcctactagatcgcgaacagcgtagatctattcagctgaatgtggaggccttggagcggaatccttcgtacctagatgataagcatctgaagaaaccgggacctagcaaagttcaagtagaaatcacgctgctagacacgaacgacaacacgccaaagtttgagcatggaaatctgtacgaatttaaggtacccatcaacgcacctacgggctatgtcataggtcaggtggtcgctcacgatccagatgagggtccaaatggccatctgctatacgaactgcaacgacctaagggtagtgggtatatcccattccgactggacaacaagaatggcactatttatgtgggtggtccacttcgaaggggtcgcattgcagtcttcgtggaggccactgatcagcctactaatccctcggagcggcgtttctccttggcagtgatcactattgaagtgtatgccaccattgatgaccaggccattgatttcgtgggtgctccatacgagttttgggtgggagcgaacactccgttggggacctcagtgggccaagtgcgaaccactctgatttacgaaggtggcgatgaaataatgtatgacctcctgcacacttactcggaaggggtacctttcgccatcgaggagcgatccggcattatcactgtcattcgagagttatctgaatttaaacgcaaagtctaccaatttgaagcggtggccaattatctatttgccaactcctcccaatcacttgtcatgtcgcgaagttcatctccactgaccacaatagcctcgccggctgaactcagcgatgaaggtgtactcatcaccaatctcaccatccacatagtcaacaagccggagcaaaaggtgcccctaagacctgtcatagaagagatcaacatgaacgtaatccactttcacgtggaggagaacgttgtgggtggcatcattggacagctgctgtacaagaatggcatcaatctggtcaacaacgaactgggaacttaccgagaaatgccatcggagccaactagtcgcaatattaccatgggcagtaggttccgcagccgaaacaggagtcgcagttccaaatcgaagcgtcgattgccacgacgtttggtgggcgatgcgaatataaagcttcgctacatcattgccaaccagcaagaggtggtgaacaagatctccatcacggaggatggcactttgctcactttgaccggactggatcgtgagcagcaaccgagctatgagctaactgtgatcgtggagtacagcacaggactggtgagcggagctgggatctaccaggtgaacatcaaggtggacgatgtcaacgacaatgctccgaagttcaatgctcttacctatgtgggtttgatcaacgaaaactgtgttgtgggcacagaactgtccatgaatcatgccatactcattcaggatgctgatgagggacccaatgccgaattcagagtacaactccaaggcgactatagcgacgagttcagtatagaatacgtaaatggaacatcctcggaaaactctactcatcataaaatgccatccactacaggggcatttaatatcttcaacctgacggatcaatggaacgatgagttcaaataccaggagctgcacaccacttttatgcagacgaactttaagctcagttcgggtccgtatttccgtatctcctatacgggaaagaggggattggatcgtgagaaacagcagctgtacaacttgaagatcatagcagccgatactggaggtctctcgggatatgcccatctcacagtcctcgtggcagatgtcaatgacaatgctccgatgtttgaacgcatctccgtgttcaaggactcgcgtttggagatccgtgagtacaccaccgatatggagatctactttgtagagagttcaagtggaatgacagctcctcaggcaacggcagccatgatgctagccccacctccatatcacattcccggatcaccgagattcaacgtggatcgagagagatctgtgggtgcaggactgggagtggtagctagagctaagtcccggcggagaatggttcgagctttgacaaccaaatgtcctttgttcgccatttatgaggacactccagtgggtacgaaagtcctacaactgagcgcaagtgatgaagacttcggaaagaacgccctactgcactacgagctccaaggggagcaggtggagcggacacccggaatgcccatgttacgtgttcatggagtaaagtattttgcaatagacaaactaagcggggagctgtcggtcaactatcctctgtcggcaaacatcgaaataatgttaaatctgacagtgacggatattgatggtctaaaggattccacatgtctgcgattcactgtgatggatgtcaacaatcatgcgccgacgttcaagaagtcctggtatagcttcgataccccagaaggggagtataaggacagtgtgctgggtcagctaaccgccatagacatggactttggagagaatgctaatataacgtatacgctcagtgattcccatctgccatttaccatcaaacctgcctcgggagttctgaagatcggcgggcagctcgaccgggagctgaaggacaagtacagcttccaagtgatagccacggacaatgcccctgtgatgcagcgaatgtccagcagcgtggatgtggaagttaatgtcctagacatcaacgacaatcggccggagttcattggctacgacgatcaaacgaaggcggtgaagttcatcccaagtgtggcagatcgcacgttgatgttgccggtgtataaggcatatctggatcgaagtactcagcctggcacatttgtgaggcaactcacggccatcgataaggataatgtgggtaatggcaatggactggttttgtactccattcgtcatcaggaaatgcaagcaccactcttccaaatcgattcccgggatggtaccatctccacaatatcacgtataaatggctataacgactatgagcatctgaatgtgtctgtgattgcctcagatgtgggcagtccagctttatccgcgacagccattgtaattgtgaacctccaggggcaggcagttacggatcctccaaaatcgactcccaaaccagaacctccagcaaatgtcaccgtattccagcacgcttattatgaggttaagctcacggagaacaatgaagcacccattgaggtgatgcgcttgaacctaagcgctggtcttaatcccgagaactatcgctggtctttgtggttggaggagggcttggatgaaacggatgctcatccgccatttgaatatgatgccaagaatatgcttttatatgccctcaagcccttcgatcgggagcacatatcccgataccaacttaggattcgagcggatcgattgagtcgggaagctaggaactacgccagggtctcgtacccagtggtagacgaacgaatagagggtctgtcgctaaacgagtgtcgaattttggtccacattgcggatgaaaacgataatgcacccaagttccgaggcaatgggcaaccgattgtggcggttctaccgcaaagtgccagctttggataccccgtgacccgagtggaggccaacgatctggatgaggggctaaacgccgagatacgctatcgacttctaaacgagcccgctcgcctgtttggcatcgacgagctatcgggcaatattcgcctgcttggagaactttcccgcaccgaacacatctacggattcgatgtgaaggccacagatcgaatgggtgcagacgatggcagaagcggcatcgtcaacgtgttcgtctatatcatcaatgaggccaagcaggtgcgtctggtggtggccggaatgcctgtcgaggtggagcgtcgcattgagggcctaatggaggcactaagcgatgccattggcaaggatgtacgtgtcagactattggagccgtattctggagggctagagcctgccaccaatgcctatatctatgccgtcgatccgcacacgaattccattatggaaatggagcaactgcaggacgccctggctggcctccaactggacgcactgcaactgcagcagcagaaactcgacggcggcaagcccatgccccgcatcctcgagctggccgagtttgggcagttggcccgacctgcacacgcctccgcgtccagtttcatgggaggattggagtttgtgacggtggttctgcttgcgctgatcagcctgggtgcactgatagccgcctgctgctacgtatgcatgcgccaaaaacgacgtctctggtctcagcgtgatttctccgcctccgatgccggtctcacctataccatcgctggcatcggatctcctcgtggccagaagcagcgccgtcagcggcagcagcggcacacacagcgctgtagcaagggcagcacgggcagccaacgacccaccagtgccttcatgcccgagtccgtctgctcctcggcccaaacgcagtctacggccaccgccaccgagaaactggagcagcagctgcaccatcaccaccagcagcaggcgatggccacacagcagcagcatcatcagtacctgaacgagcaacagcgacagcaaaagcgcgagtacatagacgttcctcttcccaagtccattgccaaggctgcggcggtgacgagtgggggcgatggagctgtgggcgtcgggagcactccgttcgtactgaagtacaatgcctgtcagcccgttaacaatcttaacaattacgaaacctcgctgttctcacttcactcgacgggccaggactctggtgtggagttcctgagcagccgcgagctgtacgagacctcgccggattcctttcagcacggaggctctaagcgcggcaacaacacggaagttttatgccccagacatgcgaaggcccacttggagctgcgccagccaaatacggacagcagtgacacctatgaggactctctgaagacggacgagccactggtggcgcataactgtcgcagtgccaattgtgagcaccgccagcaccagcagcaccccagtcaccatccccactaccagaacacgcggttcgagaagcgctcctgcgtgcgccactccttctccggggtcaaggacgacctcatgcagcagtcaccgcagatttcactgcgtccccggggccacgccctccgcaactcgatgaatgacctggagcagcggctgcacaacctggagcagtcctttcgccgcccgctcgaatttagcaaatctaattcattgttttag

SEQ ID NO: 36546 - protein, 2204 aa, DROSOPHILA
MPPPWEPHNLVRTSLCASSGSCAFHTLDGVAAESEGVRFIRLREDAQVGKEILRLQAYPRSTAALKGADASGDHKYFNLTEHNATTLVVSLARSLERLVDRDVPRNLLKFRILCAGKQEKLEEGSYLSITVYIEDVNDNAPEFLNVPYVVDVDENTSIESIIFEGVQAFDRDKPNTPNSEVHFSMSTVPEQLSADGSPYFALKSPHRPLLILKRELDFDNGIRQFKLPIFAWDRGTPANQANTTITINVRDVDDLPPKFTEGVYRTRINEFYPMTGVPIRIPLYFAPPIMAFDQDSLNASLVYDIISGNERQLFRVNPHNGVMYLQKEIDLEEESLPGNTFVLQLEARQKDNPLKKALARIEVEVLDLNDNVPEFEADYYNISIVENLPTGFSVLQVNAVDRDQGENSEFLYNLVETKDAAGAFRIDSRTGWITVRDDRLLDREQRRSIQLNVEALERNPSYLDDKHLKKPGPSKVQVEITLLDTNDNTPKFEHGNLYEFKVPINAPTGYVIGQVVAHDPDEGPNGHLLYELQRPKGSGYIPFRLDNKNGTIYVGGPLRRGRIAVFVEATDQPTNPSERRFSLAVITIEVYATIDDQAIDFVGAPYEFWVGANTPLGTSVGQVRTTLIYEGGDEIMYDLLHTYSEGVPFAIEERSGIITVIRELSEFKRKVYQFEAVANYLFANSSQSLVMSRSSSPLTTIASPAELSDEGVLITNLTIHIVNKPEQKVPLRPVIEEINMNVIHFHVEENVVGGIIGQLLYKNGINLVNNELGTYREMPSEPTSRNITMGSRFRSRNRSRSSKSKRRLPRRLVGDANIKLRYIIANQQEVVNKISITEDGTLLTLTGLDREQQPSYELTVIVEYSTGLVSGAGIYQVNIKVDDVNDNAPKFNALTYVGLINENCVVGTELSMNHAILIQDADEGPNAEFRVQLQGDYSDEFSIEYVNGTSSENSTHHKMPSTTGAFNIFNLTDQWNDEFKYQELHTTFMQTNFKLSSGPYFRISYTGKRGLDREKQQLYNLKIIAADTGGLSGYAHLTVLVADVNDNAPMFERISVFKDSRLEIREYTTDMEIYFVESSSGMTAPQATAAMMLAPPPYHIPGSPRFNVDRERSVGAGLGVVARAKSRRRMVRALTTKCPLFAIYEDTPVGTKVLQLSASDEDFGKNALLHYELQGEQVERTPGMPMLRVHGVKYFAIDKLSGELSVNYPLSANIEIMLNLTVTDIDGLKDSTCLRFTVMDVNNHAPTFKKSWYSFDTPEGEYKDSVLGQLTAIDMDFGENANITYTLSDSHLPFTIKPASGVLKIGGQLDRELKDKYSFQVIATDNAPVMQRMSSSVDVEVNVLDINDNRPEFIGYDDQTKAVKFIPSVADRTLMLPVYKAYLDRSTQPGTFVRQLTAIDKDNVGNGNGLVLYSIRHQEMQAPLFQIDSRDGTISTISRINGYNDYEHLNVSVIASDVGSPALSATAIVIVNLQGQAVTDPPKSTPKPEPPANVTVFQHAYYEVKLTENNEAPIEVMRLNLSAGLNPENYRWSLWLEEGLDETDAHPPFEYDAKNMLLYALKPFDREHISRYQLRIRADRLSREARNYARVSYPVVDERIEGLSLNECRILVHIADENDNAPKFRGNGQPIVAVLPQSASFGYPVTRVEANDLDEGLNAEIRYRLLNEPARLFGIDELSGNIRLLGELSRTEHIYGFDVKATDRMGADDGRSGIVNVFVYIINEAKQVRLVVAGMPVEVERRIEGLMEALSDAIGKDVRVRLLEPYSGGLEPATNAYIYAVDPHTNSIMEMEQLQDALAGLQLDALQLQQQKLDGGKPMPRILELAEFGQLARPAHASASSFMGGLEFVTVVLLALISLGALIAACCYVCMRQKRRLWSQRDFSASDAGLTYTIAGIGSPRGQKQRRQRQQRHTQRCSKGSTGSQRPTSAFMPESVCSSAQTQSTATATEKLEQQLHHHHQQQAMATQQQHHQYLNEQQRQQKREYIDVPLPKSIAKAAAVTSGGDGAVGVGSTPFVLKYNACQPVNNLNNYETSLFSLHSTGQDSGVEFLSSRELYETSPDSFQHGGSKRGNNTEVLCPRHAKAHLELRQPNTDSSDTYEDSLKTDEPLVAHNCRSANCEHRQHQQHPSHHPHYQNTRFEKRSCVRHSFSGVKDDLMQQSPQISLRPRGHALRNSMNDLEQRLHNLEQSFRRPLEFSKSNSLF

SEQ ID NO: 36547 - DNA, 2765 bp, DROSOPHILA
cagcacggcggacatcctcgtcttctactccacattcgacagtgagtgttggcaaaatgtattaatcatatttagtttcacaattaattgaaacttgtccaggcttcgaaaagctttgaacgtcaatcaaatcgggttatttctgggttgaaaaggattgtgttcctatcaatgaattagaatacttaatgcatacttaaagcactattttggaagatacttgttcttagtccaaaagaaagaaatagttttttggctatatgaatataatttctatatttatcttgctattaagtttccatttcaaatatttcctgattgtaacttcttcctttcttcctttcagaattcttctcattccgtaacgttgacgatggctcctggttcatccagagcctgtgccgcgtcctcgaccaggccgccgccaacgaagctgccacgccggagggcgtcgagctactccgcctgctgaccgcagtgaatcggaaggtggcctacgagtaccagtcgaatacgaagaacgaggccctcaaccagatgaaggaaatgcccaactttatgtcgacactgaccaaaacattccagctgcgtgttaagcccaagacctgagctccggtcacgaaatcagcgacaatccaatcgggactgtgagtcagtccgcgggtcaagaacgagggacgccacaactctttcatttaatcgtaatgtttgcaatttgttaatagaaatacatatcgatggcacttatctagaattggcttagtgcctttgggactgcgatagcgaactggctgacaagtgaatagatagaagtcgcgtttccgggaggtcagttgcccggaaaatgttgcgatttccgcatgtctgcggtctttgtttgctgcttaaatattggcagattttggccttggccccgtttcggacttccgagccaatggtcgccaggtgccagcgatggatgaccttgattgcggtctttagatggctactactcacatcaatggcgccctttgttctctggaaaagtgctgccatgtatgaggccactaatgtgcggcactcgatggtctttaagacaatcgctttggccaccatgacgggtgatgtctgcatttcactagctctgttgggaaaccacctttggaatcgccgggagttggccaatttggtaaatgacttggccagattgcatcgtcggaggagactgagctggtggtccacattgttcctctggcttaagttgctactctccctctacgacctgttatgtagtgtgccatttctcaaaggagccggcggtcgtctgccgtggtcccaactcgtggcctatggagtccaactctactttcagcacgtggccagtgtctatggaaacggaatattcggtggaattcttttaatgctagagtgctacaaccaattggagcgtgaggaacctaccaacctggctagactcttgcaaaaggaatacagctggctgagattgatccaaagattcgtaaagctctttcagctgggcatctttctgctggtccttggcagcttcgttaatataatggtcaatatatacgcatttatgtcctactatgtatcgctgcatggagttcccctgaccatatccaataactgcctagtcctggccatccaactatatgcagtcattttggctgctcatctttgccaggtgaggtctgctaaattgagaaaaaaatgcttgcaactggaatatgtgcccgaaggattgacacaggagcaggtgggttaatctaataaaatgtaaggggactaattttcgttgatattttctcaggccatggcttcgactccatttcctgtgctcacgcccactggcaatgtcaagtttcgtattttgggcgttttcattcttgacaactcgttttggcttttcttggtctcgtatgcgatgaacttcatagtggttattctgcagactagctttgagcatataaatcatggtgaaatctaagaagaaatcctaggataagttcgctttataaactaaaatgaatctcaagtctactcatatatatacagttcctatagtattttaatacacttatatgttacgcttgttgaattaaaacaaataatttaaaaatcatgaactccgttttagtgtgtttgaggcattcgagccatttgcttattaatataattaattttttattatatttctcagtgtacataacagtggcgccaaaaagcaagtacggaaaatgtggtggtttctggaagtaacttgtcttttgctagatggcgcttttttagttccaaaaacaaacaacgcagtgaagaaggagcttttgacaccaatttatgggcgggcagtttaaaatgtgccttttgtccaatcggatttcaatgaatacattattgtttttatctgttgtggttttagcaatagcatgaataaaagacaaaatacatcaaagcgtcgaaatttttttgaagttgcgtgtggactacgttttttgcgattttcatacattttaaacttaatttaagtagagcaggtggtcttgactaagcattcggtgtaatcttgattttatcaaacaaagattgatggacataaactccattcaatacatttttgtcgcttttgcttgcgcgttcagacgcatttgtgaattttgatatgatatttgtgaaatgcttttgtcacttgactagccattgcgtaaactggaaatgaaagtcggagccagcaaatcccaaaaactagttaaaatagatttgcagtc

SEQ ID NO: 36548 - DNA, 765 bp, DROSOPHILA
atggcgccctttgttctctggaaaagtgctgccatgtatgaggccactaatgtgcggcactcgatggtctttaagacaatcgctttggccaccatgacgggtgatgtctgcatttcactagctctgttgggaaaccacctttggaatcgccgggagttggccaatttggtaaatgacttggccagattgcatcgtcggaggagactgagctggtggtccacattgttcctctggcttaagttgctactctccctctacgacctgttatgtagtgtgccatttctcaaaggagccggcggtcgtctgccgtggtcccaactcgtggcctatggagtccaactctactttcagcacgtggccagtgtctatggaaacggaatattcggtggaattcttttaatgctagagtgctacaaccaattggagcgtgaggaacctaccaacctggctagactcttgcaaaaggaatacagctggctgagattgatccaaagattcgtaaagctctttcagctgggcatctttctgctggtccttggcagcttcgttaatataatggtcaatatatacgcatttatgtcctactatgtatcgctgcatggagttcccctgaccatatccaataactgcctagtcctggccatccaactatatgcagtcattttggctgctcatctttgccaggtgaggtctgctaaattgagaaaaaaatgcttgcaactggaatatgtgcccgaaggattgacacaggagcaggtgggttaa

SEQ ID NO: 36549 - protein, 254 aa, DROSOPHILA
MAPFVLWKSAAMYEATNVRHSMVFKTIALATMTGDVCISLALLGNHLWNRRELANLVNDLARLHRRRRLSWWSTLFLWLKLLLSLYDLLCSVPFLKGAGGRLPWSQLVAYGVQLYFQHVASVYGNGIFGGILLMLECYNQLEREEPTNLARLLQKEYSWLRLIQRFVKLFQLGIFLLVLGSFVNIMVNIYAFMSYYVSLHGVPLTISNNCLVLAIQLYAVILAAHLCQVRSAKLRKKCLQLEYVPEGLTQEQVG

SEQ ID NO: 36550 - DNA, 3809 bp, DROSOPHILA
gtcactggaggggcaacatctgctttcggtggaaggcacctcgagaatcaaaggcgattgttctggttctgaaaagccggctaaacaactttcctgctcccccacccactgttcttcattttctttttttggctcttcagctgacagaaatattgatgtcgctaattgtaattacatatcaattataattggcatccaatcagggtcgtaggagcagctttattaattagccgcaattgttgttatgcgccacaagtttccagctctctcttatgtttctctctcttaagcgctgaggtacattttttggctgcaccgcaataaaagatttctttatattgttgtaatttaaagtgaaattgaaactaacttaactttgacatattgtttttatatcacattaaaatgcccgtagctaactgttcgaatattacacaataaattactaaatcgtatagaactttctctcagtctgcggtacactttataacggtactccttcgacttaaggacgccatactcatttccggtttccgttactttgtgtgcgtgaaattttgaattgcgtggcaaagtttgccgcccattgccgcttttttgcgcatctgaattttattgaaaacacattaagaaatccccagtagcagcgacactttcgccggaagttgccaatttccctgacgagcgcccacttttgtgggcgtgaacccgtcggggaaatcaaattgtctggtgcaatggcaaagggaattgtattttgctaccaataaacgtaacttcccctcgagcaggctaatcaacgttgggcaagagcccgaaaaataccgcggcgagcgagagaagaatccaccccagcaagctcaaggtgataagacggctgcattgattagataagatgttaggcgaacgggagcgagagcttttttttgtcgtttgataggtgaaaacttccaatcgcgcttagtcacaggttgctgccaaagcgcgcggacggtcagaaatggacgacaccgacttctcgctcttcgggcagaagaacaagcacaagaaggacaaggcggatgccaccaagatcgcccatacgcccacatcggagctggacctcaaaaggatcataatctcgcgccccaccaacgaggacacatacgagaattgcgcgcgagcgggcattgcgctaatcctgaaccacaaggatgtcaagggacagaagcagcgcgtgggcaccgaacgggatcgcgatgacatggaggcgacgctgcagggattcggattcgatgtacgcaccttcgacgatctgaccttctccgagatcaacgacacgctcaaagagggtgagttatccacgagttctattgttgcaacaaatggcagacaaaaacacagaaccatacatatgtactcaaagttaagttatctaccaacggaatcaagtttattttcgtattccaccgtaaatacgaggtaatgtctttctttacgagtagtaaaatatatttactcccttgttaaacaaaagagaaaacatttaatatgcaacttaaaaatcaatgtgatagtcatcaaaatctagctgcactcaatcgtgtccatcgaaactggtgacatatttcaaacacatatgtatatcttatcattatcaaaacaaagtcactatttttacgactgcaataattatgagataaagacagtaatctgttggtctgatcaatccgaaggcagcaaaaaaatattttttgttttgagaaaataacaaccgttttatatgttgaaaattgtatagtgcattgattattggaacgcgtctttttgtatagttttctttgaagagaaaagtgttttgaagcaagtctcgatttttattataattatttttctacttactaaagatgtgaatctacttcatttcagttgctcgggaggatcacagtcaaaacgactgctttgtgttggcggtgatgtcacacggcaccgaaggcaaggtctacgctaaggacatgtcatatcctgtggagcgcctttggaatcccttcctcggcgacaactgcaagacgctcaagaacaaacccaaactcttcttcatccaggcctgtcgcggagccaacctggaaaaggcagtcgagttctccagcttcgctgtgatgaccagggaactggtcccggagcccgctgccgccgttcagcccatcacctatgccattcccagcacggcggacatcctcgtcttctactccacattcgacagtgagtgttggcaaaatgtattaatcatatttagtttcacaattaattgaaacttgtccaggcttcgaaaagctttgaacgtcaatcaaatcgggttatttctgggttgaaaaggattgtgttcctatcaatgaattagaatacttaatgcatacttaaagcactattttggaagatacttgttcttagtccaaaagaaagaaatagttttttggctatatgaatataatttctatatttatcttgctattaagtttccatttcaaatatttcctgattgtaacttcttcctttcttcctttcagaattcttctcattccgtaacgttgacgatggctcctggttcatccagagcctgtgccgcgtcctcgaccaggccgccgccaacgaagctgccacgccggagggcgtcgagctactccgcctgctgaccgcagtgaatcggaaggtggcctacgagtaccagtcgaatacgaagaacgaggccctcaaccagatgaaggaaatgcccaactttatgtcgacactgaccaaaacattccagctgcgtgttaagcccaagacctgagctccggtcacgaaatcagcgacaatccaatcgggactgtgagtcagtccgcgggtcaagaacgagggacgccacaactctttcatttaatcgtaatgtttgcaatttgttaatagaaatacatatcgatggcacttatctagaattggcttagtgcctttgggactgcgatagcgaactggctgacaagtgaatagatagaagtcgcgtttccgggaggtcagttgcccggaaaatgttgcgatttccgcatgtctgcggtctttgtttgctgcttaaatattggcagattttggccttggccccgtttcggacttccgagccaatggtcgccaggtgccagcgatggatgaccttgattgcggtctttagatggctactactcacatcaatggcgccctttgttctctggaaaagtgctgccatgtatgaggccactaatgtgcggcactcgatggtctttaagacaatcgctttggccaccatgacgggtgatgtctgcatttcactagctctgttgggaaaccacctttggaatcgccgggagttggccaatttggtaaatgacttggccagattgcatcgtcggaggagactgagctggtggtccacattgttcctctggcttaagttgctactctccctctacgacctgttatgtagtgtgccatttctcaaaggagccggcggtcgtctgccgtggtcccaactcgtggcctatggagtccaactctactttcagcacgtggccagtgtctatggaaacggaatattcggtggaattcttttaatgctagagtgctacaaccaattggagcgtgaggaacctaccaacctggctagactcttgcaaaaggaatacagctggctgagattgatccaaagattcgtaaagctctttcagctgggcatctttctgctggtccttggcagcttcgttaatataatggtcaatatatacgcatttatgtcctactatgtatcgctgcatggagttccc

SEQ ID NO: 36551 - DNA, 927 bp, DROSOPHILA
atggacgacaccgacttctcgctcttcgggcagaagaacaagcacaagaaggacaaggcggatgccaccaagatcgcccatacgcccacatcggagctggacctcaaaaggatcataatctcgcgccccaccaacgaggacacatacgagaattgcgcgcgagcgggcattgcgctaatcctgaaccacaaggatgtcaagggacagaagcagcgcgtgggcaccgaacgggatcgcgatgacatggaggcgacgctgcagggattcggattcgatgtacgcaccttcgacgatctgaccttctccgagatcaacgacacgctcaaagaggttgctcgggaggatcacagtcaaaacgactgctttgtgttggcggtgatgtcacacggcaccgaaggcaaggtctacgctaaggacatgtcatatcctgtggagcgcctttggaatcccttcctcggcgacaactgcaagacgctcaagaacaaacccaaactcttcttcatccaggcctgtcgcggagccaacctggaaaaggcagtcgagttctccagcttcgctgtgatgaccagggaactggtcccggagcccgctgccgccgttcagcccatcacctatgccattcccagcacggcggacatcctcgtcttctactccacattcgacaaattcttctcattccgtaacgttgacgatggctcctggttcatccagagcctgtgccgcgtcctcgaccaggccgccgccaacgaagctgccacgccggagggcgtcgagctactccgcctgctgaccgcagtgaatcggaaggtggcctacgagtaccagtcgaatacgaagaacgaggccctcaaccagatgaaggaaatgcccaactttatgtcgacactgaccaaaacattccagctgcgtgttaagcccaagacctga

SEQ ID NO: 36552 - protein, 308 aa, DROSOPHILA
MDDTDFSLFGQKNKHKKDKADATKIAHTPTSELDLKRIIISRPTNEDTYENCARAGIALILNHKDVKGQKQRVGTERDRDDMEATLQGFGFDVRTFDDLTFSEINDTLKEVAREDHSQNDCFVLAVMSHGTEGKVYAKDMSYPVERLWNPFLGDNCKTLKNKPKLFFIQACRGANLEKAVEFSSFAVMTRELVPEPAAAVQPITYAIPSTADILVFYSTFDKFFSFRNVDDGSWFIQSLCRVLDQAAANEAATPEGVELLRLLTAVNRKVAYEYQSNTKNEALNQMKEMPNFMSTLTKTFQLRVKPKT

SEQ ID NO: 36553 - DNA, 2492 bp, DROSOPHILA
aggtaggatctcccacagatccgtatcaatgtggtgcgtaaattaaatcaattaaactgtcaaattgttatgtgtgtgtagtcgtcgtttatcgtctcgcatctatggcgtataaatttaaatgtaaatgtaaagtgttccaagaaattacaataataaaatcaaagtatctatacaaaacattttcgacttcaaatatcttttttttagtgggtgtggcgggtgtgtaaattcgcctcgaagctcaacatacttacacataccatacattcgcatcaggtgcgatacaatcaacgtatgtatgccagacaatttatgaaaattatggattagtgcttttagctgaacagcgccatggagagatactttaatactctaccgataacaccgtatgccaaaatgagtaaattagttgtggaaataggtcattgcgtagtggaatgcttttaaggaagcattacctaacaataacctcaaaaaatcatagtcttggaaaaatctggttgaagtgccatttactatgcattaatttccttttatatttattcgtagtatattttaaagcacggtagctcccggaaaataaaccagtatcccataataaacaaaaggccgtgttttatacattatacatctatgtcagttttaactgttttggtttcgcgcgcggaagtggcgccacctggtgcagaagctgcgaatgtactcgtatttttacattttacgtaaggggtgttcacactgatgaccattttccaagctactattcaaattactcgaccagttgcttatatatttacggcattttgtcaaggttatatctatttttagcgtgagcattaaaatatctaaatatttgagtgttgatatacattggtaagatacgtacccataaaaatatttgtagaaaaatatcgatgtattgatatttttacatttttatcacatccctaactcaaaaaaagtaaacacatttcggaattcatatatttcacagaacatgagtaatattgtacagtatattgtagttcgcagcgacttgcgttccgcccttagttggcccttgggggcggtgatcgctcagagttgccatgccacagccgccgtcattcacttgaattccgaggacgccgacactgtggcctacttgaacgatctggataatatgcacaaagtggtgctggaggtaatgaaatgggtttatattttaaataatgtatatcataggacttctacaacactttactttcttttcaaaatcttaatatttgtgtattttcaatcaaagagatggaattaaagtattacactttttcaggccaaagatgagagtgctctggtcaagctcagtgaaaagttaaaggagaacgagattaaacacaagttgtggatcgaacagcccgaaaatatcccaacctgcatcgccttgaaaccttatgttaaggacacggttcataaatatgtcaagcaccttaagcttttaaaagagtaattcattattgttgtatatgcttattgacactaaaaatttaagaaaaagaaaagcgttgtttttgctttgtattctgtcaaaaacatgaccggagcactttattacataagctcaacgggtccaatataaagttaggccaatacaaatttacattttacaaagaaagcaggatagatataaaaacattgttgttgagccgcagctgaacctaaaagtctacttgaagcttaggattcccttctaggatcttggttaattgtcgtgtgataagaggacagaaatcaaccttcaaccggcgcagtccgctaagcgatttggtcaacttcgcaacgacctcattggacagattgggcgagccactcaggtccagaaactccaaggtagacagtttttgcaatcccattaggtgtagcgttgtaaagttctgattatgtaatatcagggtccgcagttctttaagctgggagaaaatactcagatcgaaggaagtatccgacataggtccaaaagaatccagaatctctagatggcgcagcgaatacgattccgcgatcgacgtaagcagcacgttattcacatggtagtcaagctgggcggaagagtgaataaccaaggtgtggagacgagacagaccgcccagctgtatcacattcatgaagtcggtaagctcgagaacctcgagcatggggcagtaatgtgcgagccgtccgtacagctcattatctttcgcaaacttgacaatgccagggcagcgcagttcgcggagatgcgacagggccgcaagttggattagacacttgggcgacagatctacgcatcctgaaacatttaaaatctccaaggaaattggcagagattttaaactgtcgcctttaatactaaagttttctctgatgtccagactctttagtttcgatagcatctgcaagcagtaaatgtgagcatctttcaggttacaacgcctcaaggatatgttggtaatattaatcaacccattggc

SEQ ID NO: 36554 - DNA, 360 bp, DROSOPHILA
atgagtaatattgtacagtatattgtagttcgcagcgacttgcgttccgcccttagttggcccttgggggcggtgatcgctcagagttgccatgccacagccgccgtcattcacttgaattccgaggacgccgacactgtggcctacttgaacgatctggataatatgcacaaagtggtgctggaggccaaagatgagagtgctctggtcaagctcagtgaaaagttaaaggagaacgagattaaacacaagttgtggatcgaacagcccgaaaatatcccaacctgcatcgccttgaaaccttatgttaaggacacggttcataaatatgtcaagcaccttaagcttttaaaagagtaa

SEQ ID NO: 36555 - protein, 119 aa, DROSOPHILA
MSNIVQYIVVRSDLRSALSWPLGAVIAQSCHATAAVIHLNSEDADTVAYLNDLDNMHKVVLEAKDESALVKLSEKLKENEIKHKLWIEQPENIPTCIALKPYVKDTVHKYVKHLKLLKE

SEQ ID NO: 36556 - DNA, 11105 bp, DROSOPHILA
ttgatttgttatgttgtggtgcactgcaaacaatgtcgatgtatttgggtggatgctgtacgagtattatgttgtattgggtctcatctacatcatcgtgatcataatgtgctgttagcaaaactcaatttcttttaaatcctttggggtttatttgccaagttgtaattaattgaattatttcccagaagaaattattatgttgatttatcttcgagtatacgtttgctgtattatggggagcgtgctatagtttattggtaaattagtaatttatgttgactaatagattgcctccttttcggctttatcattgtttttgtgcagcttagactttgcttcttcgatggaacaaagttttgcgataaaagggcgatcaacgtttaaagttggcttaggaaaacctctagaacagttctaaattttggtagtaactaaacgagaaagccagcacacatccctcagtgtctttttggccacccgaggcgtcgtaacccctgagcccaacattgtatgcgaatgccgctccgataagacgtgccatttaattaccaaaatataaagtgcattccggctaccagagcgcccagcatggagttttctgcgagtgtcaaatcccaaaacaaacccacgagcaaatatgccgcatgctgatgacgacggcgatgccgatgttcggctcgtaacagtgcacgtggtggccaaaaagcacgctacatgcactacatctactcatacacttactcacacacgcacacacacacacacacacacacacaggctcgtgtcgggtgcagcactcactcacaccatgacgagtgcagaggcgtcggcagagtcgaccgagacggcgactgcgataagataaagcccctgcgatgacatagagcacccagagcgctcgagttctgccgacgctggcagagatggcggcgcagacgagtagcgcatataaaagccgctgactcgatggcaacgagcatcacaagacggccaaccgcgctgccgagcagacgagtccagttcgagagggtaccaaaatttaatcagaaagtgtagagtcagtttagaagcaacggtaaagttaacgtctatctctgtgtgtgagtgtgtgtgtgtgtgcgagtgctagtgctagtgcacctgtgtttgtgctgagagtttccgctacaagaataataatgccgcaacatttttcgaaaaagcccatttccaaaaccgacaaaagaacaagccaaaagtaacgagcacaagtgggtggctcaaagagctgcgaggctcaacaggaaccagagccccagttttccttgagtgggcagatagtttgtgaaagaaaggtgggggtagggtatgctggaggtacttttgcaaaaaacacaaccaacctctcgacaatttaacaactggaagaatattcttacttcgccccaccttggtcagggccataatgaattcattgaaagcgtggccaaagttttgctctggccaagccaaggagaagcgaacgctgccgctctaaggatcctcgtcctgtcagtcagtcagtcagtcagccagcctgtgtctgttttttcggtcctgttgtttggccaggcatgcgtcggtggccttaggccgctcattgtgagctccttggctccacagctcctcggtggctgcaaattgtaaattgtaaaactgtaaattgtcaaactgtaaattaatgcaaattacacgaaattactgcgaaccggacaatgcaacaaaaggcaaatagtggacgcggaatacggcggacagtggacagcggaccacggacaattcccggagctgcatcagcagataaagagcaaacggcgacgccacttgcattgtctattattttaaattggctgcgcaaatttacggcagcgcaaaagtaattagcgacggttgaaaactgtgccatcgtccaactcgaattgagaatgaagatgggtgagaattggaaaagcgattgggtcatctggtcatcggggggattaggctgctgctgggatcagcaaaccgagttgtagattccctgccaatggcaggccaaatacgtattccactgtccaatttgcatgctgatgcaatcaaaactactacaatttgtccagaaaatcgatcaatcgcatgtctgacagagtgtagcatacttttcagcactgcctaacatttgtcagctatctgcatttttttcggaccccatcccacattttattctctaataatttatgagcttcctgcctgccctcgcctgtcgggaattcagattttgcataataaacacattgcagcccaaaccaaaaaacaagaaccagtttatgcaaatcaaattgtgttgataaacgagtggtagggtgttctctaatttgattgcccaataaattgctgtatcgaatgaaaccatttcgcatctcgcgcgccgatactaaaaaagcaattaaagcattgatgtcttcatattgaaatttataacttcacagatggctattaattgccggagaggagataaaagtctgggatttccgccatatttccattattagaaactcgttgctgcgctgcatggcccgaaaaatgaaagcgaaactcaaacagaacccaattaacgagccttcggcggtgatgttggttaatgtggttgcctcgtgccacaaaagccgacgcagttttgtggcaaacagcgcgtggcttttatgcattggcgcatgagtattggtaattaatgggaaggcggcggcacaaatgaccgtgccacagcgacaaacaaacttccgcgccacacggcgtatgcgtaatgtgctcggcgccctacaaagcggaacccagcggaaaactgaaaaacaaatgacatcgatgaattcaatttgcgcgcatatttaattattaaatgcgaggataaataatacgcacatcaggctattaaaaggctttaaatttccacggccatttcccgtagccatttcgaaagtgctactgaaatgtgatttcactgcattgcaatgcattggctagcaggctcgtagattatccagtcgaacttaatcccgtttccaattgacctggaacaagcagaccatttatatcaccttttatatatatttatttgcattgataaacttataaacatataaagatttatgctaggagagaatatatcagaatataacagaactaaatagtatgaatatttttggatgaatattattggctccaaactgttgtatgaaaacggtttcatttgtcttaaacgacgaacaaatttcacaagtggtctcatattgatttgtattttcccgtataaaaacattaatttccttatgcccctggctacgtgattgtatttcagttgaaaagcacttttcattcccttctggaaagaaactcacggaattgcaattgccaatggagatggaaagggcgccaaattgaatattacactttttgtgtacttttagccagttgagatgtggattattttttcagcattcattttttattttaaccaacatactaccactccaatttcacctgatgttaattgaggcgcacgtgggaaattaatgaactgtgacagtctgatttttgcgcgcaaatgtgtgtgcattaaatgctaaatgaagttgacatcggctgccgcattgtttgaggccatcgttaatttattaattaaacaagcgatttaacctattgcaataattgtcaaaattaacctttatgacagcgaaatttgtgaattcaattaacattgccaaagtcagctttgcacaagattaatcgttctaagggaaaatggaaggagggcttatgcagcttatgaatttttgcaatatacagcattatgaatactgggccagattattttttaatttattttgactcttaacttttgaccttgctatgacataattttaaataaaatgtgggtaatattgttgattttattccgtttttcataaattgtaattgaactaatccacttttaagccagcactcacctgcacttcagatgcccgaaggcaatagaaccaatattgataattcttccattagaataacaatttccccaccattttcttgcatgtttcagccctgacttggcttacaaacggcaaccttttcgccataataatataataatattatctttagtaagagtcaaatttacgcgcacttgaccagaaacctttacgccgttcctagatcggatgtcttatttgaatttgcctcttgccaattcgataagctcgactcggagaaattctatttaattccatttccgagacaaactgcatttttgccaaacggaagtggtccgcttttagccatcagccatcaggcatcagccgttggccatcgacgctgtcttggccatcccggcatcctcgttgccgttaccgttgccgttgtcatgttcattgcattccactttccacttgacatcctcgctgcaatttccctctgttgtggaattatgctttggctaccttagcggctcctagctgagcgaaacaaacaccagtttctggggtaagggatacccgaaatgaactaaggcaaatatttactaggcttgtacaatgacttaagcctcttccaaataaagatagtgaacatgaacgatgcgttttgttctgcctttaaattctattcgggagatgtattttattacatatagtttatacgttatatttctttcaatttcttcaatccgatagggttctggcaaagcactcggcactcgatttaaagtcccttgagactcgcgtaacgccacccataaacgctgtgaatatgaggtactcttttagaggcagttaatgcaaacacgaaggctttcacaggctttcagctttgagcgctggcaatggcccggtctggtcttttgatgtttgggggcctgtttactgcgtctgcactgccaagatacattccacaatgcatgcatgcatatatagttctgtctaatttagcacatggccctgccttgcaactggcttctgattgaaggttaaatgagccatgagccccacaaacacacacataagcatacactcgcacgctcgcaaagggggcggggctgggggctgtctgaggcaaagccattgcatttgtgtcgcttttagctcggcactcgacccgcctcttttcccccaggatgcatttgcattgcgcacaacagcgctttcgctcttttcgcatccttagacagtcctgttttatttcctttgcccgaattagctggcataaaccaagccagtcaactagagctaacccaatccgttttcctgctgcccctggttctattctgctagttttggttttaatattttttttcttcctagactgttatttttacgaggcagcaccacccctaattgagaaagaactttaaatttaaacgcagccttgtttccgaatactcttcatttgccattttctgccatcgacgatgtccgtttaattgtatttttcattgtcattgcagttccccatttccggttgcaactgtggtgagccaatataagctcaataaagaaaacaaccagcggtaaatcaaacacacaaaaaaaaaaaccaacacaataatgtcgatctccgatttccgcaaaaagaagctgctttttctgttcaatgtgttctttggtgagtatttatcagaatgaagaatgaccgatgtggaaaaaaggagttgcaagtcgcaaaccgcacgtgacgtccattttaaggggaaaatcccagtcatgggacgggaaaactttgattaggttggagccgaagtggaggagtcggctttaataggagtgtaaaacacggccaagatattatgagaatttctataataaaatcgcaacgtgaatgacagacataagcgtgacgttcactttcgatttaagcaccaccatatgtgctgtgaaaaacaacgcgtatacgtaatgtggtcctattgcatcgcgtatacgtaagtgcttgaaatccacttaaatacgtggagtgtattccgttccatgtttaatgcacaggagtgtttgcctgtcagggaagtcaaacaaaacttgccaatttaaaattaatttaaacgcaatgcaaatgtcgaaggaacaactttcgtggagagctcacgaaagtaggcaacactgtgtgtgataaagcttaagtgcatttcaattatgactaattcaccggtgcggtgcggttctctcatcccttgattcccatccacaaaatgttctctgctaacttggctcactgcccgcctttcggcggcagctggtcaggatataacaaaagagcagcgtcgaaaaaaagggcataaaacgcaaacgccaaacacttgacactggcactgaagtggccgtttgcacaccgttgcgaatgataatggtacgcccgcatggccaaaagccaaacgcagggcttcgtggaaatggcactcaaagaaatggtcactaaaataaacaaaaaattaatctagcgtggctaagggggtttattttaatgattttagcgactattttggcgataaaaagctagtagtttcttaggtgttaaaatcactaatcgaagactatagataactgaatggcttagacgaaatgaagctttcctaaatataattggggaaatttagttttattgaaactcattagtaaatatgttcattggaagacagtcaggcattatgagaatttctatgttgaaattaggatagtgtgaacaaagaagattaactggtatttattttctaattagggaattatgggtaagagaaatattagtatggtttaattagaaatctataaatgcactgacagaaaaatttaattttgtaaataaacaaggacaaaaagaaatacattttgcagctcccaataaagataatgaggctgtataaaaaaagacatttttgaaaggcctttgtaaagtgaattatcttatttgtttgagcgattcctcaataccaggaatagttttctctgagtgttgcaaggacttccgtgtggcggctgggtgacagttgggctgttcaattttgtcgatgttcgcactaccgccgaccggaactttgtcgctgggtgccaaaaaatacgtacattgttcattcctctattcgcattcttttcggctcttctcgcctgcgctgtttggatctggattttgggccgtactgaccaatgcaaacaatgcgggaccaacaacatgcaatttacgctgactgcccccaaaataacaacaatgccgcataatgcgtgccgcaacagatgtgaaccaaagcggcgaaatcgacgttaaggacttcgagctggccatcgaggtaagtggagcggaaatggtgctagcaaaaaagaaagcaagccaaaaatgtgaatatattgtgaagagtgcatgcgagaaatgctggtacttgcatatgaactattcgttcatacatcaacaaaagagctgcgcaaatgttttccagtttttgtgtttagttttttgtcttttactgttttttttttgcccatttgcatgcactgtttttgccaatatcaactgataacacaatttggagggtgccatgctgactgttattgtttctgccaattgcagcgcgtttgccaactgcgcggctggcagaaggacacgccgaagaacaaggagacctacgacctgatgatggaaatctggactggcctgcgctccaaggccgacaaggacaacgatggacaggtgagttccattccttccacccgctgagttgcaaaggcaatgcaactaactacatgtcaagtgattcgggtttttgtgcggctccattgtcagtgccaaaagtgctgaaatccatggactgcactcgatgccattgtggcagcagctgacaattgtgcaggacaccccagaaacacacacacacacgcacacacacacacacacacacgcatacagatgtgggtatgtcctttgcacagacaaacgcaaaaaacggaagagaaattccgttcataaatttgcctttttattggtgcggaatgccgaggggggtaaacaaattccctgccagcgggcggaaattgaattgtgaatggtttgagcaacccaatccgaattccagccgggaacttgccgacttgctaccaactttattctcattaccaggacgaactttctgtctcctagactgcgtgatgcaggtttccccattttgcaccacaatggccctgccataatcgcactatcgccagtgcagcaaattaaattataatccgggccggcggaacatagttcaatatcaacacaaacgacgaccaaaacccgcaacaatgcgatacaaagcgaacagaaattgaaatgtcagaccgacaaaacctcggcttctattggcgcattccaagggttacggttttactggtttactggtttaagggcactttgtacgcaactgagctcgatgtagtcaactggaggtagtggaacttcgactgctatgaagccacaaaagttctggccaccggccagggaacttgatggagttttctgccaaaatatgccaaatccccagctattgttggtccgcctttgtggcagtcagcttaagatttatcgttcactttccgcagcaatccaagtcggagcacgtgccgtgacacggccccaaattagccggaaaaggagctgcagtcgaggccagaggacgcatctcttttattttcggcgacacagcggagggtcaaggatctggggcaaattcagtcggcggccataaacattgaaatatgcagtctgttcgaattgctgtttagagttcatttctgtagggggtgaagtgccaattggcataacaagtggacttggtcagacacaaccctcgcgtttatttatggccgtattaaaacatgccaaaacgtaacggctggccacaattaatggaatgggaactggtacccttactgctttcggtttcggttcggctttggacaacgccgtggaaggtggtcagccaagttggtcaaggcgatgttgcggtaattgcctggctcgttcggtattggcaggcagaaaatgttaatatcgcatcactagatggcataaattacgcccccagagcaaccataacgtgttttatggggaatctccgcccgaggcgatacccactaatggtcttttcagcacggggagggatgcatgcataaatctgggggtccggggagcactgcctaatcctcaatctcgacgcttcatcccattatggctcttccaggtcagcgtggacgagtggtgcaacatgtgggacgcctatgccaaggatcccagcagcgtgatggactggcagaatgcctacatgaacttcatgttcgacctggaggatgcctcgcacgatggaggcatcgatgtgaccgaattcacgctggtctgctccagctatggcctggagaagaccgagtgtgaggaagcctttgcgaagatgtctcaggggcagagcgaggtcacccgggagcagttcgccgccttgtggaaggagtacttcgccgccgaggatgtgaatgcgcctggcaactacatttttggaaagaccagtttctaagacccagccaaataagaacagctccgatactggacatactgaacaaatgcaacaagtgaaattattattaaaattaatattatatatctattgtcgacaggggaggcagatctcaaccctcccgacttgatgatccgtcgttgttagttgagtgttgttttctctccaagaatctcaaattttgcccaattcaatgttctaatttagtagcgtaatctgtctgcaaactatttatattttatataccaaggcttcgagtaatgtgcaagctgtagtatctctacacaaacacatatatgcaaaagtgtacctttacgaactacgactatatctagcgatgatatcaattacgaggtaggatctcccacagatccgtatcaatgtggtgcgtaaattaaatcaattaaactgtcaaattgttatgtgtgtgtagtcgtcgtttatcgtctcgcatctatggcgtataaatttaaatgtaaatgtaaagtgttccaagaaattacaataataaaatcaaagtatctatacaaaacattttcgacttcaaatatcttttttttagtgggtgtggcgggtgtgtaaattcgcctcgaagctcaacatacttacacataccatacattcgcatcaggtgcgatacaatcaacgtatgtatgccagacaatttatgaaaattatggattagtgcttttagctgaacagcgccatggagagatactttaatactctaccgataacaccgtatgccaaaatgagtaaattagttgtggaaataggtcattgcgtagtggaatgcttttaaggaagcattacctaacaataacctcaaaaaatcatagtcttggaaaaatctggttgaagtgccatttactatgcattaatttccttttatatttattcgtagtatattttaaagcacggtagctcccggaaaataaaccagtatcccataataaacaaaaggccgtgttttatacattatacatctatgtcagttttaactgttttggtttcgcgcgcggaagtggcgccacctggtgcagaagctgcgaatgtactcgtatttttacattttacgtaaggggtgttcacactgatgaccattttccaagctactattcaaattactcgaccagttgcttatatatttacggcattttgtcaaggttatatctatttttagcgtgagcattaaaatatctaaatatttgagtgttgatatacattggtaagatacgtacccataaaaatatttgtagaaaaatatcgatgtattgatatttttacatttttatcacatccctaactcaaaaaaagtaaacacatttcggaattcatatatttcacagaacatgagtaatattgtacagtatattgtagttcgcagcgacttgcgttccgcccttagttggcccttgggggcggtgatcgctcagagttgccatgccacagccgccgtcattcacttgaattccgaggacgccgacactgtggcctacttgaacgatctggataatatgcacaaagtggtgct

SEQ ID NO: 36557 - DNA, 1267 bp, DROSOPHILA
cgctgccgagcagacgagtccagttcgagagggtaccaaaatttaatcagaaagtgtagagtcagtttagaagcaacgttccccatttccggttgcaactgtggtgagccaatataagctcaataaagaaaacaaccagcggtaaatcaaacacacaaaaaaaaaaaccaacacaataatgtcgatctccgatttccgcaaaaagaagctgctttttctgttcaatgtgttctttgatgtgaaccaaagcggcgaaatcgacgttaaggacttcgagctggccatcgagcgcgtttgccaactgcgcggctggcagaaggacacgccgaagaacaaggagacctacgacctgatgatggaaatctggactggcctgcgctccaaggccgacaaggacaacgatggacaggtcagcgtggacgagtggtgcaacatgtgggacgcctatgccaaggatcccagcagcgtgatggactggcagaatgcctacatgaacttcatgttcgacctggaggatgcctcgcacgatggaggcatcgatgtgaccgaattcacgctggtctgctccagctatggcctggagaagaccgagtgtgaggaagcctttgcgaagatgtctcaggggcagagcgaggtcacccgggagcagttcgccgccttgtggaaggagtacttcgccgccgaggatgtgaatgcgcctggcaactacatttttggaaagaccagtttctaagacccagccaaataagaacagctccgatactggacatactgaacaaatgcaacaagtgaaattattattaaaattaatattatatatctattgtcgacaggggaggcagatctcaaccctcccgacttgatgatccgtcgttgttagttgagtgttgttttctctccaagaatctcaaattttgcccaattcaatgttctaatttagtagcgtaatctgtctgcaaactatttatattttatataccaaggcttcgagtaatgtgcaagctgtagtatctctacacaaacacatatatgcaaaagtgtacctttacgaactacgactatatctagcgatgatatcaattacgaggtaggatctcccacagatccgtatcaatgtggtgcgtaaattaaatcaattaaactgtcaaattgttatgtgtgtgtagtcgtcgtttatcgtctcgcatctatggcgtataaatttaaatgtaaatgtaaagtgttccaagaaattacaataataaaatcaaagtatctatacaaaaca

SEQ ID NO: 36558 - protein, 184 aa, DROSOPHILA
MSISDFRKKKLLFLFNVFFDVNQSGEIDVKDFELAIERVCQLRGWQKDTPKNKETYDLMMEIWTGLRSKADKDNDGQVSVDEWCNMWDAYAKDPSSVMDWQNAYMNFMFDLEDASHDGGIDVTEFTLVCSSYGLEKTECEEAFAKMSQGQSEVTREQFAALWKEYFAAEDVNAPGNYIFGKTSF

SEQ ID NO: 36559 - DNA, 3745 bp, DROSOPHILA
tttcgattttatagttttctctctggtctttattctgcgtaattctcggaaactcgggctgcaggaattaacattaacggccgccgcagaaattatgcaatgtccacggaccaaacttggaaaacacacaaattctttaagtagcacacacaaacgaacgcagcgcggtggtaaatcaatagcaagggcagcgaaatgggccgtgcagctattttagagttatgccctatgcacagtatagattttccacagagtttcaatataaggggagcaagtaccagtcggaggaatcgcaacgtgcgccacgctcgaacgtttttttcgaattaaaacgaaaagcggagaacaggtttaagccgagcgtgtggtgacgataacgagtgttatcgatagctgtcgatgtttcaaatcgcaacactgtgcactgttaataaatcgcttaacatttatatttatttgtgcatgtctttggcggtgactcttatttatgtgctttttatgcttttccgaatcttgttagaggtaaaatattagtacaaatcgagcgctgcgttgctcttctgtgtcagatttataataatgtctgtttatccaatcttattattattacaagaagactgctttaaattttctcatttttcgtttaaaagcataaataatcattttaaccgtttcgcaaaatgtggcaacgacagaatgcggtggataactccgctaagcagagtctctactgtttgaaagattttattccaaattgaaccggttataattttcaagcacttatttttttacttttctaaggagataacattgaattttaacaagcagtgtacctatttggttcttcttactttaagtaaatggtaaaagtcttcgataaaccacgccgttactaagcaacttgccaccagcaacgcttgtttgctattgaaatcaaattaatatcattatcagttttgacaataccattgcaaagaccgaattcagaaagccaataacgatgactgaccaaagcgagctggatcagttggcaactgccgagctgcagaggctgcaacgccagcatcggggtctccagctggaccttcggggtctcctcgaggagaaggccaagcgcctgaagaagcagaatcacatgatcaacgtactgcaagtggagcaccagaagctgaaggaggagatcaagactctagaaggtggtactcatgcgcgaaagaacaccaatgtagatatccacttaatggactagtcagccacatataaaaggtttacatcggtttcagagagagaagcacctgggcactttgcaggaacagcaggcggatttgcagagggtgctccagaatgagcgaaccaatctctgggaactggagggccacatccggaaaatggaaaaggagattgatgccctgcggcgcaacgaagtgcccgacaactgctacaaggacaccatctgcaaggtgcagaagagcgtggtcaagttggagaaccgcctggatgtcgtcaacaaaaaatgcagcgatgtgctcactgaaaacagcaagatgagggacgccataaaccacatgttgcaggatcggtgagcatttctcgctagatatatacaatctataaaatacacactaggtttatgaaaagtcaactaggtgctctccatattattaggtttttataccgaattgagctaatgcgtttcgactccactccagggcaaacttcaatgacatgtggcagtcgatggtaacccagtttaacgagggcaagaagttcatcatggatctcatagaccagtcgacactggctttcgaccagagagaagagctgtgcaacaagctgaccgtcctaaaggatcgcaacgagaacgacaaggtaatgcacatccaggagatgcgcgagatgcagcgccgcctggagcacgacgccaagttgcagaagttcttcgacatcaagggacaaaagcgcctcaatccggagctggagcagcgcgagctggacaagaagcagagtcagaaggagacctacgagaggcagcttctggagtacaaggagatcatcgagaagatcaagttgctctacggcgaggaggacgcggaccgactggtggcccagttcaagcgtcaggaggacgagaactttgcccttttcaactatgtaaacgaactgagtcacgaggttgaagtactcaacgattccactcaggagctccaagatgaaataggtgtgttgttggattctgaattaggctatagactagtctttatactaaaatttgtacataataatccaaacagagcgccagaaatcggagcagaccgagaaggagttgaagcttaagaccgaggcacttgactatctaaatgccgagaaggagcggatcgagcagctggcggaggagaccagagaaaggaagcgaaccctgagcatcagattagaacagcttctcaagggcatcgaggatatattcaggtgcaatctgcgagtatatatccttactattgactgtctaccaaattccattttaattttagacaattggcctgtgacgatgctcctatccttaatgtgctcagtaccaaaacctttttgacagttcacaatgtgaagcttttcattggcgtcattgaacgccgggtcaacctgatcatcagcgccatcaatatcgaggataactccaacaaaatactggcccgaaaggatcgtgttcccaaattcaacatacgggaatcggcgaaaactaaaaactaagaattagtaggcattcatttttctccaaaatattaaatgataaccaaagtatctacacataccgataaaacttatatcctaatcttataaatatatgaaatacatgctgccgaagtttacaacaagctagttaaatggaaatccgattggacgattcaaattcgatcttatttgtttaatttaaactgtccgtttattgcttaaacctataaactacagtctattcaatgaacacccaaggtttttaatagttcgagttctgattgaggccattagattaaataaataacctgacaagcgtccacaataagaagccagctatgacacagagtagggtcacaaagctgtagtgcaggatcttcaatctaataatgtatatgagatcattttatgcaaatatagaacatctttccacaagaacataccgataaaagagtcgccgaccctgttcaagagattcctgcgttggaggttccttggtcaggtaaagtcgcatgccgaagagggccttccggaagtactctttccagtccaaagtctccatatcgaagttgtacaatcgccgatcctccggagacatcatcactctcagccgatccgtgcttttcgtctcaaagtgccaactgttgttcataaagtgctctagtaccgcaatgttggcatgtatacttctgtacagcttcaccagacgaggctttcttcccgagagtctcagggctagatcatagaaatagcctggtaaagtgtgatagaagaaggcggctaaggggaaaattcgtggatttgagatgttgtgcacgaacgggtaccatatcatcttggtaagtggaaaatcattccggtggatcagtgagtgctttatgaagtccgtgttgagtagtagattcttttcactgggagctaaggtgtagatggcgggctgggatatagcatttcgttgggatttgtctttggatgtttgccatatgctggccagagccgcatttgcacagtagtccac

SEQ ID NO: 36560 - DNA, 1422 bp, DROSOPHILA
atgactgaccaaagcgagctggatcagttggcaactgccgagctgcagaggctgcaacgccagcatcggggtctccagctggaccttcggggtctcctcgaggagaaggccaagcgcctgaagaagcagaatcacatgatcaacgtactgcaagtggagcaccagaagctgaaggaggagatcaagactctagaaggtggtactcatgcgcgaaagaacaccaatagagagaagcacctgggcactttgcaggaacagcaggcggatttgcagagggtgctccagaatgagcgaaccaatctctgggaactggagggccacatccggaaaatggaaaaggagattgatgccctgcggcgcaacgaagtgcccgacaactgctacaaggacaccatctgcaaggtgcagaagagcgtggtcaagttggagaaccgcctggatgtcgtcaacaaaaaatgcagcgatgtgctcactgaaaacagcaagatgagggacgccataaaccacatgttgcaggatcgggcaaacttcaatgacatgtggcagtcgatggtaacccagtttaacgagggcaagaagttcatcatggatctcatagaccagtcgacactggctttcgaccagagagaagagctgtgcaacaagctgaccgtcctaaaggatcgcaacgagaacgacaaggtaatgcacatccaggagatgcgcgagatgcagcgccgcctggagcacgacgccaagttgcagaagttcttcgacatcaagggacaaaagcgcctcaatccggagctggagcagcgcgagctggacaagaagcagagtcagaaggagacctacgagaggcagcttctggagtacaaggagatcatcgagaagatcaagttgctctacggcgaggaggacgcggaccgactggtggcccagttcaagcgtcaggaggacgagaactttgcccttttcaactatgtaaacgaactgagtcacgaggttgaagtactcaacgattccactcaggagctccaagatgaaatagagcgccagaaatcggagcagaccgagaaggagttgaagcttaagaccgaggcacttgactatctaaatgccgagaaggagcggatcgagcagctggcggaggagaccagagaaaggaagcgaaccctgagcatcagattagaacagcttctcaagggcatcgaggatatattcagacaattggcctgtgacgatgctcctatccttaatgtgctcagtaccaaaacctttttgacagttcacaatgtgaagcttttcattggcgtcattgaacgccgggtcaacctgatcatcagcgccatcaatatcgaggataactccaacaaaatactggcccgaaaggatcgtgttcccaaattcaacatacgggaatcggcgaaaactaaaaactaa

SEQ ID NO: 36561 - protein, 473 aa, DROSOPHILA
MTDQSELDQLATAELQRLQRQHRGLQLDLRGLLEEKAKRLKKQNHMINVLQVEHQKLKEEIKTLEGGTHARKNTNREKHLGTLQEQQADLQRVLQNERTNLWELEGHIRKMEKEIDALRRNEVPDNCYKDTICKVQKSVVKLENRLDVVNKKCSDVLTENSKMRDAINHMLQDRANFNDMWQSMVTQFNEGKKFIMDLIDQSTLAFDQREELCNKLTVLKDRNENDKVMHIQEMREMQRRLEHDAKLQKFFDIKGQKRLNPELEQRELDKKQSQKETYERQLLEYKEIIEKIKLLYGEEDADRLVAQFKRQEDENFALFNYVNELSHEVEVLNDSTQELQDEIERQKSEQTEKELKLKTEALDYLNAEKERIEQLAEETRERKRTLSIRLEQLLKGIEDIFRQLACDDAPILNVLSTKTFLTVHNVKLFIGVIERRVNLIISAINIEDNSNKILARKDRVPKFNIRESAKTKN

SEQ ID NO: 36562 - DNA, 3080 bp, DROSOPHILA
accgaccctcgtggttcttcatgtgtttgcggatgatatcggtgcgctagacaaatggatagatgtggtataccgactagctgcccctgggtttcttggcggcgagatggactttttcgtggacgatctgtggcagtcgttcatcttcaatgaggatgacttcagcttctctcggagtgacgaaggatgtacagtggactcatttcccctgatatacgccgcaaattcaactggaaaggtattcttctttggggatttcactgggcctaaactgcccgacctggagagtctaagggatttctgcgatcaggtgattaaggggatagccgaggagcccactgctagagatcccaaggttgagaatataagccttgatagctggaacgaacttatgtacgccagtgataatgatatagcgatttgcttctacaactccttgcaaaatggcgctgaagtcaatagtagtcttatggcaaatctggattggctggccgataaactgaaacaggagtcagtgcttctgtacaagatggatatacatggatctagaatcccaaaaagttcctcgtagagtcgccacccgacttcttcttcctccaggcaaaccaaaagcataatcccttgcggtgcaaatatcagctgaacatgtggacaatgctgagatttgtagccgaaaattctagcaaggagcttagctactataaccgtcgtggaaatcgaaaactccatgctgatttgttaatccatataaaggattattttaatttgagcaggaataagacccgttattagtagtgggtataacattaaaactttgatatttatctttatttaactgtgcatatagacctttgtttttaatgaccttacatcttagagaattgtaaaattataactcagtcggtattcaattattttatatttttgtaatatctcgcgcactgggaaaactatcgatagactcagggatgattttcagatagacatttcaatatcggaaatgttgaaattgcaaaagaaaactgaagattcgaaattcgcagtgttcttggatcacaagacacttataaacgaagcatatgacgaatttaagctcaagtccgaactgttccagttccatgccaaaaagacggacaaaggcattgaggaagacaagaccaggaagcgcaaaaggaaagccggcgtagaagatgcgtcgtccttggaggatttacacttagtgaatgaatatctagagcttctgagcaagcccgttgaaccggaggacagttcaccgatgaagaggcactgggaggatggctacaacgtgccccagttgcatggagccaacgaaagtggacggatgcagcggtttctgagagttgatggatcccgtggcgtgtacttgattcccaatcaatcccgattcttcaaccacaatgtggacaatctgcctgcactactgcaccaacttctgcccgcctacgatctcatcgtgctggatcctccgtggcggaataagtacatccgcaggctgaagcgggccaagccggagctgggatactcgatgctgagcaatgagcaattgtcgcacataccgctctcgaagcttacgcacccacggtcactggtggccatctggtgcaccaattcgacgctgcatcagttggccctggagcagcagctgctgcccagttggaatctccggttgctccacaagctccgatggtacaaacttagcacagaccatgaactaattgctcccccgcagtcggatctcacccagaagcagccttacgagatgctctacgtggcctgtcgctccgatgcttctgaaaactatggaaaagatatccaacagaccgagctgatcttcagcgtgcccagcattgtgcattcccacaagccaccactgctgtcttggctgagggagcacctcctgttggataaggaccagctggaaccaaactgcctggagctgtttgcccgatatctgcatccccacttcacttcaattggcttagaagtgctcaaactgatggacgaaaggctatatgaagtccgtaaagtagaacattgcaaccaggaggaggtaaattagctacgcctaattattgtatttaatttttacaagtacctcattaaataagggatttataagcagctatgagttttaacaattttatttgtgtactgttaatgagagcaaatgcatttgaattttgtgtgtaggcggccggcggatgggtttccttcttccagagaagccaacgatgcctggctgaagctaaatgttaaacatttggggtggcgtgtgtgggattttgttttgttttttcttttgagtgttaaattaagtattaaaggatagtaagcattattaatacacgtggttaatcgcaggctactactcctgaccctgggccatggccgccggattggtgggctcgttgccgccgcgtttctttgatccagagacgatatcatcgatgcgcagcagcaggatggccgtctccacggcggtcttgtaggtctgaagcttgacggccagcggctcccagatgttcttcacgttcatgtccacgatttcgccggactcgccgtcgatgccccaggcgcagacaccatcgccggtgtgggaggcgtgcttggcgcggagagcagtcagagcacggatcgtgttggcgccgcaattctgagccagtgtgcgcggtatgatctctagggcgtgggccaccgccgtgtatggtcccttaacctgcttgcgcgtgagcagctgggaggcagccatctcaacggctccgccgccagccaccaggcgtggctccagcaccaagttgcgggccacgtgcagggcgtcctgcaggttgcgctccgtttcgttcaagatgtccttgctggcaccgcgcagcaggatggtgcaggccttgggctccttgcactccgtcacgaaagtgaagtactcatcgccgatctttttgacttcgaacagtccagctcccgtgcccacatccttctcggttagctcctcagtgcggttcacgatggtggcaccacaggcgcgggcgatgcgcagattgtcagtcttacgcagccgacgg

SEQ ID NO: 36563 - DNA, 1080 bp, DROSOPHILA
atgttgaaattgcaaaagaaaactgaagattcgaaattcgcagtgttcttggatcacaagacacttataaacgaagcatatgacgaatttaagctcaagtccgaactgttccagttccatgccaaaaagacggacaaaggcattgaggaagacaagaccaggaagcgcaaaaggaaagccggcgtagaagatgcgtcgtccttggaggatttacacttagtgaatgaatatctagagcttctgagcaagcccgttgaaccggaggacagttcaccgatgaagaggcactgggaggatggctacaacgtgccccagttgcatggagccaacgaaagtggacggatgcagcggtttctgagagttgatggatcccgtggcgtgtacttgattcccaatcaatcccgattcttcaaccacaatgtggacaatctgcctgcactactgcaccaacttctgcccgcctacgatctcatcgtgctggatcctccgtggcggaataagtacatccgcaggctgaagcgggccaagccggagctgggatactcgatgctgagcaatgagcaattgtcgcacataccgctctcgaagcttacgcacccacggtcactggtggccatctggtgcaccaattcgacgctgcatcagttggccctggagcagcagctgctgcccagttggaatctccggttgctccacaagctccgatggtacaaacttagcacagaccatgaactaattgctcccccgcagtcggatctcacccagaagcagccttacgagatgctctacgtggcctgtcgctccgatgcttctgaaaactatggaaaagatatccaacagaccgagctgatcttcagcgtgcccagcattgtgcattcccacaagccaccactgctgtcttggctgagggagcacctcctgttggataaggaccagctggaaccaaactgcctggagctgtttgcccgatatctgcatccccacttcacttcaattggcttagaagtgctcaaactgatggacgaaaggctatatgaagtccgtaaagtagaacattgcaaccaggaggaggtaaattag

SEQ ID NO: 36564 - protein, 359 aa, DROSOPHILA
MLKLQKKTEDSKFAVFLDHKTLINEAYDEFKLKSELFQFHAKKTDKGIEEDKTRKRKRKAGVEDASSLEDLHLVNEYLELLSKPVEPEDSSPMKRHWEDGYNVPQLHGANESGRMQRFLRVDGSRGVYLIPNQSRFFNHNVDNLPALLHQLLPAYDLIVLDPPWRNKYIRRLKRAKPELGYSMLSNEQLSHIPLSKLTHPRSLVAIWCTNSTLHQLALEQQLLPSWNLRLLHKLRWYKLSTDHELIAPPQSDLTQKQPYEMLYVACRSDASENYGKDIQQTELIFSVPSIVHSHKPPLLSWLREHLLLDKDQLEPNCLELFARYLHPHFTSIGLEVLKLMDERLYEVRKVEHCNQEEVN

SEQ ID NO: 36565 - DNA, 2705 bp, DROSOPHILA
accgtaagtaaaaagaaactggctccttcatgtttcttagcactggtttattacctgcagtggctacaaaggaaggacggaaaactattaccaggatctggcccttctgaccctcgacgagcccttcgagctgagccacgtaatccggcccatttgcgttaccttcgccagctttgcagagaaggagagcgtcacggatgatgtgcagggcaagttcgctggctggaacatcgagaacaagcacgaactccagtttgtgccggccgtgtccaagtcgaattccgtgtgccgtcggaatctgcgggacatccaggcggacaagttctgcatcttcacgcagggcaagtcgctcgcctgccagggtgacagtggcggtggattcacctccgagctgccgaccaacgccttctccacctggaacaccgcccgtcacttcctcttcggggtgatcagcaatgcacccaatgcagatcagtgtgcccacagcctgaccgtgatgaccaacatccagcacttcgaggatatgatcctgaatgcgatgaacaggagcgtggaaactaggtcctgagtccgggcacttattgtgattacaatagatttattttaagagattttatttaagtcgtcaaacctattttctatcgaaacattgcgaagggtgaatctcaaagggcaattgtgtattaggttatttcaagtcagttctttgtaaaggacaattgccaattgccacactaagctatttaccctctaatcctcaacattatgtttattgatacttcataaattttgaaataccaaattattgagcaataccggttaagtgaaatttgattcaaattttgaccggctaacaaaaatcgaacttaattcctatcgataagtcggaaactcaagcccaccactgcaatcgtatttaatcaactattatgactaatcagctgattatgagtcaaccgcaccgcaatttcatttggttggccaattgaatgatgtaaacatgtctgcacattactgcggctacaacccgccgccgccgaacttcaaaaccttttttcccgaaaaatacaaggaccgactgcagcgacttcccaattttggaaaattgcgatcatcgtgggagatccacaggcgaccgaccctcgtggttcttcatgtgtttgcggatgatatcggtgcgctagacaaatggatagatgtggtataccgactagctgcccctgggtttcttggcggcgagatggactttttcgtggacgatctgtggcagtcgttcatcttcaatgaggatgacttcagcttctctcggagtgacgaaggatgtacagtggactcatttcccctgatatacgccgcaaattcaactggaaaggtattcttctttggggatttcactgggcctaaactgcccgacctggagagtctaagggatttctgcgatcaggtgattaaggggatagccgaggagcccactgctagagatcccaaggttgagaatataagccttgatagctggaacgaacttatgtacgccagtgataatgatatagcgatttgcttctacaactccttgcaaaatggcgctgaagtcaatagtagtcttatggcaaatctggattggctggccgataaactgaaacaggagtcagtgcttctgtacaagatggatatacatggatctagaatcccaaaaagttcctcgtagagtcgccacccgacttcttcttcctccaggcaaaccaaaagcataatcccttgcggtgcaaatatcagctgaacatgtggacaatgctgagatttgtagccgaaaattctagcaaggagcttagctactataaccgtcgtggaaatcgaaaactccatgctgatttgttaatccatataaaggattattttaatttgagcaggaataagacccgttattagtagtgggtataacattaaaactttgatatttatctttatttaactgtgcatatagacctttgtttttaatgaccttacatcttagagaattgtaaaattataactcagtcggtattcaattattttatatttttgtaatatctcgcgcactgggaaaactatcgatagactcagggatgattttcagatagacatttcaatatcggaaatgttgaaattgcaaaagaaaactgaagattcgaaattcgcagtgttcttggatcacaagacacttataaacgaagcatatgacgaatttaagctcaagtccgaactgttccagttccatgccaaaaagacggacaaaggcattgaggaagacaagaccaggaagcgcaaaaggaaagccggcgtagaagatgcgtcgtccttggaggatttacacttagtgaatgaatatctagagcttctgagcaagcccgttgaaccggaggacagttcaccgatgaagaggcactgggaggatggctacaacgtgccccagttgcatggagccaacgaaagtggacggatgcagcggtttctgagagttgatggatcccgtggcgtgtacttgattcccaatcaatcccgattcttcaaccacaatgtggacaatctgcctgcactactgcaccaacttctgcccgcctacgatctcatcgtgctggatcctccgtggcggaataagtacatccgcaggctgaagcgggccaagccggagctgggatactcgatgctgagcaatgagcaattgtcgc

SEQ ID NO: 36566 - DNA, 705 bp, DROSOPHILA
atgtctgcacattactgcggctacaacccgccgccgccgaacttcaaaaccttttttcccgaaaaatacaaggaccgactgcagcgacttcccaattttggaaaattgcgatcatcgtgggagatccacaggcgaccgaccctcgtggttcttcatgtgtttgcggatgatatcggtgcgctagacaaatggatagatgtggtataccgactagctgcccctgggtttcttggcggcgagatggactttttcgtggacgatctgtggcagtcgttcatcttcaatgaggatgacttcagcttctctcggagtgacgaaggatgtacagtggactcatttcccctgatatacgccgcaaattcaactggaaaggtattcttctttggggatttcactgggcctaaactgcccgacctggagagtctaagggatttctgcgatcaggtgattaaggggatagccgaggagcccactgctagagatcccaaggttgagaatataagccttgatagctggaacgaacttatgtacgccagtgataatgatatagcgatttgcttctacaactccttgcaaaatggcgctgaagtcaatagtagtcttatggcaaatctggattggctggccgataaactgaaacaggagtcagtgcttctgtacaagatggatatacatggatctagaatcccaaaaagttcctcgtag

SEQ ID NO: 36567 - protein, 234 aa, DROSOPHILA
MSAHYCGYNPPPPNFKTFFPEKYKDRLQRLPNFGKLRSSWEIHRRPTLVVLHVFADDIGALDKWIDVVYRLAAPGFLGGEMDFFVDDLWQSFIFNEDDFSFSRSDEGCTVDSFPLIYAANSTGKVFFFGDFTGPKLPDLESLRDFCDQVIKGIAEEPTARDPKVENISLDSWNELMYASDNDIAICFYNSLQNGAEVNSSLMANLDWLADKLKQESVLLYKMDIHGSRIPKSSS

SEQ ID NO: 36568 - DNA, 2704 bp, DROSOPHILA
tttgctgggccaacagcatgtccaaaagtgttttatggccgttgtgggcgctcgagtggccattttgggtcgatccgggaatatgggtatatacccgggcacccacatgcactctggacttgtccgacaagcacttcttcccgaggagatgggcagatgaggagttgagcagacaggggccctgaatgcagatgagcgtggctctgatgagtgttgtactaaatactaaacacccgccagaattcagttttgcaccacagttagcactgatttatgggagtcgaatagggttttaagtgggctttaagctaagctagcaattggaattagtttaagtagccggcggcaagtcaacgacctgcgacagtgcagttcaaagtcaaaaagtcaattatacggatacctaaaaatacaacagcgggtggagtgaaaatctcgttaaaagccaataacagacgccattaaatgtgcatgaaaattaaatgaaaacggcttgatgatgaggttgcctgcgggaggaggaactcgtagcagccacgcgaccacttgaacttgggcgggaatatcagtatttgtgtgcagtaattcgaactgacctcgtcgagcattcagatccaattggagggcaagttcaatggcattggggattccagggggagtggggatcgagggccgcagcgagataagggaacttcgataagtttaatttattcgaccccactgccatctgttgcgatataaccaacacttatttaatcaacgcgataggaataggctcgtgctgtaattatagatcggattaaaaaccatcgaacatggaggctcaattcaaaatgaggtaaatgaaaagcgaaaaagggtattttcattttatacgggacctaattgatgtactcaaaaacattattggaaaattaaaaagcctgcatgaatttcttttaatacagcttgcataattaataatgcaagtatatatcaacttatgagtgcgggaatgtgttagttaatttctaaagagtgctgagacttaaaagtcaaaccaaacttttatatttgaatcgatcatctcaaaaatattcatttctgtattaaaaattcaacagggaagtcatcttaataacagtcgcaagctaaaaaaaaatagttaatatctacacttaaaataatgaatcgcattctcgagaaggtgattcaccagaatggaacaatcgtggatcgcattctatcggaacatactattgggtatgtggtgtccgataacacagccaatgcggtggccgaaacatccttcgataacacaagtgcccaggcgatcctgaagcacttacatggactcctggtgagcacctgccaaagcgtagtccgggacattgacccgtccaacaaactctgcttcatgcgcctgggcactcgcaagttcgagtatctggtggccccagaggagtacttcaccattacagtggttcaatgaaatgacaatactgactaatgctacaaacgattcatgcgagttgaacgattccggaagaaatacaaagttattgctgcaaaacctaaaattaaactagaaattttagaaacaatttcctacaactgggtcaagtttttaggaaattggttcctaaaatctgtaaaatgtaatgttacgaagacagcagaaaaatatcaaacaaaaatataagatgatattagcgaattaacattaaattgttttttttttttattaaaattggggcctaaacaggctggaaagaaacttcgcctaaaattaatattaatatacagacaaataggatttgaaagtaaaatgtcgatcaacactaaaacattcaaaatggggtggccaagatcttgaaccctttcaaatgcaaagcaaacacaggaagaattcttaaatcaacagggctgctcgaaaatcctttataatgcccaagcgactttccgatcctgattatttatgatatggcttcatcgggcctggaatctatctgtgagaatgcggcatctaatgcgataattcaagagatttacttctgtcaacatgaccattttgtccgctggattgggttttcagggtggaattgtatggcctttgacctttttccttttgcttcgaccatcttgctgccacaatggaggctgcctgctattttaatttaaaatggcaggactcgtaactcatttttacgacgcaccctccgggcagatgaatgtgtgtgcgagtgtatctatatcttgtcctatttttacggatcccttgcaggggttgcaacaataacttatctgcccttttttacccggctttcaacccgagttcataatcaccacgagacgctcctggggtgctttgtgccccggcagctatctttaagcagtttccattgtctggcgtcgttttgtggtgctgggtaaatatgaaattgtacaaatttgtactgaaacttgattcaactatgtctcggggcacaatggaccaacatcgatggtggcaaggttgagcgatgctttccccccagaactgcgcacttcatttgaggcagcgtgaaatgaaattactccacggtctattcccggtgacgactttattcgtgcgaaattatcaatgcccgggccaatttgaaacactttgaattaaattcgaataaaacgttttccaagccatcgtgaagaggatgtccacggccaactgctcatacatcacatt

SEQ ID NO: 36569 - DNA, 704 bp, DROSOPHILA
tagttaatttctaaagagtgctgagacttaaaagtcaaaccaaacttttatatttgaatcgatcatctcaaaaatattcatttctgtattaaaaattcaacagggaagtcatcttaataacagtcgcaagctaaaaaaaaatagttaatatctacacttaaaataatgaatcgcattctcgagaaggtgattcaccagaatggaacaatcgtggatcgcattctatcggaacatactattgggtatgtggtgtccgataacacagccaatgcggtggccgaaacatccttcgataacacaagtgcccaggcgatcctgaagcacttacatggactcctggtgagcacctgccaaagcgtagtccgggacattgacccgtccaacaaactctgcttcatgcgcctgggcactcgcaagttcgagtatctggtggccccagaggagtacttcaccattacagtggttcaatgaaatgacaatactgactaatgctacaaacgattcatgcgagttgaacgattccggaagaaatacaaagttattgctgcaaaacctaaaattaaactagaaattttagaaacaatttcctacaactgggtcaagtttttaggaaattggttcctaaaatctgtaaaatgtaatgttacgaagacagcagaaaaatatcaaacaaaaatataagatgatattagcgaattaacatt

SEQ ID NO: 36570 - protein, 101 aa, DROSOPHILA
MNRILEKVIHQNGTIVDRILSEHTIGYVVSDNTANAVAETSFDNTSAQAILKHLHGLLVSTCQSVVRDIDPSNKLCFMRLGTRKFEYLVAPEEYFTITVVQ

SEQ ID NO: 36571 - DNA, 2267 bp, DROSOPHILA
agtaatactccctcattaccagagcccccactgacggtttctttctcaaccgacctattttgggacaagatatacaagccctgcacccaatcaaatcctgttatgcccaatacgagtttgatcccggttctgccgaagaaacagccaaaatcgttacagctaacctgtgagccttcagttcaatacaaagtggcgtcccgctcttccactacagcaccggtgccgaagtacctgggaaaaacattcggagatcgacgtttaagcctgctccgctggtgccaagagagggttaaaccgtacggaattccaatgtacgagtttagtgcctcatggattagtgggcgtgctttgtgcgccatcatccactcctatcttcccgacctcattgacaaaacatacctcgccaaaaagaagcccgaagaagtcttagcatatggcattaaagtggccaaatcaattggtgtttctgattccgtcgatctaattagggagcttcggcaggggcgtcccaacctagagaagatcgtcgatttcgtggaggagctgcaaggctatcttgatatgtatgatacaaatatatgagtaaaaaattgaaatttttttatttttgtacacgtatatttcatagctacaataaaatatattttaaaacgttcagaaaagcaaaataattttagattatttttgctatgcatttttatagcttctgcagcgacggcaaatgaattcatagattctctataggcctttcacacatgctacttataaaaacgtgcaataatcatttaataacacataaatattttattccaaagccggcggcatatttgatttggtatagttcgataatatatggccttgaataaaagccgattggcgacggggacacagaaagttttgcaattattttcaagaagatagtcttaaaacgattggtttctaaacacgaacattttggacacttaggcctgcatgtaaaaatatataatctgcggcttttctatgggtccttttcatcgtggataatggacctgggccagtaggttatcatgccgaggataatcttctgtttggctcgcggtccggtcagtggattcaactgcatcacgaaggtgaccatccaggccaagtagcagcatacagccgttaggatcacacagcaccggattagaccacgctcctcgtatcggtaggacaccaggaacccaatgatggcgaatagtagccagaaaacggtgatgaccatgaatgccacgtgcttatccatttccggagagtttgccagctggctggatgttaagttctgacaagtttccaccctgtgtcctggatctcggagcttgggcaatcccaatttgggtgcctgcactcataaacttttatggctgcgaacatttcgatattttatggcaaacagcagaggctgcaggcgcagtggagcgcgatggctgtaaatggaaaactgtatacattttccgagtgctggagcggtccataaaactgctgcacgcatcctgactaagcgcaaaatccgttttacgagactgccagctctccagttatcctgccatcctccccaggatcatcccctcgcgatgtcctgatgatgccataagtgcccaggcgcgtctcataaaatggcggctgtgcaacggcaatgcaatgtgcgcgatgtgcggtggtggtgtaatcgagttttcccaaagtagcaataaatgttaatggcgacatcgaattttccattttctcgccataagtatcaagacgtccggtgccaagtcagcggttatttcgcggcaatggccatctttaattccgttccgatgtgggggccaaccagtcttatagtcttatagagagtgaaatacagtagccagcttcggagtacaacttcgcacatcgaccatcgacagaaactaaaaactggtaaggtattacagctcaaaagtaaccgagttgtttcggtgccagatcgattcggtatcgtaaatcaccggacaggggtacctcggatctggagtcgcaagcaaatgcaaatcgggctaaatgtgtgatttcccctttagcacggtcggcatttaagaagaaaccgatttcagaccgagcccgaaacaaaaaccatgctgccaaattctggggcaccgcgttatcggttccggtgagggtttgtagtgtcacttctttgacaaaccgtcaaaatatttgacttgacttgaagtcgtttcgccagcagtgtgggtgcacaagaagtgcgtgactgatttgaa

SEQ ID NO: 36572 - DNA, 267 bp, DROSOPHILA
atggataagcacgtggcattcatggtcatcaccgttttctggctactattcgccatcattgggttcctggtgtcctaccgatacgaggagcgtggtctaatccggtgctgtgtgatcctaacggctgtatgctgctacttggcctggatggtcaccttcgtgatgcagttgaatccactgaccggaccgcgagccaaacagaagattatcctcggcatgataacctactggcccaggtccattatccacgatgaaaaggacccatag

SEQ ID NO: 36573 - protein, 88 aa, DROSOPHILA
MDKHVAFMVITVFWLLFAIIGFLVSYRYEERGLIRCCVILTAVCCYLAWMVTFVMQLNPLTGPRAKQKIILGMITYWPRSIIHDEKDP

SEQ ID NO: 36574 - DNA, 2504 bp, DROSOPHILA
ttaagccggataatgggcgatcagtgagctgagcttgtaattgctggcttataaatcacagtgaaaagatataattttggttgcgatgatctgttggccgttggccgactctttgattagcacatttgtctggagtttcacttttagcgtactcaccgctgacccattgaactacaaatacttgtaggtttttttttgtgttagccgcgcaactataatgctgatttatttctggcaaattttttatcagccgtttttaatcttgttaggaaacttcattagtgtcaaccgacagttttcttaggctgattaatgtgtgtcagacgggagggaaacttttcggtagcctagctggaaaaaccagtctgccgcccatggaaattctgcctctgcggccacgcctcttttgtgttggtcagtggcattaagtctttattgcgggattattaattggggtggacgttgggggtgtgcatagtaatgaggtgggcttgtataaataaaataataaggataaccaaccaccagcgatgggcattccaaagtagttcgggtgaaacaactttcaaaatgcagctagtgaatgaaatattaaaaacactgaaaactattttgtcttgtatggaagcttgttattaatagtttttgataaatatgggatttacattatacaacatatacatttggccaatttatgtaggtaccaaaaattttaacttagtctttcagtctacagctgatattgtaggactgtatccactgtatttgctaaccagctcaggtagctgaccagttttggtcaccaaatttgacaacatttgccaatatttatgaattataatatgctgttttttgacgtaactagttaacaagttaaaccactttattacagagtcgcccagccgcacaagacgcgatccaggtccagatccagatacagatccatatccagatcaatgtggccggagtgcacagactgaggtccgcccgtaggtagaaaatggcggacatttaccaggatgccagcaccacgctgcgctccgtgtttcccaactcgcggctggactcgctggccggagtggatcgccggatggagagtcagctgccaggaccaccggatgcggatgcagtcaccaccgcctcgagcattggctataatccgctcaacgacgacgactggtgggccaatgccatcgaagtggacaccttcgactcaccgctggccttcgatgctagcgaaaatggtctgtggaacggacactttgtgccgccgccacctcgcccgcccttcctggatgaaagcgtcgccgccgacggcctgaccacctgtgatctgtgcacgtgggcatggcagcggaatgcctactccctggatggttccataggtgagtaccgatggttccttctctgcctactcctcgcaaagggtccctctgctcctgtcgtttttcaattaaaactgcttgccaagacaataatctggcggccgtgcatcgatcgctgatatcaatttatcaaactgatgttgggcgtgcgtggctcgattgcttttcggcaagcgagatggaaagactcctccttcgccgccttgtacacttacaaaaaatatgcgttatattagacaaaaaaaattaaaaaaggttctagaaagaaatttgtcatcagagatagattttattaaatgcaccgataccaggaagacttttctataattgaaataaaattggttatatttattagttaggttacttcattccaaaatcgtatttaatataatcttattcaatttcgttgtccctttattcgttcagtgtgcacttgcgcttgcaaatttaatttgcacacataactctttgtggcagcttttggtttaggcgttgtttcgccaaagttccgagcccgcgatccggggatccaccggcactatcgccctggcacatcgccagtaatttgtctctgcgctcgtaaaagaagcggcatggtaaaggggtggtggaaaaggcggcggcttagacgcgaaaaaacttatgaaaatatgaggcagtgggcgtgggcggacgcagatcggatagataggttacagccagcgagctctttaatttatctgagaacaaatgaagcaagttgcagggtcggaaatttaaggaaatccagtgcccaattaaaactctactgacgctaaaaactaaagtccagctttcattaacgttgaattcaaatttagctctttggtaaaaaaaaaaacctgttagaactcaccccataacccaaataacactcgtaatagcaaaaaccgactgccaaatgaccgctgtccatatggttaaaatagagttgaccgcgtgaaattgcatttgatacaagttcttaataaagttatacatgtaaatttagaagtttatgttttttaacacgtaatgaagtcacgttaagaatagaaaccacaattttttagttatgatggtaataaatattttgggagtattacacatcctcgaactttt

SEQ ID NO: 36575 - DNA, 504 bp, DROSOPHILA
atggcggacatttaccaggatgccagcaccacgctgcgctccgtgtttcccaactcgcggctggactcgctggccggagtggatcgccggatggagagtcagctgccaggaccaccggatgcggatgcagtcaccaccgcctcgagcattggctataatccgctcaacgacgacgactggtgggccaatgccatcgaagtggacaccttcgactcaccgctggccttcgatgctagcgaaaatggtctgtggaacggacactttgtgccgccgccacctcgcccgcccttcctggatgaaagcgtcgccgccgacggcctgaccacctgtgatctgtgcacgtgggcatggcagcggaatgcctactccctggatggttccataggtgagtaccgatggttccttctctgcctactcctcgcaaagggtccctctgctcctgtcgtttttcaattaaaactgcttgccaagacaataatctggcggccgtgcatcgatcgctga

SEQ ID NO: 36576 - protein, 167 aa, DROSOPHILA
MADIYQDASTTLRSVFPNSRLDSLAGVDRRMESQLPGPPDADAVTTASSIGYNPLNDDDWWANAIEVDTFDSPLAFDASENGLWNGHFVPPPPRPPFLDESVAADGLTTCDLCTWAWQRNAYSLDGSIGEYRWFLLCLLLAKGPSAPVVFQLKLLAKTIIWRPCIDR

SEQ ID NO: 36577 - DNA, 3004 bp, DROSOPHILA
tttataattttgtattttatcaagctaagtttctcttacttctggcatatttctgccagtgcacatggaactgcattatgcatgtgcataacttgggaaaccatcgctgccgttgcgtatgctccacgctaattagctgaatcgccccaagtggctccgagtggcaccatcttttccaacttaatgagagtgaaaggcgagttaaaatatataaaaactaaatacacacatttgcaagcgactctaggcaaattaaacggcgatgagttggaaagtcgagacgatggccgttgtggttcggatgttgagaacaggtccaccgcgtttacaaccagcaattatacgtgtttgcctactgcgattctcaatgagcgtttggcgtcagttgtctataaattatgagcttaatgacgtccagggttttatggaatcccggctatttggattttgagtgccttcaaacgctcggttgagtcacacacacacgggagctcccattaaccttcccatgcccgcctgggcattatgagatcacatgtgctgatagcgaaaaggagaaacatttggcattttcggcattttggctggctggctgctgctgctgccactgcggaaaaccactcggtggtgcagcggtgcagtggtgcagcggtgcagtttgtttgccacctcgctgccagttgacagccgtttaatttacgctttgtttgtttgtttgtttctgtcttttgtttgcgtcctgaggtgaatgtttgatttatagcccgattataaaccgaaatgtcatagatatctgctgcgttcgaattcggcttggattcgatagactatcgttccctaaaatataggaaacgaaaatcatcaaattaatatttgatactattacctaaaaagtaataaggatgagtttaaaaatttgccaacccaactgcacaacattttttttggctatttataaaactaatccacattcctttggctgatttcccaatattttttaatgaagcaagtgtcacagataatccacacaaatggcaattgtaattttcgttcaatatatactctttcgcaattatcgctggccagcggacaacgtgtcgtatgagtaacatgattttaattaagcaaacagaagataacgacctcgtggctaacccctctatgaattccccttgcaggtggccgcccgcagccttggtggtgtcgcaataaccgaaacggtggccaaaatcgatcgcccatctcgatcaagcactcggcggacagcatccggcggcccacgagcaactccggcgtttggacctggctgggcggcagtcgtcgctcctccgccggtcccgaccagatcggtccgccgtcgacgtcgccggcggagaaccactatacccacatggacgatgcctacagtccggtgggcgtgagcgaggcgctctacgcggaactggatcgcgagtccgtgcgatccgccaatccctcatatcagaatacggcctacagtcagtgtggcgaggtgggtagcgcaaataaagtaaaataatagttggtaaattggtttaatacctacagcccaattcatgacagaaattcagtaataattcagaaaataatcctgcaatccacccttcattacagaaatacaattaccagggccacgagcaggacattcccatggtggtctcctcggcacccagcagtgcttactattcggatctgtcggtgaccgcgatgcccggcggagcgagtggcagtaatcagggcgcctacgagattgtcggactgaacgtgatgtcccagccgctgcccaactgggatcatcatggcggaggagtgggaggtggcggtgttgtggctgcaggagcagcagccgccatccttggaggcggtggtggtgggggcaatggccttacgccgggcgaggctgcggcgatgacgcaacgacgaggtcctcgactggcggccatcaacgagacgagcaccagcacagtgccctcggactatgtctaaatggagtaagcgtttaaatacaaacataatgtgaaatgttcagcgagcttaacatgttaataggatatagaagtacgttatatacaccccacagatctaaggttaaatttacataatatttaacactggcataccatagtgtttagtgtttagcatggacttgtgtctttggttaatgtctgaaattataatctgtacccgttgccgatattgggatatatttatacacacttacaaggcaagaatgtattatatgtctagtttttatgtagtctctaagcaacgatttaatcgtgggtgatatttagcctaaaaatatgctatattcttatgttctacgtactttaaacattttctaaaaatgtaaaaacgacaacaaacgcattttttcataggcttagaacgagtgaagtgaacgcgatggacaagaaatcgtatttccccccaggatcagtacacgcaaatatagaaacgatatatacatacgaatacaacatatttatacactcaatatttacagcagccgaaaaaagaaaacgcatttagctcaccaacatatataactatacaaatatatatctataacaataactgaagaatcatatttacaacgattttaatgcaacagatttcaccatatttaccgggggaaatgatcgtggcacgtcatatcatttaccacaccattatacatatgtatgcaaagctatctatatactataccatatacaataaacagactcacgacctttagcagatgtactttagtttttagtggtccgcggcaggaagcgaatcctctgccgatttatttagtaacacacacacacacacacacaattcctgtacattattgttttagttgaaaatataattaaacaattattgatatttacattctgaatcccaaaaggaaatggttctttattggagtatttatttgtcgatacagtaagtacaatagtactcttaaagtatataatttcatttttaaccgagt

SEQ ID NO: 36578 - DNA, 744 bp, DROSOPHILA
atgaagcaagtgtcacagataatccacacaaatggcaattgtggccgcccgcagccttggtggtgtcgcaataaccgaaacggtggccaaaatcgatcgcccatctcgatcaagcactcggcggacagcatccggcggcccacgagcaactccggcgtttggacctggctgggcggcagtcgtcgctcctccgccggtcccgaccagatcggtccgccgtcgacgtcgccggcggagaaccactatacccacatggacgatgcctacagtccggtgggcgtgagcgaggcgctctacgcggaactggatcgcgagtccgtgcgatccgccaatccctcatatcagaatacggcctacagtcagtgtggcgagaaatacaattaccagggccacgagcaggacattcccatggtggtctcctcggcacccagcagtgcttactattcggatctgtcggtgaccgcgatgcccggcggagcgagtggcagtaatcagggcgcctacgagattgtcggactgaacgtgatgtcccagccgctgcccaactgggatcatcatggcggaggagtgggaggtggcggtgttgtggctgcaggagcagcagccgccatccttggaggcggtggtggtgggggcaatggccttacgccgggcgaggctgcggcgatgacgcaacgacgaggtcctcgactggcggccatcaacgagacgagcaccagcacagtgccctcggactatgtctaa

SEQ ID NO: 36579 - protein, 247 aa, DROSOPHILA
MKQVSQIIHTNGNCGRPQPWWCRNNRNGGQNRSPISIKHSADSIRRPTSNSGVWTWLGGSRRSSAGPDQIGPPSTSPAENHYTHMDDAYSPVGVSEALYAELDRESVRSANPSYQNTAYSQCGEKYNYQGHEQDIPMVVSSAPSSAYYSDLSVTAMPGGASGSNQGAYEIVGLNVMSQPLPNWDHHGGGVGGGGVVAAGAAAAILGGGGGGGNGLTPGEAAAMTQRRGPRLAAINETSTSTVPSDYV

SEQ ID NO: 36580 - DNA, 3363 bp, DROSOPHILA
ttttttctttgttactgtaaactatttaatattagccaataaatagtagcattgaaaactgcttgcaatttaggttcgggtttactgcttgctgacaagtaaaacaaagtatacatatgtataatatacattttactgtaaaaaaatattcacattgtaagtgtataatgtcatgtagaaaaatatagttattttgcttaggacttgtaaaatgttttaaccattttagaccttaatgaataattttaaaaattgtaaaatttatacaaaaaacataaataattatttttctgccatcctgcttaaatttaacgatgcgcttaaagtgtcaattaaaaatctatctatgaatcaaaatcccgaacagcagctgtatctgcagaatgcatgcaatgtagttggaataataaatcagtaataataaaatgataatgataaataataaataaattatattggtatttggtcaagtccagctaaaagctaataaagctccttagaaaaagttgctttgcattagtttctccttgctaggaagatataaaaatagattcctcatactgaatgatagttagttgtgtataatatatgggaatgtgtagtgaccattcgctaagcgaaagttagaaggaaaaattgcaaatgtctcgatagactttcagtcaaaaaacgaacaaaatctatcgagtgttaatacgaataaagtgcattgccaaagacccatccccacacagcaacagtttaacaatgccgactttcaattcccatggcaactgaggaaattccgccgtcgttgtttattttggatacaaattttttgataatacaatatttttttaaatatggagataaaaacataggacaaagaactccagtgaaaatgtgtcacataaataaatctattttgtacacataaatttggcaagcggtagacctttatccgatatatatattttaagtttttaaaaacctcaataacgcaacatagcaatagttagcaatgccgacgatcccgaagagggattacaaacccaatggtggtggcaaaagctcaggaatggatttcctcagttccggcatcaagggaaccgaggtcaccgagatgcagctcaagtggcacgagaatccttgtccagcgccaccatgcaaacaggcattttggtgggccagccatcccaagccgatcaaaatcaaaggttgccccaagtaagtatcaaacagaagccacccaaagaatttcccatgcttccctgtaattccctgtaatttaagtccgacaagtagggtatattgaatatttcgtaaaattatattataatattaatcaactttcttactttctttgtaatttatataatatataataattcaataagtagttaagaaatcatttatacgctacaaatatgaaccattagaaattgtaagctcgagttaattatcatgggtattactcctcttgtaatgagtatcctatagttgcaaaaccattgctttttgtaacgccttgcaggggaattttctacacctttatatgtctccccactggggtcaatggaacccaagaccaaaaacgaaagtcataaattgcgtaaataaattattaaacgctggccgtgttcggctgatggtcaatacaatggccccactaaaggacacgcaaacttggtacgattttgaatagaaacattcgtgttctgaagggaaacaatagaaggagtgcacaggacaggaaattatgaggagtgtggaagtcgatgagtgcttaaaactattgtagaaattgacgcactagtatcataaaaatatacaaatatatctgactaccgataatgacgggggctggacttgggtcggattaaggtcaaccagggaataaggatgatccccaaatatgataaaaacccaataaactatagtgtatctaaatccagttgtagtaaagtgctcattcttctctcaagctaaaaatcgaataaatactacagtgtggtatatcttatatcttatcatttattcgaatatattagtacatcaattctgaactgtatatgttcaaattaggataagaataccgtgctttaggtcagccaacgaatttaatcatatagaagtatgattgagtgaaagaaaattaccttttttaacaacaggctttaccaaaagcttttggacttctgatacattcttaccaattcctgttacaataatctttcatctattcactgacctttcttcattgccagtaaaaaagagtgactccttggagtgccaagaaatctacttaattatgcttagttccctgttgaattccgcttatcaggcagtccaagcaattgaccttggccattgacaatacctaggaggtgttccaagtaatagagagccacccacctcctttttcaatgtcaggcagggaaatgcgtgaagtcatctccgacaatgtgaaaggaaatgtggacaccatcgaaacaaattcaaggtccctccgccgggcgaaacctttaattggagaccccaacgaaactacttggatggaaaagaaaaagctcttatgcaaagtagaattcctgggaacgtggatttggccatgccaatgccaccgactgttaacagttcgcattattattgcaacacctgcccatcatgtgcctcaaactgcgaagcaagcgatacactcagaaaaaaatttgaaaaatatgtgtatatagtatagaaacttacattgtggcacgcacgcgaagtattgttatttaaacttatgaaacagcaacatgaatagtttaaatatgcaattttctatataaaccaattgcagcactttaaggatatttttactaaaaatgtcctttgaagtaacagctcaattcctggaaagctttagtcgtgggcagtaggagactatatgttccacatatttttccaactgcacgacgactgctgaccacgggccgaatccaaagtcgaaaccgggtccgagcgcgagttccacgagtcctgcgagtcctttggtcatttggcgtttgccattcgagccgtgcggtacgtgttccgcgacaaaatcaaacaatcaaccaacgaacgcaacacctgagcggcgcacaaaagggaaaaatataggaaaagtattgattaagtttttcggtgcggcgggtgagagaaccgtgtggtggctatttataatgaacgaggtgaccggcggccgggagcagggataaccgagacggtagcggagaccatgccagagacggagcagcagcagcacccagcacactcacatcctgaacttaagccagatccacagccagtgccagaactggagcacctcaccgacaatagaccgaatcgcgtgcagaacttctc

SEQ ID NO: 36581 - DNA, 246 bp, DROSOPHILA
atgccgacgatcccgaagagggattacaaacccaatggtggtggcaaaagctcaggaatggatttcctcagttccggcatcaagggaaccgaggtcaccgagatgcagctcaagtggcacgagaatccttgtccagcgccaccatgcaaacaggcattttggtgggccagccatcccaagccgatcaaaatcaaaggttgccccaagcagtccaagcaattgaccttggccattgacaatacctag

SEQ ID NO: 36582 - protein, 81 aa, DROSOPHILA
MPTIPKRDYKPNGGGKSSGMDFLSSGIKGTEVTEMQLKWHENPCPAPPCKQAFWWASHPKPIKIKGCPKQSKQLTLAIDNT

SEQ ID NO: 36583 - DNA, 2696 bp, DROSOPHILA
ttgagtatgtaagtaacattataaagagtgacaacggtcttcacatccttacatatctcatttagatagaacacatgatcatggagagaatgcatctggtgaacaatgaacttctaatgttgcgctatgaagagcggccaaatggtaccgataccatgcccatggctacatcaccgcgccgcttgtatgtattctacaccataactggcgaagaagtggttggcgtttatccggaatattccgtcaacctgctgcaaatcttactgcaattcaatgactacatgagcaatgatcgatcgctgcaattcggtgatgcaccttcattgcccatgcattttttcctaaggcatacctttgcggattccaatgaatcggtctccgtcgatcgacatacggccttgcgcttcaaccccagcgttccactcagctcccagagcctttcctcgtcgccctatctaaagttcaacgaatttagatacgacagtcggtacgtgtctcctctggagcaaccccatcgctgctgcaacgatcctattgtgtttcttgaccgtgccacggattcaatcaagtttagactgcacgctacggcccgccggcatttaaatcctttggcgccacgggaattgtgcgcctttatttggcatccctttgacccactagtgctcagtatccagaaatgcatgaacagctacgtctaccacgtgcacttgtataaccacagcacaatagtggaaaagtagactgcctaatatgtacatacatgattttgtacatttgtgtataaaacatattcaagtaccttttatattatgaaatatatgtgatactaaaatatctcgttttaccttttcagtaatgtctttatttacaatggtaagagaacatttctttcttttatttaatcaaagactgtgaaaattgtgaaaattccaagtactgtttaaatctttaattcgactttgctacattgtattgaaggccgacttgaaacttgaggcccaatccgacgtttaaagtttcatgtaacattgtatctcgactgcgactacgttgaagattggtggtgaccgtcctcgttgtattccttgttgaccttaagggaatgattaataacgctcgagccgcctggaggatagttcggggcaggccctgatcccgggccgctggcaggctgctgtgcctgaggctgattggggatcgcatttgggttgttaactggattctgtccgggagccccctgcggtggatagccgcctggatatccggacgggtcgggtggatacattgatggtggcggagcttgttgcgggtgtggcggtggtggtggtggtgggggcatgtacagattgtagggatatgaaggatagcctcccatttgaggatacggaggatacggcatgtacggattgtagagatatgaaggatagcctcccatttcttgatacggaggatagcccggattaggatatgcaggataattgtacttgtgctccgtcttggagtgcttgtgcttcttctctccactgctgctgctgctgctgtcgctgctatcgctgtccgtcctaaccacttcgtactgaagtagcagtaccagaaggactccaatcgccgcacagctcttcatttctccgtttaaacgcacgacgttcgtttgatctaagctcacgggtatgactaaatcttgctcacacaataccttgtcccgttcccgttccgacaattcaaatagccagcgcgtgcgttgattttgataagtcgacaaaaacatacagatgcgacaaggttgcggcagggcccactcaactaattccctgtaagagtttaggattgaaaaacaatttcattcggaaatgaacaatacttcgcccatagattataaatagagaatacaatgggttaataatttatgtgatgtaatgtctcatacttattaattagttattgtgtgtcggaacaaccgcatttcctccagattttgttatatattgcaaagagaggctgtgtgcttatcaatttgacgcaaattaagcgaaacaattcttttgaataatcttaatagaagactgcgacgcttttattatttagacaactaaacttttaaatagagcggcaattaaaattagatactaaaaggtaataaatgggttttacatatacaaattggattagcaagataaactttcttttgtgtaaactgttttatcaacttcttaagttaataaaccggatgctgctgataaataaaatcaaaacagactgtgcgttgattataaatactttttaaagataacgttttgggaaataccctatgtactacttttccattgtcgccattgtatgaaatatattaggtaatcgtttggtactgcctgaaattgacgagggttgtccaaagagtagtttgtgatttcttatacctttttattcgaaaaatacgtatagcttaatgaactataaaattgatagcattattagttatctccgtttttgctggcagctgccgaagccttcagacgattctccttgaccagcttgcgccattccagccatttggccagttcgggttgctcgctgccgccgccttgctgttccagctgcatgtagtaggcttcgcgcagaattttgaaggcctggatgctgtagtatggctgctgtgtgatcgggtcaaagtaacgggctggcagcctggtgattgg

SEQ ID NO: 36584 - DNA, 696 bp, DROSOPHILA
gtattgtgtgagcaagatttagtcatacccgtgagcttagatcaaacgaacgtcgtgcgtttaaacggagaaatgaagagctgtgcggcgattggagtccttctggtactgctacttcagtacgaagtggttaggacggacagcgatagcagcgacagcagcagcagcagcagtggagagaagaagcacaagcactccaagacggagcacaagtacaattatcctgcatatcctaatccgggctatcctccgtatcaagaaatgggaggctatccttcatatctctacaatccgtacatgccgtatcctccgtatcctcaaatgggaggctatccttcatatccctacaatctgtacatgcccccaccaccaccaccaccgccacacccgcaacaagctccgccaccatcaatgtatccacccgacccgtccggatatccaggcggctatccaccgcagggggctcccggacagaatccagttaacaacccaaatgcgatccccaatcagcctcaggcacagcagcctgccagcggcccgggatcagggcctgccccgaactatcctccaggcggctcgagcgttattaatcattcccttaaggtcaacaaggaatacaacgaggacggtcaccaccaatcttcaacgtagtcgcagtcgagatacaatgttacatgaaactttaaacgtcggatt

SEQ ID NO: 36585 - protein, 192 aa, DROSOPHILA
MKSCAAIGVLLVLLLQYEVVRTDSDSSDSSSSSSGEKKHKHSKTEHKYNYPAYPNPGYPPYQEMGGYPSYLYNPYMPYPPYPQMGGYPSYPYNLYMPPPPPPPPHPQQAPPPSMYPPDPSGYPGGYPPQGAPGQNPVNNPNAIPNQPQAQQPASGPGSGPAPNYPPGGSSVINHSLKVNKEYNEDGHHQSST

SEQ ID NO: 36586 - DNA, 2357 bp, DROSOPHILA
caccggcacccgcggcaccctgaagcgcagcttcaagcacttggctctggacatgtacatgcccgacaagcgcaccctgaaggtggagaagtggttcggaaccaagaaggagttggccgccgtccgcaccgtctgcagtcacatcgagaacatgatcaagggtgcgtacagctagggtaaacacaacaggaacactttcacagccaggcctttcatttgccaatcacacgagaatttaataataatatctgggaagacgatttactaaactccattcatagatatcaattttctttacaaattacctaaaaatgctatatagtagttagtaaatattttcagtgtgtgctggcaaattagattcggcattaggttcctaaagacatttgcattcaaagtaccacacaattaattgcaatttctctctcgccaggagtcacgtttggattccagtacaagatgcgtgctgtgtacgcccatttccccatcaactgtgtcacctccgagaacaacacggtcattgagatccgtaacttcttgggtgagaagtacatccgtcgtgtggagatggctcctggcgtcaccgtggtcaactccactgcccagaaggacgaacttatcgtggagggaaacgatattgagtctgtctccggatctgccgccctcatccagcagtccacgaccgtcaagaacaaggatatccgtaagttccttgacggtctgtacgtgtccgagaagacgaccgttgtgaagctagagtcttagacttttggaatgtgtttcaacctaaaatgttaataaaaaaaaaccaacggccgaaactttcaataagaaatttagtgtctttaaacttttgtaatataatgtattcagattttatcacaatgctccactaaaaaagtgatgattggttgaaaattcgttggtaagattgtgttatttatcttatttatttatttgcaaggtttcataagttcatgataacttgagattgaaagcactacaaaaggacctttaggaagagatcccgcttaaggcagaggtagtcctctgctggttccctctggcacacatatggaaactgaaccttgcactctatatcgtgatacccaaaggctccattgtaattggcgaatccaacacaatcctcttcgggggaagcgttgttcggttccaggggtacccagtttaggtacggcacagtttcgccgttcctggcgagaagaaaggtgcgccggttacccaagcaattgatgccagcccaaacggagtgatgccagctttgggtgaaggatagccccatactctttaggaacgtggttgtgaggagtttgtcctcttgattgtcgagcaccattagttcggcaccaagttttcgacagcttcgatcggcaacatgccagttggcctgaaataatatttttgcgtttaaataaaatccttgtacaacgtattgtacgcacctcctgcaaagatacgtggtagcacttgtttccgactcgactaaacggcaacggacacgtctgtgcattggcacattcgagaatcagagctataagaaggaaaccgaaagaccctttgatgcacatgctcatgttttagggccaactgatatgtttatatgaaagctagctacttttaaacgctcggcagagaactatattttattgcaagcagtcgggagataatatttattaacgttatcttaagcaaattagggcaatcagtgcgaaaatggcaagcatgtacaacgactgcgaatttatcattatcatttattacaaaaatattcaaagcctgttaatttactatgccatctggacgatggcacatacgccccttttacatttaaattgcacaaaggaatataaaaaaagaacttataattttaatatgaaagatcttataaaaatttggaattatggaattacacctgtcaaaattccaattgttccactgagatatctcgttatatagaccttgttttgaattcaacgatgccttttcaataagtaccaccttcaaacatttaaacgttaaaataaataatttcatattaattttatttttgttttatgacttgatatatagataatatatacaataaatagtaagtataagctacatctttgcaaatgtgtccggagatttacaattaatcgctttaagcgcgaccgataactgaaggaataactcacatccctgggcgtctaacaactacccggtaatttctgttatctcttattcactgaacggcatttgtgacgagtagatcgtaagaaagtgcaactgtaatttgtgtaattatgaatttaccaccaaaccctgtaattgctcgtggacgtggtcgaggaaga

SEQ ID NO: 36587 - DNA, 357 bp, DROSOPHILA
atggtgctcgacaatcaagaggacaaactcctcacaaccacgttcctaaagagtatggggctatccttcacccaaagctggcatcactccgtttgggctggcatcaattgcttgggtaaccggcgcacctttcttctcgccaggaacggcgaaactgtgccgtacctaaactgggtacccctggaaccgaacaacgcttcccccgaagaggattgtgttggattcgccaattacaatggagcctttgggtatcacgatatagagtgcaaggttcagtttccatatgtgtgccagagggaaccagcagaggactacctctgccttaagcgggatctcttcctaaaggtccttttgtag

SEQ ID NO: 36588 - protein, 118 aa, DROSOPHILA
MVLDNQEDKLLTTTFLKSMGLSFTQSWHHSVWAGINCLGNRRTFLLARNGETVPYLNWVPLEPNNASPEEDCVGFANYNGAFGYHDIECKVQFPYVCQREPAEDYLCLKRDLFLKVLL

SEQ ID NO: 36589 - DNA, 3188 bp, DROSOPHILA
tctggccatttcctgggctctagttaatgccaacttgttgttgctgctattgttggctctgtcaattattggcacagaatttagaatgcacttggctaaccataaccatgaccacagagccacccaaatcaaagcctctgctcctcccgattcccctcatatatattttttttttgtatgttgctatacgttgtccgagcaaaattatgacagagtctaagagctgcccattggagtaaaagccaccaatttccggttggctcttggtctttgcctcgttttttagctcgtttagatttcttctctaccttttgaccaacgctttgtgggaatacggatacggatagaaatgaatacttaatttgagaggaaagttagacaagcttattaaagttagaatatgcactgtcacctgcaagatgtgataactaagagttatagtaatagatagatagacaaaaactaaagtaaaacgcaaacaaacacacaacttagtcttgtatttataagcttaatctaatgagtataacttaaacattaatttatatattcgctctcttgagtaatggagatgaccccttcctggcttatgaccctatatccaaaaacccctacttacgctaccttcccctgtgccgctgtgcctcctcaatcctcagtctgtctatagcttcaaagatcctggctcgacgatccagctccttttgcacagccatcttgttgcgttcccattccaatttttgttcttttttatatgccttcgaatttttctctgtttcatttaaaattttagtattataattgttgttcgaccagggacgtcgtgtcgatatgggatgatcgtaaagagctgtgttattcgcggggaaaagactgggttttataaaaattgccacatagccgggcttggatatgatgcgatccttggggaaaatactgaaaaatatgatttacttgaattaattatttgttgtaagtaaagatcaagatcttcgaatcctcaccaaaagaatccctggtacatatcctgcaccgaatggtgaccccaccagctgccaaggacctgcaaaggacacgatcgattgcgacccgcatacgaactcaataccttgccgacggatacaaaaagcaattccgtcgtgttggcctccaccaattcggcttttcgcatcatgaagagatcattgaaggccgatatgaccacatcatcgtacagattatagaccaacttgttgtccttatcctggccaaggatcaacatggcagtgcgcatggagttcatgatatgagccagtgccaaaaaattgatattcatgtccttgtagtccgcagttagatagcccaagaaccagtgacgcatgtgaacacgaactggtagctctatccgcgtcattagcaaccaaggacctccccatttgtttttgaatgtgcacaagatcttggtgggcaaacccctatctcgttcgagcctaatgccaaatacctcatgtagatccatatcctcgctacatgtggcctctgggtaatcgaagaatgcggatgggtgtggtgttactggctcccaagatcttgaggaaaaactttgagtgtttgaatctgatggttcttttccgattcctggtagatctgtaaacttctccttggggctttccgtgtaaatttctacagttgtcttttctttgtcaatagcagtggccatcgtggattctgtggtgatttcattgggcatttcaggtgtttcatatgttgtggcctttgtttttttcattgttgtggatttgatctgtttagtagtagaccacgtcatcgtctcagccgaatcacttaagtccttatcttccacgcttggtttcttagtttcgctcttctcccgcgagtgatgctctgaactcaactcaagtgtttccattatcttgtcctttttagagttatgtttggactccagtgaatgctccaatgagctgacctccagagtatctccctcgtctgaatgttctaccgagctgatcttcacattgtccccctcaacgggctctcttgctgtaccattgaatccaagttgtggcgcacttattctagatggtccatagttgttgaaaataaagctcatgtagtacgtctggcccaggacaatccacggcagagttgtccacaggcaggaggtcagcatggttacgttcttcagcatcaccggaaccgaagtgacggttcctatatggtaactgggttccctatatgccctcgctctgttgactcgtgactaatcttgttaaaagtgatgaagatacttatttttaatgtgatgactgatttgcctgattgccattagattcgacttggatactttgccggtggcacctttaattgatgtcacagttaaaaaaaaaatagtatgtaatttaagtagaagcattttaaattctatgatttataataataaatgaaatacctacaagaaaactccgattttttataaaaaattgacatattcaatcataatctgaacggatcctgtgatcctgtgttgtatacagatcctcagattttgaattcggttgaccagaactgtctttaatataataataataataataataataataataataataataataataataataataataataataatataatataataacccattcgacttggccttacaagctttctattaatgcaatcgatatgaaagtacgtttgcatttgattcaatatggttctatttaatcccttaacttaatccctccacttgctactcattaaaaaaagcagtcttggtattaaaattttattggcattttaatgataaaatcaattgaagtgtctgcgttcttccaaagtccctcgagcgaacctgtctgccaaaagtaagggcaaggacaaagttagggcagatcgttttttctcacgaccaagacacttacggtcagatctcccggttgtgttacatctcctcgtagtcatcttccttggctccagtttcgggtccatctggcacgttgcctgcccgttgagcaggcgcttcgctggccacttccttggcatcctggttctcctgactgctctcacgggctccattgtcccgctgattggagccggcattgctgccggaatgtccgtggctctcgctgctctcgtaaatggaccgcacgtaccgcccgccaaagctgtcgtcg

SEQ ID NO: 36590 - DNA, 1188 bp, DROSOPHILA
atgctgaagaacgtaaccatgctgacctcctgcctgtggacaactctgccgtggattgtcctgggccagacgtactacatgagctttattttcaacaactatggaccatctagaataagtgcgccacaacttggattcaatggtacagcaagagagcccgttgagggggacaatgtgaagatcagctcggtagaacattcagacgagggagatactctggaggtcagctcattggagcattcactggagtccaaacataactctaaaaaggacaagataatggaaacacttgagttgagttcagagcatcactcgcgggagaagagcgaaactaagaaaccaagcgtggaagataaggacttaagtgattcggctgagacgatgacgtggtctactactaaacagatcaaatccacaacaatgaaaaaaacaaaggccacaacatatgaaacacctgaaatgcccaatgaaatcaccacagaatccacgatggccactgctattgacaaagaaaagacaactgtagaaatttacacggaaagccccaaggagaagtttacagatctaccaggaatcggaaaagaaccatcagattcaaacactcaaagtttttcctcaagatcttgggagccagtaacaccacacccatccgcattcttcgattacccagaggccacatgtagcgaggatatggatctacatgaggtatttggcattaggctcgaacgagataggggtttgcccaccaagatcttgtgcacattcaaaaacaaatggggaggtccttggttgctaatgacgcggatagagctaccagttcgtgttcacatgcgtcactggttcttgggctatctaactgcggactacaaggacatgaatatcaattttttggcactggctcatatcatgaactccatgcgcactgccatgttgatccttggccaggataaggacaacaagttggtctataatctgtacgatgatgtggtcatatcggccttcaatgatctcttcatgatgcgaaaagccgaattggtggaggccaacacgacggaattgctttttgtatccgtcggcaaggtattgagttcgtatgcgggtcgcaatcgatcgtgtcctttgcaggtccttggcagctggtggggtcaccattcggtgcaggatatgtaccagggattcttttggtga

SEQ ID NO: 36591 - protein, 395 aa, DROSOPHILA
MLKNVTMLTSCLWTTLPWIVLGQTYYMSFIFNNYGPSRISAPQLGFNGTAREPVEGDNVKISSVEHSDEGDTLEVSSLEHSLESKHNSKKDKIMETLELSSEHHSREKSETKKPSVEDKDLSDSAETMTWSTTKQIKSTTMKKTKATTYETPEMPNEITTESTMATAIDKEKTTVEIYTESPKEKFTDLPGIGKEPSDSNTQSFSSRSWEPVTPHPSAFFDYPEATCSEDMDLHEVFGIRLERDRGLPTKILCTFKNKWGGPWLLMTRIELPVRVHMRHWFLGYLTADYKDMNINFLALAHIMNSMRTAMLILGQDKDNKLVYNLYDDVVISAFNDLFMMRKAELVEANTTELLFVSVGKVLSSYAGRNRSCPLQVLGSWWGHHSVQDMYQGFFW

SEQ ID NO: 36592 - DNA, 2733 bp, DROSOPHILA
tcggcgtctcaactccaatccaatccactccaatccactctactccactcaaggcatcaagatcggctgggattggatgcgatgccatttcatgttaatcaaacaacgaaatccatcaacaggtgacacacaccgccaagtgggcggctgccggtgggctggcgggcgcaaaaagggggtggtgggcagcagcgacatccagcagacatgtcagtgcgataatggtgctacttctctgccagcggagtggagtatgagtgtgtgtgtgtatctaaaacaacttcattcacaaaaatcggaccaacaaaaaaaaaacggcagaagcaaagtagcagagcatctgcaaaaaggaagctgggccattaaaaatatcttgtggatgccatggccaggcagatagcagccgccacaagatgcattcaaaaaggcagaggccacttggtagcatcctcatcatcatcatcatcatcgtcatcatcatcaccgatggttttagccgcggctttggaaccgggagctgtgcaacctcggaagcaacagctgcgggggcgggacagggtcgctggtcgctcagttggccggtcggtgttggccgacagtgcagccaaggaatagccaagaaacatacgcctaatgccacagtcatcgacatccgccatttagctaattaacccaatgttgcccaagggaatcctgctggtgggctgttagaaaaaacaaataacttgcgcaattaatttctctataatatcgttattctattttaagccaagaacttgtaaagatatttgtttaatatttaaagaggtttcaaacgtttaaaaatatctaaaaatatgttttagctcaaattttagtatcatttgctaataatagcatcacctcttagatattcaacggaagaacataattttcataaaatgtacttcctaatataaagtcagccaatcatactatcataggccataaagggttaagcgatcttctccctctcctcagcttagctccttctcgctcccacctttctgggcttctgacgcagcttcttcagcaacctcagcgaattgagcttctgctgctgcggctgcgcagtcgcaactgtctacatttgtcggccagccttctctttcccaccttcctgctgccactgcccatggcactgcctccacgtctactcttattcttcttctccgccgtgttcgtcttgttcttcttcagtcgattggatgtccagctttcaatttgcaacataaagcatcttcatcgtgggccgcatgaatgggcaagtgactgcgaaaggggggaaggagagggagaattgggtgtgggctgggagctggttctgcacctcgagcccaccccttctgccgatcatctggccatcgggcaatccagcaatccgacaatccagcaatccagcaaagcggcattgacggtaggcactcaggcgtgccccggcggtagtcgctgacctttattgattgctgtttgacctcgccagccattgtggctgttgctgttttcgctgttactgttgcatctcctaaccatttgtacttggccgatcgctgccatagattgcacttggcttgcacacgggcacagtggtggagaggaaggaggaaggaggaggaggaggaggagcggcagctgtgggcggatggggagcggtacacgcccactagcatcggcgcgtcgtcgttttgctttctggctttttgtggagccttcattgttgcttttctcttcgatgcactcggaaaactaattatcttgtttagaaaataagagtatttcattgaaaaactactggaaagtataggcttaatagttaaacaacatatataaaacatcataaatatgtatgaaaacaagttaatttttaacattataataatatttaagcgttgcatattaatatatttttggtttaatagataagctacacttttgccgtatatcctttttctctctctgctgccactggtagtcttgttattgttgctccattacctcgttcatggcagttaatttatattcgatgcatctccctgtccttttcttggggcctcaatttttagtgttctcttcttaactcttttttttctcatttgaacttcctttttgatagcgtagttgccgaaggtcgacgtcagtcgtcttcgttggtcgtcattgacgcctttccttgtacttagcctaccatttgccaggctaaaacaaaagacaaaggcaaggcaacaataaacaagaaagcttgtaaaatggcaaattagactaccagataccttttagtatgcacgattaagggctcgaaagttagcaaggtatatgagaagcttaaaatgcgtaatgttcattttgtataacgttttaagagttttcaaagtgtaaatttggttgaatattttagtataaatatatcgttctatatatggtgaagggttctaaattaaattgttttacaatgatataccccgcaattaccgggtactaaaacgcagcacactttggaagcctcgctttgtttggcttctatcgtgtagtttgttttgtttgacagtttctatctggaggggctatcaagtcggagctggcgagttggagctgaagttcgagctggagctgaagctgcagttggagactgcagccgtggtcgctgtcgttttgtttgcttaattgtttggtttcccccatttgaatggaggtggagccccttggcagggaaaatcg

SEQ ID NO: 36593 - DNA, 558 bp, DROSOPHILA
atgaaggctccacaaaaagccagaaagcaaaacgacgacgcgccgatgctagtgggcgtgtaccgctccccatccgcccacagctgccgctcctcctcctcctcctccttcctccttcctctccaccactgtgcccgtgtgcaagccaagtgcaatctatggcagcgatcggccaagtacaaatggttaggagatgcaacagtaacagcgaaaacagcaacagccacaatggctggcgaggtcaaacagcaatcaataaaggtcagcgactaccgccggggcacgcctgagtgcctaccgtcaatgccgctttgctggattgctggattgtcggattgctggattgcccgatggccagatgatcggcagaagggctggacatccaatcgactgaagaagaacaagacgaacacggcggagaagaagaataagagtagacgtggaggcagtgccatgggcagtggcagcaggaagccgcagcagcagaagctcaattcgctgaggttgctgaagaagctgcgtcagaagcccagaaaggtgggagcgagaaggagctaa

SEQ ID NO: 36594 - protein, 185 aa, DROSOPHILA
MKAPQKARKQNDDAPMLVGVYRSPSAHSCRSSSSSSFLLPLHHCARVQAKCNLWQRSAKYKWLGDATVTAKTATATMAGEVKQQSIKVSDYRRGTPECLPSMPLCWIAGLSDCWIARWPDDRQKGWTSNRLKKNKTNTAEKKNKSRRGGSAMGSGSRKPQQQKLNSLRLLKKLRQKPRKVGARRS

SEQ ID NO: 36595 - DNA, 2363 bp, DROSOPHILA
agttatagggtatctccaactcgatcaatcttttcctgcccggaggctcctgtttcctttatttttttttagcttcttggatttcaatccgagcgcgattcgctggcagtgtgagatcggtggcaggtgatgccgatgccgttcaactttgaggttgagtggctcttgatgcgaccgagtccgaccaaagttgaccagttccccgggcaaatatatatatctatatacacatatgtgtgtgcgaagtggtcgctactccgcgttgagcgttgtaaattacattttccaaatgcttttgccatgtcgaaccaaaaagccatgtacatatgcggcataaaggagcggcctggcctggccaaccggagctaccatggccatggcctgggctgtgcttccgttttgatttggaacacttgttgcgttcggtcgctcggccagtcgctctccgcctccggccatagagatttgtcctctggccagaacgacaaccagaaacattcattccttgggggatatggccactcgcagatacacacgccaacccaatgttcctacatggattcctacatggcatttgggatgcacctcctcgattctggactcttatttttttacttttttcgaactctctgcccgttgcgtatttaagcgttttgttgctgcgccgttgattatgttgttgtagtttgttcggattgttgatgatacgagtgttgattgttgttagcgaaatgggttcgtccctcggagctgttggcttcgattagctgaatggcagatcctctagagatcgctgggaaactagttgaacacaagtaacataaaagcttcagtggggttttcccaggtccataaatccgactaaaataaatgtgggttatcttgaattttatttatcaaactatcaattatatttttcattctttgtatgaacaaaatgtcagttgtaaaattaaattaaatttaattcgtttacatatttagtgcttagagattatttctaatacaatgactctggttccaggatctcgtaggttgaaagcggcaggacgtcattgccaaagtagttggctccacctggtgcaatctccggcactggatcgttgtaaagacgttcgaggaagggacttctggacatcatcatcctagagctgatgaccgggcgcctcttcacgaaataatccctcctgtgtggcctcctcatgggcgatatctggtccatgatttcgttgctcattcttctctccgccggcagcgatgtgacctcattgagtattgaagatctcgacctgggtcgtgcccatgcgataaggaccaaacaggcaatgaccagaataagaagggcaagtttagagctcgacatcttgactgcttggcagtttggtattgaatgtactaatggcgttcggcgcgtaggaatttatagtggcaaagatacgtcacaggtagtcctaaaaggcgtaccctttaagtaatttataattatgccatgtgtttgtcgtacctggttttacctacttttattgtcaacaaatgtctacaaatcggagtctgcgattttacatctttaaattgctcgttttgtctactacttaaaaatatatttaaatatataacatgtaagttattaaaataagttaaacatgtttgttggttacaaatcgtaccaactagcgaacaagcttaaaaatgttaacccgtttttctttggaatgaatatcatatcattggccgcaaaggttgcgggctatttagataaacgcttccaaggagtaagtacattgaaatccatcaaaagccacaatttccttggccattccactcggggccatcacttaacccatccacctcatcaatctccgacatttggctaactatccgccaggcgatccaactgggacgaagtcacttagagtcggcgtctcaactccaatccaatccactccaatccactctactccactcaaggcatcaagatcggctgggattggatgcgatgccatttcatgttaatcaaacaacgaaatccatcaacaggtgacacacaccgccaagtgggcggctgccggtgggctggcgggcgcaaaaagggggtggtgggcagcagcgacatccagcagacatgtcagtgcgataatggtgctacttctctgccagcggagtggagtatgagtgtgtgtgtgtatctaaaacaacttcattcacaaaaatcggaccaacaaaaaaaaaacggcagaagcaaagtagcagagcatctgcaaaaaggaagctgggccattaaaaatatcttgtggatgccatggccaggcagatagcagccgccacaagatgcattcaaaaaggcagaggccacttggtagcat

SEQ ID NO: 36596 - DNA, 363 bp, DROSOPHILA
atgtcgagctctaaacttgcccttcttattctggtcattgcctgtttggtccttatcgcatgggcacgacccaggtcgagatcttcaatactcaatgaggtcacatcgctgccggcggagagaagaatgagcaacgaaatcatggaccagatatcgcccatgaggaggccacacaggagggattatttcgtgaagaggcgcccggtcatcagctctaggatgatgatgtccagaagtcccttcctcgaacgtctttacaacgatccagtgccggagattgcaccaggtggagccaactactttggcaatgacgtcctgccgctttcaacctacgagatcctggaaccagagtcattgtattag

SEQ ID NO: 36597 - protein, 120 aa, DROSOPHILA
MSSSKLALLILVIACLVLIAWARPRSRSSILNEVTSLPAERRMSNEIMDQISPMRRPHRRDYFVKRRPVISSRMMMSRSPFLERLYNDPVPEIAPGGANYFGNDVLPLSTYEILEPESLY

SEQ ID NO: 36598 - DNA, 4397 bp, DROSOPHILA
atcgtcctgtcccaaacgctgcaaagccaggtgaccacggcccgcgaggagcacccactgacccgagtaatcaaccgacatggccgtggcctgggaatctcggtgttcatagtatttgttgctctgcctgacgatgtacgtttgttcgggtgctcctgctcccggtccaccggctgttccgcgttctcccggacgcagtgtctccgtgggcggcatattgtcctactctaataagtgctcaaaaagcaaaagactgcgaatttaaaccatttttgcaacaaacaaaaattaaacgaagaaactgaactgataagaacgatagacaataacaacaggcgtctgtgttggcaattaagcattttttccgacaaatgaatttccaggacctcgttaagctggctatttttcaataatgctgttgctatagtttttgataatatattaaaaaaattacaaaattaaactagaacattatatgaaaaaattgtacctaatattttgtcgcaaaagtttgtaacacccataaatctagctggaataacgacagcacaactatagctgaaaatgttgttttttcgatagtatcgataaaattgtggttatagctatcgggatttgaatttatgatataaaacaggtaaacgagctcagagcaaaatttataattttatatatatggtcttgttaaataaaaacgttcgattttttttatagatttattacattttataaattgtcaatcaccaaaaatatacatgtgcattggttcataaatgttatgaaaattattaaagtacgtggctaaatataatttagcatctaaataaatttgtaactagaaagggatattcccaattgactcatttataaaaagttcatcctattattcatttattaactcagcataaggctataaatcatgagatactaaacaaaaagtgcattatatatgtatataacaactcaattatggtctacaacattaagtgctacatattttggatactattatttatttatatgttcgccacttccctccctagtcagtaatagcttatcatttattttacatacacaaagtaattctgcggttattacgattattagttcattcagtttattgtcctctaagttagtgggaaataaacaaattccgctcaactaccgtgactacataggtgcctaagactgggaactccttacggcaaaggctaaaattggataagtatttttatacaaacattggctatttcatagaaataaactaggttttatggctaaggctacgttaatgggtttcaagtctttgacgtcaaacacatcctccccatccccgaaagctcccagttacattgccattgccttatctgtggcaatagcagaacatttttagcgccggatcgttgagacagtagctctggcttccgtacagattcagacgactaatggtgcccgttagtacggtcgtatagcccgtcatccgcaccgtggactcaaacacacccagcccgggcttcgtctgcagtcgcagggtgatgtccactgcgtagtccgtggaaatgttcttcacaatcttcgagtgcggcgctgcaatcagagcctggagtatggagttcaggtatagggttctgcactgtgagctatccttcagtcggttattgatcaagcgtaccagatagcgcgccgcccgctggacacgtggatcgtttgtctgcagctcctggcgctgatggcaggtgcaccagtgggcggcaatccctgcctgctcgcaggtccgagcagccgggatgggcaggaataggctaatgcctctgggcagcgtgctatccggctcgtccatctctgttgatctgcgttgcaactgatctgcctccagattgtgaagatttagcagctgcaacattgtcgcgtgcacatcaaatggtgtggttagccggcgggcatttaacctaagattggcaattgcctccggataacgctcggtcatccatggcggatacaaaagcatcattaggggctggcgctcctccatcatgccctggtaggtacgacgaaaggaaccccatctcagtccgtgatcggatagcaacattaccaccgtgcgattgagcaatccggaatcttgcagctgcatcaactgttgcaacatggcctcatccagtagtgaggggaaattaaaatagtcatgggttagggccaccgtccaaaaaaatgaaaagtaaagatccctgctcattcgtggcaccaatttcttcatatactcgagcagcacatccgccgtcctccggctgcccatgcacaagtgcatgttgaggtccttcttgaaggccacagtcttttccatttccataatcatgggtcgcagataataatccgttggctgctttcggaacccattttgattgtaattgaatgccgagagcattgccacatcctcggcgaaaatggagcgataacccagttgctggtagcgtttccaaatgaatgagcacctatcataggatcgcaatgtctttggcgtgcaggccagattcagttcctgatcatccaggccacttagcaggggcacgagattgggaaacgtattgtcgcccaccttgttgtagccccaaaattccacgtgggacagatgcttacggacgtagttcgctgtgcggcgcatctggcgcaggaaatttagatgcgacaggctatccatgccgagtatcattacggatagccgttcctgctcctccttgctcttgttgaagctcaccctatcggttccagtcttaagtgggggcctaatccttggcttatcgactgcaaaaaaatgacagtccttgtagaagagtttgtccagtgaatcatagcaccacatgcaaatgaactccgagctgagaggcagtttcataactttgtccagcttaaaactcactgccggactgtgggtgttactagaatcggttttgcgcttcacctccgtatagttgcaattaacggaggacaggtcactgatgttgtagtatgcgagcagctcactggcctccagattgagatgcagctgtccgggaattgtgtcgctcgtccggatcagagctctgttgcagctgtacggacgtggcttgaaaatgaactgggcaatggtgtcgtcgctgacctcaaagtgtggcatccggcagcccgtcgtgtcaacgaaataggccgttgtcacatttccaccatagtggtcctcgatgcgggccataaaatcgaatccatcacggaaacgaagtagtttcgtcctcagattgtagtccacacataggtaggaaaacacgcagagggcgaagatcacaatcacaaccttcttgaattgtccacggttcttgttcatgttgtagtagcgatagtactgctgtaggtccctcttggtcataaacttcggatccagcagatatttgcttctgttgaatagcaacaaggaaacgattagattgatttgtatgtctaacagaaaaaactaaggaaaggtgtttgaaaagttttagaaagatcttgaaaggttcgatttatatttgattaggatattattcatagaatccaaagaggagatttaccaaaggaattcaatattgtacgagcatactatcattacttaaaaaactccctataatccttttcaataatttccttaattaattcgggtcattgccttttgtaattcacttccccccatcacccccttgacctttctatgtttgccacaaacttctgctaggttcattgtattctctatagtggttagcagttttttatgctgtcagccattaattaaggcaacaaaccataaaattactgcccgagacaaaggaagctctctgagtagccactcagccgaaagtccttaatccgctgcccacctagaccaagccccaaccactttaggtccttcgagccaccaacacagccccccagaagtgtggttcccgtgtcaagaaatacagctgaacgtgatgctgtcaatgttttcaaatttaagccacgacaatctcattaacatgcatccacggaatgctcaatgaagtaggcaataataaatgaacatatgaaaagttgttgcagtgtaggaactataggaggcactgacaaaaaccgactacaaatagctaaaaaggattttaaatgatcaataagaagtacccatgtcctttctaaagatacagaatgagaatgccattagtaaaaaccggtggtataccacttaaataattaaatcaaactcaaataaatgaacttatcccaaataaatatcccatttggcgaaaagaataacccacttttaccgggcaagaagaaatctgtttcaacaaattttctttcccatccatccgattttggacaaaaacaaattttcaattgacacatgcaattgcatt

SEQ ID NO: 36599 - DNA, 2397 bp, DROSOPHILA
atgaccaagagggacctacagcagtactatcgctactacaacatgaacaagaaccgtggacaattcaagaaggttgtgattgtgatcttcgccctctgcgtgttttcctacctatgtgtggactacaatctgaggacgaaactacttcgtttccgtgatggattcgattttatggcccgcatcgaggaccactatggtggaaatgtgacaacggcctatttcgttgacacgacgggctgccggatgccacactttgaggtcagcgacgacaccattgcccagttcattttcaagccacgtccgtacagctgcaacagagctctgatccggacgagcgacacaattcccggacagctgcatctcaatctggaggccagtgagctgctcgcatactacaacatcagtgacctgtcctccgttaattgcaactatacggaggtgaagcgcaaaaccgattctagtaacacccacagtccggcagtgagttttaagctggacaaagttatgaaactgcctctcagctcggagttcatttgcatgtggtgctatgattcactggacaaactcttctacaaggactgtcatttttttgcagtcgataagccaaggattaggcccccacttaagactggaaccgatagggtgagcttcaacaagagcaaggaggagcaggaacggctatccgtaatgatactcggcatggatagcctgtcgcatctaaatttcctgcgccagatgcgccgcacagcgaactacgtccgtaagcatctgtcccacgtggaattttggggctacaacaaggtgggcgacaatacgtttcccaatctcgtgcccctgctaagtggcctggatgatcaggaactgaatctggcctgcacgccaaagacattgcgatcctatgataggtgctcattcatttggaaacgctaccagcaactgggttatcgctccattttcgccgaggatgtggcaatgctctcggcattcaattacaatcaaaatgggttccgaaagcagccaacggattattatctgcgacccatgattatggaaatggaaaagactgtggccttcaagaaggacctcaacatgcacttgtgcatgggcagccggaggacggcggatgtgctgctcgagtatatgaagaaattggtgccacgaatgagcagggatctttacttttcatttttttggacggtggccctaacccatgactattttaatttcccctcactactggatgaggccatgttgcaacagttgatgcagctgcaagattccggattgctcaatcgcacggtggtaatgttgctatccgatcacggactgagatggggttcctttcgtcgtacctaccagggcatgatggaggagcgccagcccctaatgatgcttttgtatccgccatggatgaccgagcgttatccggaggcaattgccaatcttaggttaaatgcccgccggctaaccacaccatttgatgtgcacgcgacaatgttgcagctgctaaatcttcacaatctggaggcagatcagttgcaacgcagatcaacagagatggacgagccggatagcacgctgcccagaggcattagcctattcctgcccatcccggctgctcggacctgcgagcaggcagggattgccgcccactggtgcacctgccatcagcgccaggagctgcagacaaacgatccacgtgtccagcgggcggcgcgctatctggtacgcttgatcaataaccgactgaaggatagctcacagtgcagaaccctatacctgaactccatactccaggctctgattgcagcgccgcactcgaagattgtgaagaacatttccacggactacgcagtggacatcaccctgcgactgcagacgaagcccgggctgggtgtgtttgagtccacggtgcggatgacgggctatacgaccgtactaacgggcaccattagtcgtctgaatctgtacggaagccagagctactgtctcaacgatccggcgctaaaaatgttctgctattgccacagataaggcaatggcaatgtaactgggagctttcggggatggggaggatgtgtttgacgtcaaagacttgaaacccattaacgtagccttagccataaaacctagtttatttctatgaaatagccaatgtttgtataaaaatacttatccaattttagcctttgccgtaaggagttcccagtcttaggcacctatgtagtcacggtagttgagcggaatttgtttatttcccactaacttagaggacaataaactgaatgaactaataatcgtaataaccgcagaattactttgtgtatgtaaaataaatgataagctattactgactagggagggaagtggcgaacatataaataaataatagtatcc

SEQ ID NO: 36600 - protein, 677 aa, DROSOPHILA
MTKRDLQQYYRYYNMNKNRGQFKKVVIVIFALCVFSYLCVDYNLRTKLLRFRDGFDFMARIEDHYGGNVTTAYFVDTTGCRMPHFEVSDDTIAQFIFKPRPYSCNRALIRTSDTIPGQLHLNLEASELLAYYNISDLSSVNCNYTEVKRKTDSSNTHSPAVSFKLDKVMKLPLSSEFICMWCYDSLDKLFYKDCHFFAVDKPRIRPPLKTGTDRVSFNKSKEEQERLSVMILGMDSLSHLNFLRQMRRTANYVRKHLSHVEFWGYNKVGDNTFPNLVPLLSGLDDQELNLACTPKTLRSYDRCSFIWKRYQQLGYRSIFAEDVAMLSAFNYNQNGFRKQPTDYYLRPMIMEMEKTVAFKKDLNMHLCMGSRRTADVLLEYMKKLVPRMSRDLYFSFFWTVALTHDYFNFPSLLDEAMLQQLMQLQDSGLLNRTVVMLLSDHGLRWGSFRRTYQGMMEERQPLMMLLYPPWMTERYPEAIANLRLNARRLTTPFDVHATMLQLLNLHNLEADQLQRRSTEMDEPDSTLPRGISLFLPIPAARTCEQAGIAAHWCTCHQRQELQTNDPRVQRAARYLVRLINNRLKDSSQCRTLYLNSILQALIAAPHSKIVKNISTDYAVDITLRLQTKPGLGVFESTVRMTGYTTVLTGTISRLNLYGSQSYCLNDPALKMFCYCHR

SEQ ID NO: 36601 - DNA, 3241 bp, DROSOPHILA
atccgttcatggagagcttgcgctccaatcgcatgctgatgtatgccatcggagcctccgctgcactggtcattcttctgtccacgggactggcgcccgaactgacggaattctttgagataattgacttcccaacggatgtaagtacttgagtatattttattgttataatgtatataatgttatcattttcagttccgtaaaactttgctcggcgtcctggtcctagatattgtaggggcttttcttttggaccgtatttgctcattcctgttcggggaaacgcgtcgcaaatctaaagtgctgaactgttaggaccattttatactaaatactagaaaagtaatgtgaaagcaggcgcaagccgtacgttccactagagaaacccctttcgtttttatttgtacccccataatgatgaataacaaaacgtaatattatggcgtcggtttcataaatattgaaattcttcatctaagaatcaacataatgcatttaaggtgtattatcaggcaagtgtattatcgggcatcctatatcattttattttgacaaattgagatctttcgattttttcgactctcccgtatatgcgattagtgaaattgtcgtaatatttgtaatgctaataaaaatagagaaaagttcgaaagccgcgatgcatatttatcaaatacttttgatataggttacatttaagtttgttctggtacaggatcctctactttcgagtcttcgagctgtttgaactgaatcaagattaccaagtatgttgtgacggccgaaaatatctgaaaataaacagcaaatacacagaacttgcagtacatcccattaataaataagggatacgtggattatataccttgaatagtgtggagttatctatcgcaaaaaatccatatgccgtgaattgcacctcctgtttaatgctcttcgtaaggaacttatcaatctggtaatgaaacccttagctaatcactttgattcatttcgtttttcaataacttacgatattctgatactccttcgacttggcatacacccttgcaagaatttgggatgtggcattggccttgaaataaaaacactcatgaatattgagatcttatctccgatgtagttgctcacctccgtggtggtcagaccacagctgcgtgacagcaaagccagcagggaaacgtggagacataaccaggcgaagcaccactgcaatatgtttggtgaaaccatgcccttgccggtaatctggacaaagaggttgtagcagttggtggtgaccgtgtaaaaggagtagcccagaaacgagaccagaatcaagttgcagcaatcgttgatgcccttgtagatacgcagcagtttgttgtgcatgcggtatatgaatagcgagtcttccgggaaatgttccattagagcaggattgacattgggattgacgtcaccacgctgccgcctcgctcgtgctccaccttctttgcgcctatgctgctgcccataggtgtaaccatttagcagctggttgatgaaatgaaaccggatgtacacaatcctgagcaaagccgatgcgaatactatatatgtggcggtcagaccgttctggatgccatagaaggccaatagtatataggaggtgggtgtgatctcgccttgcacggcatatattttgagcacgattatataagcctggcaagcggtgattcctactaaaaactttaccaagaacccaaaattttggctcaaattggcaccaaactggcgacgcacttcctcgtcgagttgaaggatttcattcattatccgcaacatgctcgtggtattgtgggcacaaacgaaaaccgtaagggtataggttaggatgcagagcagcagctcgatccactggttcacattgtccgtctcgcggtaggagaaaaataattgcgccgatatcggtgtaaataagctgtagacattgaagatggtcagggcgtggaccacgcctcttacgaagaacgagtagaactcattcgttttggtcggaggacccacctcatagtcggagacctgttcgtatattggcatcaagccactggccttgagcacggacaaaatggtgcgaatgtcctcgaaaacgggatgatcatggttcctcgctggcataggtggtgcatccctactgaaggcatcgcggttcaagacgggtggccggtacggcgagattcttcgcggatacggatgtgatcgcgttttctgcgtgggcatttcaattacccaagtgttcggggacatggccaacgtggcactgacaggacgaaaggattgcactaactggattgaacagcgttcatttaagtgggttctgagctatctgattttgtcgtgggcccacttgggcccgagactttgccattagagtaattgcttggcattgtgaattattgaatattgccaatggagaggaaatcaattattccatggatgaattttgatgaatttatagaaagagttatttattttcttaatatttacaattcataagtatttatattgcttaatagttttatttcacataatgcaaaagattctaggaaatgtctgctcaattcctattcattttcgttgcggcgacattggggtttttccatataaggattcccctaagtcctgcgttaatccccgcaaaacaaatcccataaatataaaattgaatggcgaaccaattggaggaccagttcaccctccaatgtaacatgtaacatgagcgtgttatgggtgtattatcactgggatgcgtgaaatgttatctttgtcacaccttttccgcttttccgcccccatagcacccacacaaggacaaactccatttcgcacacacacatccacgtatttttccacccccaatgagggattgcaattcaatgcggctcgtgctgttgcttttcttttttgtgtcattcccagctttacttcctttaccttttggggagagagactcgtgacgagagagtgctaaacgggcacgctgttgctttcggcacacgcctcactgtgggtcgaggaaggaaatcgttcgcaggaagcttaggagacagacttgacacgaattcttcagtcaaaaatgatttttttaatggtataatgatatactggctataagctttactgtcataaagtttagttagttgtcagcttaaatcagtgtattttaaaataattttaacatgttttattagttaaactattaaaggttttaatggataat

SEQ ID NO: 36602 - DNA, 1185 bp, DROSOPHILA
atgcccacgcagaaaacgcgatcacatccgtatccgcgaagaatctcgccgtaccggccacccgtcttgaaccgcgatgccttcagtagggatgcaccacctatgccagcgaggaaccatgatcatcccgttttcgaggacattcgcaccattttgtccgtgctcaaggccagtggcttgatgccaatatacgaacaggtctccgactatgaggtgggtcctccgaccaaaacgaatgagttctactcgttcttcgtaagaggcgtggtccacgccctgaccatcttcaatgtctacagcttatttacaccgatatcggcgcaattatttttctcctaccgcgagacggacaatgtgaaccagtggatcgagctgctgctctgcatcctaacctatacccttacggttttcgtttgtgcccacaataccacgagcatgttgcggataatgaatgaaatccttcaactcgacgaggaagtgcgtcgccagtttggtgccaatttgagccaaaattttgggttcttggtaaagtttttagtaggaatcaccgcttgccaggcttatataatcgtgctcaaaatatatgccgtgcaaggcgagatcacacccacctcctatatactattggccttctatggcatccagaacggtctgaccgccacatatatagtattcgcatcggctttgctcaggattgtgtacatccggtttcatttcatcaaccagctgctaaatggttacacctatgggcagcagcataggcgcaaagaaggtggagcacgagcgaggcggcagcgtggtgacgtcaatcccaatgtcaatcctgctctaatggaacatttcccggaagactcgctattcatataccgcatgcacaacaaactgctgcgtatctacaagggcatcaacgattgctgcaacttgattctggtctcgtttctgggctactccttttacacggtcaccaccaactgctacaacctctttgtccagattaccggcaagggcatggtttcaccaaacatattgcagtggtgcttcgcctggttatgtctccacgtttccctgctggctttgctgtcacgcagctgtggtctgaccaccacggaggccaatgccacatcccaaattcttgcaagggtgtatgccaagtcgaaggagtatcagaatatcgtaagttattga

SEQ ID NO: 36603 - protein, 394 aa, DROSOPHILA
MPTQKTRSHPYPRRISPYRPPVLNRDAFSRDAPPMPARNHDHPVFEDIRTILSVLKASGLMPIYEQVSDYEVGPPTKTNEFYSFFVRGVVHALTIFNVYSLFTPISAQLFFSYRETDNVNQWIELLLCILTYTLTVFVCAHNTTSMLRIMNEILQLDEEVRRQFGANLSQNFGFLVKFLVGITACQAYIIVLKIYAVQGEITPTSYILLAFYGIQNGLTATYIVFASALLRIVYIRFHFINQLLNGYTYGQQHRRKEGGARARRQRGDVNPNVNPALMEHFPEDSLFIYRMHNKLLRIYKGINDCCNLILVSFLGYSFYTVTTNCYNLFVQITGKGMVSPNILQWCFAWLCLHVSLLALLSRSCGLTTTEANATSQILARVYAKSKEYQNIVSY

SEQ ID NO: 36604 - DNA, 5674 bp, DROSOPHILA
atcggtggcagtagccaacataatcgccaccataaaccatttttgcaatgcttttttgcttccactacttttttttttgggttgatctggttgctgttcaaacaattgccaagaacaagcaacaaaacacaactaagtagctgctaccaatcgccaaagcaatttgcaataatcaacatttttaacaaaaccgaaaaaaaattactaaaaaagatacaacagaaaaaaatgagacaaaaaagagcaacaaaaaaaaaagttgtaagcagcaagaggcaacaacgccgaaccggcaaacgaacaaaataacagcaaaaaatcgacaaccaacagatcacgataaatcaatggcaacaacaacgcagggagccagctgaatgggcaaagggaaggatggggagcggtacgaggaggcaagttaggcggcaagctgctatatataaatttggtgccgcagcctccgaaagagcgacacgacatgaccaacgaccagcgacgacgacgacgtgcagcacgagttactctgccatagtcgggccatgcccccaaaccacctagccatgtggcatgcaaccagtgatggccaaaaacaaaacagccaaaatggagctggaaaccagaagaaactataatattattgttcattcgttaagaaaaaaaaacaacaaaatatagtttctaaattataaaaactatagtataaaacaacaaatctattataaaaggatgcgtccttatttcaatattataataattcatatattattttattgacattataacataaaaagtgcaactgccagctctgttgcaatgcagcgcacagcgctttcgacgagctgaaatagaagcaggcacttgcagctgccactggctgcggcatggttcggtttaggaggtgaccgctgccgccactgcggatctggccagaaatctatgctgattattttcttttcggccagcattgagttcgtttggctcgtgttgcaaagctctaggaatggctaatggctggctattgcagcaaggggcaaggtggagcattcgactgcgccttgctggtggcatggtagttgcatatgagttatggccatgccagccagattgtagtccacaaatgctcaacattggttaacatgaaatgtttcgtttcgaaccgagagcatctgaaatgaaattgtttgggaaatgttccgtgatcgtcctaacaagattgaaagttactgaaaagaattatgagagatacacaggcatacggttgtaaagaagatacattttagtgaaaaaaaatagttcgattcttgtgtttcttcttaaattctgcaaaaagtaatcacaatggaattgtacatatttaccaccttactttataatttgtatctataagccactctgttcaacaactatataccagttggaattaaaactaagtgtgaactctcccaggcttctcatttggataccagttattggactcctttcgccagggaactccttgcaaaacagttcccatgtcaaatcgcatttgtaatcgcattatgaccagagtcttgccacttctccaaagaattaaactaaatatcaaacttccacaagacgtaaatcgtggtcgcagctggctgaaaaacttggatgcttttttcttcatagcagagaagatctcacggaagccactcattagcatgtcaaataagccaagagaacttggctcggatgctgtgcggaatgacaaataatccaattgtatgcgacaccttttctgtcgttgaatgggaactcgagataattcaatataaatgcaaatttacgagaaatcatggggttaggttatagtaaatatatcatgctgatgtcacactcatccacttatgcaaaacctgctaaatgttctctttaacataactaatccgtatgaatttttggcatttttcttacccttttttttctgacagatctcgcagcgccacgccctcgtcgtcatcgtatcgtggtgccggcggtggtgctggtggtggtgtctcacccagccaccagcagcagcagcaacaacaacaacagtccctgcagcagcaacaacgcctaagtccgcccagtggcccatcgatggcaacagcaaccactacatcatcattatcatcatcatcatctgcatcggcatcggcatcggcatcagcaagtgcagccacacacatgccgctgcacaatttgtcaacgaatttgctaaatagcattcagcaggctgccgccagtcagcagcaactgcgcagcagcaacagcaacagcagcagcaacatcagcggcagcagcaacaacaccaaatcggatggtggtgccgcatcgaatgccacggatttctccacccgcaactattcggatattatgcgatgcctggcggccaagtacaacaatgccaatcccaatgagtaagtttcgagttagccctgaaataactttatattttcctaggccatattcccaccgagaaaaaaatgtgggaatgtcgtgtgagttatacacgtttaaacttaagatcaatatgatatgataaaccatacttcgaaactgagaagaaccttcggaaatgcgtaaaaatattaagatcataatgaaatgcttttttggtaaactattaactaagttgtacaacattttcgttccgtgcagcaataacgcaactcgacgcaattcctactatgacggcagcacttctgcgaccacagccactggaggagccggcggtggaggcggaggagcaggaggatcaaactctgccccaagcagcgccctcaagacggctagcagctccaccggcagcactacgaccactgccaagaagctctctccatcggctgcatcggcggcgaacagtgctgccgtcagtctgtccaaggagtccaaagtgagtgcggtcggtggtgcaggtgtgggtggtgcagtagccagtagtggtggcggtggttcgtccatgtcgcaactggctccaccacccaccgctccatcgcccacggagcaggccaagagccaaatggccgccgtggtggcagcagcaagtgtttcgccgtttatgaccaactttctgcccttctcgtctggcattttcccgccgctgatagacatgagcagcacccaggcactgctgacactggtgagtagcattaacgagtagtagttgttccattggtggtcaacaaaaaatgttaccaaataatgggggttcctctttaatgggatatttagtttgccacctgtaggcagtaccactttattaacagcaaagtatgaaatacatactaccgtacacccacactaagcttcgttaatccaagtaattattttctgttttacttaatcccttctcttttttttttctgtaccatttcattcaacccgatctcctcaggcgcgtgctgtgaaagatgccgaaatccaggagattctgcgcagcaaacagcagcgctccggttcgaatgcctcgtcgccgagtgcgagtgcggcgggcacgccacgttccagttccaccctgaatgcggcactgcatcaggcagcccaatttgtaacacccgctctgatctactcggcccagttgcaacagcaacaacagcagcagcagcagcaacatcaacggcagcagcagcagcaatcgcagcacgcttcgcggcagtctagtccacgttccaccaatgattccacgacggtggcgcccatcggtgacggcggcggtggctcctcgattgcgtcggcggcgccattggatttgagctcccagccgccggccgccaagcgcttcaaggcagagcgtcgtgccagctctacggccaccacagcaacaacagccaccacaggctcatccacgtccacaccatccccgccaccgttggagcagcacgacgatatcaattctggcaacgccaacgcgacactaggcacgagatcgggaacgggaacgggtgagagttctgcagcgggatcgggagcaggagttgccaaggcccgaagacgatgtcaggcgcagagcgaagaggttaactcctggtctgtggacgatgtgtgcggctttgtgggcggaattgatatatgcgccgaatacgttcaggtaggccaacaaaaccgaatcaaacataacattctcccttttagcccatttgtagttgattaagcaagaagtttcgatggagaaaggaagctttctgtatcaactaattgagttttatggcccagctggcaggggtaaataaatcggatcttagaaagtaaactactaaacaatacccgttacaactaaggcattaatcaaggaaattcttaaaaaaaaaactgttaaattttaaagaaaactacttctcaatctttctttgaaactagttgcttcatatccatatgaagtcctctaattggctagtccttgtagattatttggaattcaataattagtttcaaagcccaatgaatctctgtggttgtgaacttcctgtcggtaatctaactggcaagattaactacgtttcgggatttgaactcaccatgaccggcatgaactctctggcggccattaatattgtgccatgcgagattcagcctttacttgacttcaactccagatccccaggtactacgagctgcgttggccaagttcgagagcaaaatgctccacataggcaactcttggccaggtgatctttacgaccagttccggcaagttgaacgacttttgatcgctcggtcagcctgggccggctcttgctattgctattgctgttgctctggatctggctttttcccccggcttttggcgatggcttcgactggcttttgcggtcgacgatcggtcaacgtcaggcatcattaccagacccagttcaggatctgcctgcactctgcggcgactgcacaacgcgttaatggagtgaaaacatggcctaggttcagttcagttcagttcggtacggttcagtacggtatggtgcggttggagttcgcttggatcgaggagagccaacaattaagccggtcggaatggttggaaggacaatgcggcaccaggtgttgacacattttgatgcatattagctggccgagatggggccttcaaagtcgtctaattagctcgccgaaagcggcttagcgtgcattcaaagatgaactaaatctgcttaaaatacaacatatcggtccaaactgatgatgatggaaccagtttggagaggccgtcattttgactcctccccgacgcgcgacgttggcgatagacaaaaaggcaattggcgtaatattcaattgaatttatggccacaacgacactggtcgctggtagttggatgtttggctggtattggtcttggtcttgggctcggtcttggtcgcctgaacaccttttgtggtgctgaagctggagctgctgctgctgctggtgctgctgcagttgcatgaacttgttccgccaggccaggcgatagaaaagaccagcctcgtttctgttaccttttttttattttctttctttcagacttttcagtcttttttgtcgtcgttgtcggtcgttgagatattgtggaggttgtaaatatttagtgcagaggttgactctcgcaggccatggaaatctatatgaagacattgagaactggttcagtgacattgtccgacgacaacaacgttgtcgcatcatgttgcagtc

SEQ ID NO: 36605 - DNA, 1863 bp, DROSOPHILA
atggctaatggctggctattgcagcaaggggcaagatctcgcagcgccacgccctcgtcgtcatcgtatcgtggtgccggcggtggtgctggtggtggtgtctcacccagccaccagcagcagcagcaacaacaacaacagtccctgcagcagcaacaacgcctaagtccgcccagtggcccatcgatggcaacagcaaccactacatcatcattatcatcatcatcatctgcatcggcatcggcatcggcatcagcaagtgcagccacacacatgccgctgcacaatttgtcaacgaatttgctaaatagcattcagcaggctgccgccagtcagcagcaactgcgcagcagcaacagcaacagcagcagcaacatcagcggcagcagcaacaacaccaaatcggatggtggtgccgcatcgaatgccacggatttctccacccgcaactattcggatattatgcgatgcctggcggccaagtacaacaatgccaatcccaatgacaataacgcaactcgacgcaattcctactatgacggcagcacttctgcgaccacagccactggaggagccggcggtggaggcggaggagcaggaggatcaaactctgccccaagcagcgccctcaagacggctagcagctccaccggcagcactacgaccactgccaagaagctctctccatcggctgcatcggcggcgaacagtgctgccgtcagtctgtccaaggagtccaaagtgagtgcggtcggtggtgcaggtgtgggtggtgcagtagccagtagtggtggcggtggttcgtccatgtcgcaactggctccaccacccaccgctccatcgcccacggagcaggccaagagccaaatggccgccgtggtggcagcagcaagtgtttcgccgtttatgaccaactttctgcccttctcgtctggcattttcccgccgctgatagacatgagcagcacccaggcactgctgacactggcgcgtgctgtgaaagatgccgaaatccaggagattctgcgcagcaaacagcagcgctccggttcgaatgcctcgtcgccgagtgcgagtgcggcgggcacgccacgttccagttccaccctgaatgcggcactgcatcaggcagcccaatttgtaacacccgctctgatctactcggcccagttgcaacagcaacaacagcagcagcagcagcaacatcaacggcagcagcagcagcaatcgcagcacgcttcgcggcagtctagtccacgttccaccaatgattccacgacggtggcgcccatcggtgacggcggcggtggctcctcgattgcgtcggcggcgccattggatttgagctcccagccgccggccgccaagcgcttcaaggcagagcgtcgtgccagctctacggccaccacagcaacaacagccaccacaggctcatccacgtccacaccatccccgccaccgttggagcagcacgacgatatcaattctggcaacgccaacgcgacactaggcacgagatcgggaacgggaacgggtgagagttctgcagcgggatcgggagcaggagttgccaaggcccgaagacgatgtcaggcgcagagcgaagaggttaactcctggtctgtggacgatgtgtgcggctttgtgggcggaattgatatatgcgccgaatacgttcagattaactacgtttcgggatttgaactcaccatgaccggcatgaactctctggcggccattaatattgtgccatgcgagattcagcctttacttgacttcaactccagatccccaggtactacgagctgcgttggccaagttcgagagcaaaatgctccacataggcaactcttggccaggtga

SEQ ID NO: 36606 - protein, 620 aa, DROSOPHILA
MANGWLLQQGARSRSATPSSSSYRGAGGGAGGGVSPSHQQQQQQQQQSLQQQQRLSPPSGPSMATATTTSSLSSSSSASASASASASAATHMPLHNLSTNLLNSIQQAAASQQQLRSSNSNSSSNISGSSNNTKSDGGAASNATDFSTRNYSDIMRCLAAKYNNANPNDNNATRRNSYYDGSTSATTATGGAGGGGGGAGGSNSAPSSALKTASSSTGSTTTTAKKLSPSAASAANSAAVSLSKESKVSAVGGAGVGGAVASSGGGGSSMSQLAPPPTAPSPTEQAKSQMAAVVAAASVSPFMTNFLPFSSGIFPPLIDMSSTQALLTLARAVKDAEIQEILRSKQQRSGSNASSPSASAAGTPRSSSTLNAALHQAAQFVTPALIYSAQLQQQQQQQQQQHQRQQQQQSQHASRQSSPRSTNDSTTVAPIGDGGGGSSIASAAPLDLSSQPPAAKRFKAERRASSTATTATTATTGSSTSTPSPPPLEQHDDINSGNANATLGTRSGTGTGESSAAGSGAGVAKARRRCQAQSEEVNSWSVDDVCGFVGGIDICAEYVQINYVSGFELTMTGMNSLAAINIVPCEIQPLLDFNSRSPGTTSCVGQVREQNAPHRQLLAR

SEQ ID NO: 36607 - DNA, 3149 bp, DROSOPHILA
atagtggggatcgtaacgagtttaaaactacaaattgttgttaatttcgcttgtaaatatttcatttaattatttatgctgtgtgcttttggcttccaaacatgcgaccgaatggatctggctccaagtcagggcctaggcgtgagtatggcttggtgtctgggtttgggtctgagtctgagtctgggattggaacaagggactggtgtggcttccatcaatttacacctacgggcagaaagagagagagatagcttcaccacctggtccaacgaacaggtaaaggtcaatgcttgtgcacgcatttgctttttaattttttgccaattgcaagttcaattaaattatttatggacgaagcaatgtaaataatcaactgttgcggatcaaaaaaaaaaaaattgagaataaatacctaggtaaatacacaatttatttgctctgcccgtggaattcaaaaccacaccataaaagttaaatatatatatttttttctttggatatctttattagtggttgtgctattatgtatggtaccctatttgttggaattgttgctaaacgtgattaacgggtatctggtagtcgacctggggtttacttaatatcaaaactagaaactataagaactgatagagaatttttagacacatcagaataatttgcctaccaatggatagatagatgatagatttcacccatttcacccctgatggatccgaattatctactccaactagaattgttgctgacaccttagcttctccatttgactgggggatttgacgcgactgtctgattttgctgctgtttgtttgtttaatgattgccttttccgggccctgtaactgttcgaatcgcactgtgtcgtactgtacgcagcactgaggtgcacttcgcgccccctggctcaccccgataattagcttaggggttcaacgatgcaggtcaatggttttgttaacatattataagttattttaacctttggccgatttgcatgcgacgcaagcctcgagttttttacaccacaatgtatttgactcagtctatgggtgcgtgtcattgcgagtgtatttattgtgtgtgcttattggtttccgtgcacggttacaaattacaagttattccttttcaaaataaataagttaatttacaggttttggtgggtaagaaatatgccagttttagcaagaattgtatttcttaaataccaataacaagcatgtaacttttcaagtaactaaccatacactttttttctccatcaggtaacgcacccaccgacatactgcagcagaagccagccaaggccaccaccgccattgtgggcggtcgcagcgcagcccaaccggcgacccacgacgaccaggaagcggccacgaccgcttccacagccaccaagcggaagcatctcgagcggttggccagcgatctgcggcagctgggcaagaagggcaggaggagtcgatcggttagtccctgtagtagatatcccgccgttgcggaaacggccagaatgcttagcgaacgatcgctgctgctcagcggatatggagccattgagagcagtgccaagaagctgagcgaagcggcgaccggtggtgcgggtggtggtggtggtggtgcggccggtcaggctgccacgcccactaccagccaactaagtgcacccgcctcctcagcatcctcctcatccatgtcgtcctcctctgccggcagcacttgcaccaccaatgcaaatacggcatcggtggcagccgcctatgctgctttctatttggagaaggtcaagcatgagaagatggacaatcataaggatgcaccgatggtcaccatacacaataacaacaacaacaacaccatcaacaacaacaacagcagtagcagcagcagcagcagcatcatcaacaaccatcaatcgagtcaaccaagtctgggccacagcgtcaagagggagcggctgagtccagggagcaatagcagtagccacaacggcgaactcaccgtcagctcatttgccaggtgagtggaagtggaagtggaagttcgggggtacactccggagagacatggctttattgaatcattgattcattgcatcactgattcgtgatatagccgtgacccatgtgatctgttcgaatgattcattagagcagcgctcaaccgatcacataacaaattggtttgtccactcatattgattatagggaaagatttggtaaaagtactttatgctaatttaattgaaaggtagtttcggtagttttaattaaaaattaaaaaaaaatgaaaccaatctctattccggcttgcaattggcttcacactttgggtgattctccgtgtgatcttcatcctccgtatccgccatgttgcattgctcgctatggctgacgtagttgtagtgctcacgccgcaactcgagaaacctcattcttcgccggagtcgctcctccggagtttcctcggtcacgacgagggtctcgctacttggcaacgcaatgacaaccgagggggcacttgaaatatcaggacggggagcgttggggtgtcgcagaatcgagggggatgcactgatggtaggatcggaatactgatctcgaactgctctctggttggcatcgtcgtcactggaatcatcatccaactgttccggtttatctttcttatccttgtcagacatattctagagacttacatggaatcgctattaaaatacgtaaatttctgagccatgttgatttggaaaagtaaagagagatatcatttcccattcgaacttgccactattttggactatttatcaagcgaattcaacgcctgtcgacgcctgacaaattaattaacattttaataaattaatacctcgaagagaaaccaaaccgatgcggcttctgttcgcagccaatggtaaattaatcaaaaccacgaaacaaaaaagcggccaacacgaatgtgtctacacaagagcacgcttttgctgtcaaaaagaggcaataacaaagaacccgccaagaaaagaaaaagaaaaacaacttgaaaaacttgaatttaaaaacaaataagacgaaaaaaaaaaatataataaggcccagacggcgactaaatgtgatttgacaagcgaaatcagcagcaattaatac

SEQ ID NO: 36608 - DNA, 837 bp, DROSOPHILA
atgcgacgcaagcctcgagttttttacaccacaatgtatttgactcagtctatgggtaacgcacccaccgacatactgcagcagaagccagccaaggccaccaccgccattgtgggcggtcgcagcgcagcccaaccggcgacccacgacgaccaggaagcggccacgaccgcttccacagccaccaagcggaagcatctcgagcggttggccagcgatctgcggcagctgggcaagaagggcaggaggagtcgatcggttagtccctgtagtagatatcccgccgttgcggaaacggccagaatgcttagcgaacgatcgctgctgctcagcggatatggagccattgagagcagtgccaagaagctgagcgaagcggcgaccggtggtgcgggtggtggtggtggtggtgcggccggtcaggctgccacgcccactaccagccaactaagtgcacccgcctcctcagcatcctcctcatccatgtcgtcctcctctgccggcagcacttgcaccaccaatgcaaatacggcatcggtggcagccgcctatgctgctttctatttggagaaggtcaagcatgagaagatggacaatcataaggatgcaccgatggtcaccatacacaataacaacaacaacaacaccatcaacaacaacaacagcagtagcagcagcagcagcagcatcatcaacaaccatcaatcgagtcaaccaagtctgggccacagcgtcaagagggagcggctgagtccagggagcaatagcagtagccacaacggcgaactcaccgtcagctcatttgccagccgtgacccatgtgatctgttcgaatga

SEQ ID NO: 36609 - protein, 278 aa, DROSOPHILA
MRRKPRVFYTTMYLTQSMGNAPTDILQQKPAKATTAIVGGRSAAQPATHDDQEAATTASTATKRKHLERLASDLRQLGKKGRRSRSVSPCSRYPAVAETARMLSERSLLLSGYGAIESSAKKLSEAATGGAGGGGGGAAGQAATPTTSQLSAPASSASSSSMSSSSAGSTCTTNANTASVAAAYAAFYLEKVKHEKMDNHKDAPMVTIHNNNNNNTINNNNSSSSSSSSIINNHQSSQPSLGHSVKRERLSPGSNSSSHNGELTVSSFASRDPCDLFE

SEQ ID NO: 36610 - DNA, 2487 bp, DROSOPHILA
ctagctgcacttaatatgaataattcataaggcggaaggaggtaatgtaatataatccaaattgtatactaattagtattatcgtattagtcttattagtatgcacataaagtaaccacaaaaaaatacatcataaatctgattccttcactccgtttgatttttgcaatggatactttattatatgttgtgttgcataccttctgaaaagtgtatcagtgacctttcacctttatagctttgaagatttgattgaataacccgttgtttgatcaatcacttttaccaagttgacaacacgttacgaaacaggccatgaaagttctttaatacgtactcgcatacatcgcatatatgaagggaaccccagcacgtcttttgtcagcttctgataaaatcaattaaagtttggccaacaaggccatgcaccctggccattgtgtggctgccacacgttgcactatcgaccattgtattacggatgcaacgcataagtggatgaccgtatgggtccggttgttgcatcgtttaagctgcagctccatatccgcttttaattgcggaaatgcacttaagccgggctaaggtgaaaaaccgtactcaggacagcaatctgcgtcagcaaggcagaaatgcaggtcacgtttgtggcagcaagtgttttgagtaactgccatttgctttgttggacggccattcaggttgaacggtgtctgaagtgttacaaaataataaatatgcgtataaaggcaattccactgaatcccgggacctttaattaaaaaatgtggctagctgaacttcatggcgaagttttttgcgtgaactcgcctcttgacaacctttgtgcatcgggattagcggggcacaaagtcctggaggtttttctttgaagttttgcaagcatttgcattaattggaatgctacaacagttcataactattgactattaaacaaggctgtttttttttaatactttcagtgcagaagcgtttaaaaatgatgaaattcgtgcagatattattgtgctacggcctactcctcaccctgttctttgccctcagcgaggcccgaccttcgggtgccgaaacaggaccggtgagtaatatccttggagaacgtgatacaaatgtagcttattcgttcgatttaaggactccgatggacttgatggccaggacgcggaggacgtgcgaggcgcctatggaggtggctacgatatgccagcccaggcaatctatcccaatattccaatggatcggctgcagatgctctttgcccaatacagacccacgtaaggcgaaagcactattgaaaccattgtggataatgacaaattgtgattaactttaatagcagttacagcgcctatttgaggagtcccacctacggcaatgtgaatgaactttatcggctgcccgagagcaaacgtcaagttagataccggcagtgctactttaatcccatctcctgctttaggaagtaagttcccggacagtgggaagaatatccggaacccagagctcttggttaaactaacaattcaagcatttcaacaaaccaaaaccaaaaaaataagccacaacacaaagattagcataatggataaacgcaaatgtttagagcaattaaactaaagctaagactcaactatatccatatacatatatatacaacttatcctttgaatgtctacgaaacgtatgaaaaaatgttcgttccattgtagttgccaaaaaaaaaaaataaattatgtacctatttatttgaatattagcacaaaagtttgaaatttaaatatttcgtttcttgatttacgctttgcatatggtgtggtaaaataaaatacaatgcttcaataagctatttatatattaaaactgcattcctcaatgtgtgtgcttttgtaaatttaagtgtcccagctaatgtataatacaagtaattagaacaacaaacaggaatgcaaacttggtgtcatctaatacctcctacacaaaactatacatgtaaaatatctttctaaataaaagttataaatatttacgaataaactaaatgcgaccaaatgttgaaaaaactgacttataattgaaataattgggtaaaaacatttactggataaaagtattacttttattgctgaaagtcaataaaaacactcagttttgttactgaaacattttatttttattaaaaattaatttgaattattatttaaaattattggagcttataatataaatatatatatatttgccaatcactagtttaaaatttgtcatagttaaatttttaaaaaacactcattgtgcctctttttaagtttttgtttaattttgcttagcaggtgatctcagtaaactcaaattatatttttaaatttcacttgactgaatttgatacattggtaaattgcctctgaggctttaattttccatcactgattttcggctttaggatcctttattcgatatcttaaactt

SEQ ID NO: 36611 - DNA, 369 bp, DROSOPHILA
atgatgaaattcgtgcagatattattgtgctacggcctactcctcaccctgttctttgccctcagcgaggcccgaccttcgggtgccgaaacaggaccggactccgatggacttgatggccaggacgcggaggacgtgcgaggcgcctatggaggtggctacgatatgccagcccaggcaatctatcccaatattccaatggatcggctgcagatgctctttgcccaatacagacccaccagttacagcgcctatttgaggagtcccacctacggcaatgtgaatgaactttatcggctgcccgagagcaaacgtcaagttagataccggcagtgctactttaatcccatctcctgctttaggaagtaa

SEQ ID NO: 36612 - protein, 122 aa, DROSOPHILA
MMKFVQILLCYGLLLTLFFALSEARPSGAETGPDSDGLDGQDAEDVRGAYGGGYDMPAQAIYPNIPMDRLQMLFAQYRPTSYSAYLRSPTYGNVNELYRLPESKRQVRYRQCYFNPISCFRK

SEQ ID NO: 36613 - DNA, 3430 bp, DROSOPHILA
aggttagaaatgtttcatggccaatgaactctgattcttatatctcctgctgttttgctggagctaagctttaattcattgttttttttttcacaatgcacgttattacattagggaagacttcaaaaacgtaaggatgtaaaaagaaaatttgtataatattgtaaagaaaaaaagtcatagaaatgtttataaacaatgtggcgtcatcgttaaagtttaccgtgttgaaattttaaagaatactataaaataagttagcggttaattttatatttgtgtaggcagtaatcaagcaagaatccttcgttaaatcaggatgcaccacatcttaagggctggcatgcaaaacacttaagtggcgcccacacagggacgaagtgaaaggacacatgcagcgaggagtcaaccgagttcgtggccattccaatccctccgcccagcatctcattttttgggcttaacgagcaacaagtgggctggcgaattgggccgaaaaaggactttcacatttcgctcattaagccgacctaccgaaaaagcgcaacaggctgcaaccaacacaaacacacacgcacacacacatcatgccacccacttatggccgatatgtgtgcacgtgtgtgtgcgttaataacttggctgcaggcaggacatggattttgatgttcagtaattacagcaagagccgcaaccaaggagcaacaacaaggacgccgagtgggtgccgcaatcgtaaatcaaagtatgaaaaaagcatttcactgttggaccagctccatcccgattaacaagcgtctataatgcttcattactgtaaaaaagcagtagcaggacgaaaaaagtaaatcaaaagaaaaaaaaaaactagtgatttgccaaggaattggctgctataaaagcgtcgaacgcataaagccaacgcttcagttgatttttcaaaagtgttcaacgcaggacaggcttgacattaattagtttcccgcccgtagacacaagaatgcatcaaccacctggtcgccaaactgccaggaggcggagaagttgcacaagtcttgccggcaaggagggcactccgttgtgcagaacctatcacctaccagccatgttgattatcctgctcgtcctcatccagaactttgagctgcacatgtgccggcaattgatggtgtatccgggcgccgacaaacgatcccccgacaagctgctcaccatcggcggcagtgcagccggagaggtgacattgccggaggccaacacaccggcggatgacaagcgagcgggtggatccaggtcggcccccagtcagccggaggagatttttagtgccccagccgacgagggctacgacgagtatccggtaagcaaaatctccgaaaattataaagcgaaaaaaattaagaaggaatcttcgcgtgggtcgcgttggtcactgcctgttttgaatccctatcaacttacacacaatttgtaattgtatatttttcatttgattgcttttcgactatgacccctagctatatttccccttgaaagccgagctgacgtcacatcactttgattatgccaggtgcacactatttggtgttggtgtctaacgagggcagactgtggcgaaagcacttttatccagaaattaaatattccgtgggctcatgtttgggatgcgtgggaagtgggtttaaagacctcgaaaaaagaaaacatttaactaattgaaaattacagtagtacagacagaagtttctaagaaaagctcacttatcaattataagcaagacgcattttccaaatacctaattttctcatttatacacttttagatggtggttcccaagcgtgcagcattacttttggatcgtcttatggttgctttgcatcatgccctcgaacaggaacgaagtgaacaaagaattggcgaattcttcggagatagaaacattttaagtggcaaattcggcgattcgcacaacggaatggagcatcatcaagctagggaggatggtatgtgattgttactacatccatacaaggattagatctaagaaacgtggtttgcttttaggcatgtacagtgacgacgatgcgggaacattgttggattatgatttcaaagatttgaaccagatcaatcgcgccactggcgaaacagtaagttggaacataaaacctaaattgcaatataagacataaaattagcagcgcgatgtgtaagaaaatttcagttaatgccaaagagctttcagagaagagcgggcgcagatcgatctggaacgtccacccattcgggttccccagctggtagccggcgtatccaaccatccggatccggcggtggccgagcgtactggcgttgctatttcaatgccgtcagctgcttttaaacaaaacaaaaaatacagcataaaagtcgtctctggagtggattaaaagccacaaacatttcagaacccaactgatcgtcagagatgtgttttcaaacaaaaaaaaaaccgttttgatattgctgcgctgctgttgtgagagttgttcgcgccattaactgaaatcctcgagttctgtaattgtatctagcgttatctgtatctgtatctgtatctagtatctgtaaatgtatctgtgcatttgtaactcactgtgaatctgcgttataaataaacaaccagcgataagtccaacggcattcataaataaattaattcaaacacccatactcgtacgggagtataaattttgcgggtatatttgagggcaatttcgggtagacaggtaatcctagctataccgcctaatgctgattgacataaccataaatcgcaatcctcagcaaatccatcgcatgcgctcagttcgtgttattttacgatctatattcgggtgcaaattgtgggcgtgctccaagcggaagtattcttcactatcttcaactgatatctgcagctgtatctctataaatgtaaagagcagtatctctataaatgtaaagatctggggttcattgatttacagcctttactgcgtttaaagtttatgtttggcatgcccaccgtgcgtatacgtaatattctcttttatataaatttcttaagtttttattatttattttcaaaatttttttcggtgctcttttgaaaaataatttcaaggtacacaattttgcaatcaacctttccgccttttaaattcaaatcagttgcttgaactttttgccaactatcaaactgaaagtcaatgtatattattatctatgggccaacagtcttcctataaatgaacagttaaactaaaccggctatcgatttaagtgtgcaaagcacgattattgcctagccaccttggctgcgaagttgataggcaaagttttattggccaatagtggccattaatgagtttgttggagcacacattaatagacttttatgtacatcta

SEQ ID NO: 36614 - DNA, 759 bp, DROSOPHILA
atgcatcaaccacctggtcgccaaactgccaggaggcggagaagttgcacaagtcttgccggcaaggagggcactccgttgtgcagaacctatcacctaccagccatgttgattatcctgctcgtcctcatccagaactttgagctgcacatgtgccggcaattgatggtgtatccgggcgccgacaaacgatcccccgacaagctgctcaccatcggcggcagtgcagccggagaggtgacattgccggaggccaacacaccggcggatgacaagcgagcgggtggatccaggtcggcccccagtcagccggaggagatttttagtgccccagccgacgagggctacgacgagtatccgatggtggttcccaagcgtgcagcattacttttggatcgtcttatggttgctttgcatcatgccctcgaacaggaacgaagtgaacaaagaattggcgaattcttcggagatagaaacattttaagtggcaaattcggcgattcgcacaacggaatggagcatcatcaagctagggaggatggcatgtacagtgacgacgatgcgggaacattgttggattatgatttcaaagatttgaaccagatcaatcgcgccactggcgaaacactggtagccggcgtatccaaccatccggatccggcggtggccgagcgtactggcgttgctatttcaatgccgtcagctgcttttaaacaaaacaaaaaatacagcataaaagtcgtctctggagtggattaa

SEQ ID NO: 36615 - protein, 252 aa, DROSOPHILA
MHQPPGRQTARRRRSCTSLAGKEGTPLCRTYHLPAMLIILLVLIQNFELHMCRQLMVYPGADKRSPDKLLTIGGSAAGEVTLPEANTPADDKRAGGSRSAPSQPEEIFSAPADEGYDEYPMVVPKRAALLLDRLMVALHHALEQERSEQRIGEFFGDRNILSGKFGDSHNGMEHHQAREDGMYSDDDAGTLLDYDFKDLNQINRATGETLVAGVSNHPDPAVAERTGVAISMPSAAFKQNKKYSIKVVSGVD

SEQ ID NO: 36616 - DNA, 2843 bp, DROSOPHILA
ttgtaaaagttcaaaacaagctggtttccatagtttagcttttatgattgatacgtatcttatatttgttatttattcatgattggtttgttataatgattcaacaagagattagaatttaatattggatcgtcatgcaattgctgtttttaaaagtatctctatagattcgaaagtcatgggaatagattaaagaaattgtgcggtaatttgttctagcaacttaacaaaacatattttatgtttaaaataattcataaacacaaggtaatctaaatatatgcaggcacatgcactttataggttggcaacataaaaacttttagggtaaacgacaggtacttattccaagtaatccgaatttcaataacatgcaattgcacgtgttcccaaaaaaaaaaatatataatcataaaggcaaatagatggttgtaaaggctcaggcgtcagaggcgtaaaaacccgtagcccgttgccaatcaatgtcgctgggagctgttgttgatggatgactattcctatgcaaatagcaaatggaagttcgtttcgcgtgcaggagccgcgactaattcaatcagaggagcgggagcaggcagcctggagcaatgagctgctccgggactaggccaccgtgtcttgtcttgccgaagaaatgcaaatgcataggaaaagttacaggtggatcggtgggcagggagcttagcgagtcctgggggatccaaacaaccaatcattgtttggtcgatgggaaacgcagtcggtttgtttcggtggttcgaagcccggttaatattcaaattaaatcgagggggaatacgaccaatatgcgctgcaagtgaacagccgacgggtagttggccctgtcgtagttgtcgtcgtagagtccccagttccggccagctcaaaaacataagttccttcctattgtcagtcgcagaccagcagcagaagaaccacggccatagcagcgcaaacgaacagggaagccaagcaactcatcatggtacagatttcgcagacagaggaggacatcaagatctccatcgaactcaatcgtctggtaacccgcaagccggacgttgttctccttccgcagtacttaaagttcaacaatccacccatcttctttgagcgtcatctggcccaggagatcgacgagatggccaggtgagttagtagagtttaataagtataagattatttcagcttcagcgaggtgttgggatgaggattaaagcatttctgtaatttgggacacatatattaatggagtaactatctttacagcttttgtcgcatttttaagaacgaagcccgcattgtgctggttaagaaagagaagggcttatggcctgagatgttccagaagctggacaaggaggcactcatgcagaagcgcctagagatcgccgacctcatcgtggagcgcaacaagaagcgggatgaaaaggcactggaacgttacgataacaagcggcgggcggagatccagaaggagatccagcgggagacagatatgcgcgagcgtgtgaagcagttccaggagaactcggtgcgcgaagctctggtagtggatgtacgcaaggaggcgaaagctacgcccaagccagatacactgcagtatccgccatcgtcgggaggcgccagtcgcctggccacgcccctcatgcgtccgcccatgagctccgttcgtggcagcggacggatcaacgtaaacttcaccacacagcacaagcgggtcacgccgaagcgggagtcgcaggccgctatggagaaggcatatgccgccgccggtggacccaatgcgaatgtccagtcgccgatggagagcgtcgatgaataagcgttacatgtcaattagcgcgtgcgtgcgagactgtgctaatattcctattttattattgcatcaaataaatctacaggtgtttgtttagttgaatcagcactttagatggttttaatttcatggttcgggaaagtaaaactttgcactacagtaagtattattaattaaaatttattaagctatacaaaattattttaaagacgatcctggtctaagtaaaacagaagctgtttcccaaaaatataatggttaataaaatatttacatactttgtacatatggtattaatatattatgctaaatttttgggggtttgtgtgaatttaatgtgctgacaacaaaatgaatttgaatttaaaaatccgataacatatcgctgacactggatttccaacactaagtcggcgctatcgatagcataagacaaacagctggtgcctgtcaacgttgcttgaattttcacaatttttttttgccgctatgacattacaactataaaaagtgctttagattttctaaaaacctcacacaggaaacgcgctgcagtaggagtacccacctgaaaccgatgaccgaggcagctggagcaaccaacccaggaggagccgccggagacgcggaatcgtacggcaaagaaatggctctgcagtccggtaggccgaaagagccaaccaagttggacgacctggtgcaatatgtgagcctccatgttcgcatacccacgccgttgaccggtgttgtgctgccctttgtgccactttacctgtcggcattctacctgtggatcaacgttacgggtggacaggagaatgataccaccaataacgatgtgataactgccgataaccaaacgaccacggataatataacaacttggaatgacgtgggattcatcggcgtactagccattgcctttctgcacattctgacgctgctcttctgctactggagcgttcacgtgctggccttcctcacttgccgtcgtgtaaagctcccc

SEQ ID NO: 36617 - DNA, 723 bp, DROSOPHILA
atggtacagatttcgcagacagaggaggacatcaagatctccatcgaactcaatcgtctggtaacccgcaagccggacgttgttctccttccgcagtacttaaagttcaacaatccacccatcttctttgagcgtcatctggcccaggagatcgacgagatggccagcttttgtcgcatttttaagaacgaagcccgcattgtgctggttaagaaagagaagggcttatggcctgagatgttccagaagctggacaaggaggcactcatgcagaagcgcctagagatcgccgacctcatcgtggagcgcaacaagaagcgggatgaaaaggcactggaacgttacgataacaagcggcgggcggagatccagaaggagatccagcgggagacagatatgcgcgagcgtgtgaagcagttccaggagaactcggtgcgcgaagctctggtagtggatgtacgcaaggaggcgaaagctacgcccaagccagatacactgcagtatccgccatcgtcgggaggcgccagtcgcctggccacgcccctcatgcgtccgcccatgagctccgttcgtggcagcggacggatcaacgtaaacttcaccacacagcacaagcgggtcacgccgaagcgggagtcgcaggccgctatggagaaggcatatgccgccgccggtggacccaatgcgaatgtccagtcgccgatggagagcgtcgatgaataa

SEQ ID NO: 36618 - protein, 240 aa, DROSOPHILA
MVQISQTEEDIKISIELNRLVTRKPDVVLLPQYLKFNNPPIFFERHLAQEIDEMASFCRIFKNEARIVLVKKEKGLWPEMFQKLDKEALMQKRLEIADLIVERNKKRDEKALERYDNKRRAEIQKEIQRETDMRERVKQFQENSVREALVVDVRKEAKATPKPDTLQYPPSSGGASRLATPLMRPPMSSVRGSGRINVNFTTQHKRVTPKRESQAAMEKAYAAAGGPNANVQSPMESVDE

SEQ ID NO: 36619 - DNA, 2555 bp, DROSOPHILA
gttacaagctaattaaccaaaaaatagctaaacaaatgcgagcatttgtttattagatgctcacatgtttattacatagaaaagttaccaggtagtcagccacataaataattctttaaataatgtactttcaataaattaaattatattttctaaataattacttggtaattataccatagccccaagtataaatgtatttaatataccaatcttataatgctctcatcgcttcctatatgactagattcctttgtaatataaatcattatgaggtatctcctttagttagagaccgcactgaacacaaaatcccaaatgaccaatttaccggtattggatatctaaagcctgataccaacctttcgcctattgacccttttttgaatgctttagttctggttctgttttccgtttttcgttacccttaaatgcatttgtgtaataacaatttcactaacatattgccgtgttgggcgttttgcaggaggaacctcttaccagcacagccgccgacaaccgacctcggtacgccaccaggagcgcggcggaggggtgggcgcaggcggcggaggtggaggcgtcggcggtggctacgagcgggaccgcgaacgggagcggtacgagcgggcgcgagcgtgacctcatgcactacgatctcaatagcgacgagctgctggacgagcgcaactttgagtatccggcgatgaggagcggtcccagcggcgcctcccaccacggccatctgtccaggggcggacgcctgctggaggatccggactttgagcgcgaagaggcccagatgcggatgagcagctcacgctacggaccctcgaccaggatcgacgacccacgggatctgccgcgtggcgccaccgttgtcgatcgcgatgaatacagtccgcacagaggtggtgggagtagtaggagaatgcttaatgccatgtaggaatcgtggatataggggtgggatcagatcgatgcgagagtgccaggtttgatggaagcacgcgacaatagttttgatcttgacatgatacaccaccagcctcagtctcaatctcaatctcagtcacaatcacagtccaggtccaggtccagacctttaggtctgccacgccaatcctccctgcccagtaatagagcacccgtgtcgtatttgccacgccagtcctccctgggcacacactggctatcctcctcctcgcagagcaacctggatcaaggaccccaatctcgccgagagctttatccactgctgcatcagccgcagtcctattcccagcctcgatcccagtacaccagccactcgtatacatccgcaccacagcacaccagtcagtcgcgttcccagtcccagtcgcactcccagtcccactctcagtatcgctactccgtgcaggacacatcgtttgcccacccaccaagatccctgcgcgaagagttcctcagtcccaccatgagcaaggtcgaagctgtcacccacgccattcgcaacaagatcatcgtggaggaggacgaagaggatatcctgagcacggatcggttctattaaagagatttcagtcgtccaacccgcgtcgattttggtttgggtaaactcttccttgcgggcgggaaagcaagtgcagcagtgccaaaacacacgacacatttgtaaatgttccattcgatgatcagatcaatttgatagatacagcgacacagatacatccacacacacaaacagaaacacacacacacaaagtagctggttaaagttaaagtgagcgttaaagtggcggttaaagcaaaccaaaggaagcagcccaatgccaagtggggccttatgtgtcttaaatgctatagctaagtgtaatcagattttatttgagtaatgtgaatttaaattaaatggtctaagcctaagatttaagctagtcgacagtgggaaattaaaagttaaaagaaaggagtccgaaaccaaagccaacaggatttgttggtccccaaatgggtctcgtatttgttatgcaatcgattgactaagtacatgaataagtgtcagctttaataatttagtgaacgtgtcttaatctaagtcgagccacacaaacacacctccacacactcgacacacacacacacactcttacactctcaattgactgtgaaccgattgaaatctctttaatctcaaaccgatacctatttctcgcatccagcgcttttccttctctacacagaaaaatttacacttacagtgcgtctcaaagccatatgatcatgagttgaaattaattgatatatccataatgtatttattctataattttgaaagcttaagcttgaagtttttaactgaatatttcttaaatacggccgtacatctaatactatcattttattagttgttaaacatttgtattatatatcttgaatgaaacgcattgtacacaatttcaacttccaacagcaatactttcgacctagataccttgccacaccatatcatgccacacacctgccaaagcgcacagttcgcgatctcagttcaaaactcaagttgaactagc

SEQ ID NO: 36620 - DNA, 555 bp, DROSOPHILA
atggaagcacgcgacaatagttttgatcttgacatgatacaccaccagcctcagtctcaatctcaatctcagtcacaatcacagtccaggtccaggtccagacctttaggtctgccacgccaatcctccctgcccagtaatagagcacccgtgtcgtatttgccacgccagtcctccctgggcacacactggctatcctcctcctcgcagagcaacctggatcaaggaccccaatctcgccgagagctttatccactgctgcatcagccgcagtcctattcccagcctcgatcccagtacaccagccactcgtatacatccgcaccacagcacaccagtcagtcgcgttcccagtcccagtcgcactcccagtcccactctcagtatcgctactccgtgcaggacacatcgtttgcccacccaccaagatccctgcgcgaagagttcctcagtcccaccatgagcaaggtcgaagctgtcacccacgccattcgcaacaagatcatcgtggaggaggacgaagaggatatcctgagcacggatcggttctattaa

SEQ ID NO: 36621 - protein, 184 aa, DROSOPHILA
MEARDNSFDLDMIHHQPQSQSQSQSQSQSRSRSRPLGLPRQSSLPSNRAPVSYLPRQSSLGTHWLSSSSQSNLDQGPQSRRELYPLLHQPQSYSQPRSQYTSHSYTSAPQHTSQSRSQSQSHSQSHSQYRYSVQDTSFAHPPRSLREEFLSPTMSKVEAVTHAIRNKIIVEEDEEDILSTDRFY

SEQ ID NO: 36622 - DNA, 2303 bp, DROSOPHILA
tataatatatactatatatatatgtacatgtattccgttattgtcgaaccttatgttttcaccatttcaagttgcaaaagcaaatcatctaatcgtttagatctggtttagtgagtaccgaaacccccacgatgtgtttgcgttacattattttttgagcgattttacccattccatattagtgttaaagttatactcgtaactgtcccccgaaattatccttgtttccctaaatgtaccatgcataactgacgctaggtttcgatcatctgctgtttttttttcagcgaatatattgtttattactactttgaaggtttaaccaaatgtcttatttattactaacgttttaaagttacaagctaattaaccaaaaaatagctaaacaaatgcgagcatttgtttattagatgctcacatgtttattacatagaaaagttaccaggtagtcagccacataaataattctttaaataatgtactttcaataaattaaattatattttctaaataattacttggtaattataccatagccccaagtataaatgtatttaatataccaatcttataatgctctcatcgcttcctatatgactagattcctttgtaatataaatcattatgaggtatctcctttagttagagaccgcactgaacacaaaatcccaaatgaccaatttaccggtattggatatctaaagcctgataccaacctttcgcctattgacccttttttgaatgctttagttctggttctgttttccgtttttcgttacccttaaatgcatttgtgtaataacaatttcactaacatattgccgtgttgggcgttttgcaggaggaacctcttaccagcacagccgccgacaaccgacctcggtacgccaccaggagcgcggcggaggggtgggcgcaggcggcggaggtggaggcgtcggcggtggctacgagcgggaccgcgaacgggagcggtacgagcgggcgcgagcgtgacctcatgcactacgatctcaatagcgacgagctgctggacgagcgcaactttgagtatccggcgatgaggagcggtcccagcggcgcctcccaccacggccatctgtccaggggcggacgcctgctggaggatccggactttgagcgcgaagaggcccagatgcggatgagcagctcacgctacggaccctcgaccaggatcgacgacccacgggatctgccgcgtggcgccaccgttgtcgatcgcgatgaatacagtccgcacagaggtggtgggagtagtaggagaatgcttaatgccatgtaggaatcgtggatataggggtgggatcagatcgatgcgagagtgccaggtttgatggaagcacgcgacaatagttttgatcttgacatgatacaccaccagcctcagtctcaatctcaatctcagtcacaatcacagtccaggtccaggtccagacctttaggtctgccacgccaatcctccctgcccagtaatagagcacccgtgtcgtatttgccacgccagtcctccctgggcacacactggctatcctcctcctcgcagagcaacctggatcaaggaccccaatctcgccgagagctttatccactgctgcatcagccgcagtcctattcccagcctcgatcccagtacaccagccactcgtatacatccgcaccacagcacaccagtcagtcgcgttcccagtcccagtcgcactcccagtcccactctcagtatcgctactccgtgcaggacacatcgtttgcccacccaccaagatccctgcgcgaagagttcctcagtcccaccatgagcaaggtcgaagctgtcacccacgccattcgcaacaagatcatcgtggaggaggacgaagaggatatcctgagcacggatcggttctattaaagagatttcagtcgtccaacccgcgtcgattttggtttgggtaaactcttccttgcgggcgggaaagcaagtgcagcagtgccaaaacacacgacacatttgtaaatgttccattcgatgatcagatcaatttgatagatacagcgacacagatacatccacacacacaaacagaaacacacacacacaaagtagctggttaaagttaaagtgagcgttaaagtggcggttaaagcaaaccaaaggaagcagcccaatgccaagtggggccttatgtgtcttaaatgctatagctaagtgtaatcagattttatttgagtaatgtgaatttaaattaaatggtctaagcctaagatttaagctagtcgacagtgggaaattaaaagttaaaaga

SEQ ID NO: 36623 - DNA, 303 bp, DROSOPHILA
atgcactacgatctcaatagcgacgagctgctggacgagcgcaactttgagtatccggcgatgaggagcggtcccagcggcgcctcccaccacggccatctgtccaggggcggacgcctgctggaggatccggactttgagcgcgaagaggcccagatgcggatgagcagctcacgctacggaccctcgaccaggatcgacgacccacgggatctgccgcgtggcgccaccgttgtcgatcgcgatgaatacagtccgcacagaggtggtgggagtagtaggagaatgcttaatgccatgtag

SEQ ID NO: 36624 - protein, 100 aa, DROSOPHILA
MHYDLNSDELLDERNFEYPAMRSGPSGASHHGHLSRGGRLLEDPDFEREEAQMRMSSSRYGPSTRIDDPRDLPRGATVVDRDEYSPHRGGGSSRRMLNAM

SEQ ID NO: 36625 - DNA, 3018 bp, DROSOPHILA
tttttaggaagcggataatgccactcgcgtggaggagttagtggatcgatatttcgaagaggccaagtcgaataagcctctcaagttattccactcaaaggctcttgcagagatgacctatcgactgttggagcaaagggatgccgatgcagctgaaaatattgtcaagttagttgcaatcgagtagcaaataactacacgcatcctaaccaacttcctttaggttctacaaggaaaaggcagttgatcacttgatggaagcaatgcccaacgacgagaacatcgatgaggagcttgaaagatttagggcgcttcacaagcatggggatctactgaaaatgcttgacacacagggcttgaaggtgaagaaagaagaaaagtccatgtctgtgttgggtagcgaagtgaacgtctccactgcccccgcgacgggacgaggagctgctaggggtcgtggaactgcacgaactcgtgcaggtgccacagctgccacacgtggaaagggccagctagatgtgacagtcagtagtacggtatgagatgttagcctttagataaatctgaacattttatattatcttctttttgtatccaaaatagcgaacttccggcaggcaacaaacgctccttagtagccttatgggctctcgtaatactgccagctatgttatatcggatgattccgattgatttgaattccggagaccttgtttaccacgaagtttaataaacagcagttttcctttttacaatctctaggagtacatttcgatatcgtttattttttgggcttcattctcagggttcgcgcaactgcataatatgtattttagcctacaacttaggagctacattaaggtgaacggctgctgtcggactccaattggtccgactggatgtttggatagtttctttggtagtctagctgcatcaagactccggcgccgaaaaacggcggagatttctccagacaccgctatcgccactgcgcgcacacgcgttactgctgatggtattcatagtagtagcgatacggatccaccgaggagctgccaccggcggcggtcacgcccacgccaccggcgcctgccgcagcactcgtcttggacaccggccggatcacgtaggtgttgcgtctgcaggggagcacataaaggtaaagtgaatgttaaaccaattctttatggaaatgtaatgttttgcaaaggaaaatatgcaatatttgacggaaatactatcccatatttaaatcctttttgatttaattactggacctgtttacgaagactacagcttaaggcttacctgttatgttcaccggcgtgcacctggaagctggtctcctcgctgtggtcgtgcgagaagagcttcttgagcgcaatgatcccggcaatggtcagggccaccttgctgatgaccagagccttgccggcgatcgcggccagagccttcagacccaatggaccagcgatgcccatggcggtgaggagggcggccaccacgtacttgatgtgacccccctccttgtgtttctttttcttgtggccatgctcgcgacccacactatcctcaccgccgcctacgtccatgtcgattttgagcgtgtgcgtccgcatcagcttgtccgccttggagagaagggctcgatcgatgggtgacaggttgccaaattgacgggcatccgtcagggagcccaatatgctctccgtttcgctctggttttgcttctccagcgccagaccgtccactatcttgattgagtcctggtccagggctcgactaagagcatgaagggctttctgtttcaggcagccaatgaaatcgtttttgtcttggcaatcgtcgtacaccctcctcacgagtgccatctcgggacccaagccccaggctgttccccaatcaccgggactggaggtagttgcggattccaccgcgctgtgtcgccttctccttggagtcactgccgttgagacggaggctaccaacgccagaagcagcagccactcgagacgcttcattgtgaagtccttgctgacaaatgcggttatccagagtcctgaccttgagagctgatcttcgttggctaatatccacgtccacttgccgacaatctgaagatgctactgcagcgaaatcgctgggcgggcagagcttttataaattgcgatcgaagattgcggcgcactcagacggaaagaactggcgtgttcgatgggatgcagacggatctcggttggacctggtggagcagctactgggagggcaattagcactggccatattttgttatgcgttcgaccgactctccttatcgtggtcgtctgtgggcgctgacatgttttcgttacccaaccacggatggatgcctcttgcatcttgttcaggtcccgcgatggagccgtggagctgcggatctatccgccacaaagtagcacttttcgatttctatacgcctgtttgaatgaatgagtacgattgtcaatgcatatcatagaaatacaacaagggaagtggacttcacttaatttaagataatatttaagattattgtttgcatctcaagctacttaaactatatattatataatggtaatttgctagttttggaactagatagcgaatagattcgaattctatgaaatattaatttcaattttaaagaatattatatatcttaacactaagggaactctttttgaaatgcagaatattttaattaaaggaaaactgtgcttaaattttgaatatgcgtcatttataaaacactgaaatcttaaacaatatttatagattgtatgtaagcgaacaagaaatgggaattaaaccagtacactagcactcagctagttctttaattcaaatcaccactgtagcgattactggagcagtagaacaccggaactgcccagatattttgaatacaaaatacacattaatcagttcttagaaaagagagtagaattagtgccaagagtaaatatggttagtaggatcaaaaaaaatcagtagaagatgcca

SEQ ID NO: 36626 - DNA, 849 bp, DROSOPHILA
atgaagcgtctcgagtggctgctgcttctggcgttggtagcctccgtctcaacggcagtgactccaaggagaaggcgacacagcgcggtggaatccgcaactacctccagtcccggtgattggggaacagcctggggcttgggtcccgagatggcactcgtgaggagggtgtacgacgattgccaagacaaaaacgatttcattggctgcctgaaacagaaagcccttcatgctcttagtcgagccctggaccaggactcaatcaagatagtggacggtctggcgctggagaagcaaaaccagagcgaaacggagagcatattgggctccctgacggatgcccgtcaatttggcaacctgtcacccatcgatcgagcccttctctccaaggcggacaagctgatgcggacgcacacgctcaaaatcgacatggacgtaggcggcggtgaggatagtgtgggtcgcgagcatggccacaagaaaaagaaacacaaggaggggggtcacatcaagtacgtggtggccgccctcctcaccgccatgggcatcgctggtccattgggtctgaaggctctggccgcgatcgccggcaaggctctggtcatcagcaaggtggccctgaccattgccgggatcattgcgctcaagaagctcttctcgcacgaccacagcgaggagaccagcttccaggtgcacgccggtgaacataacagacgcaacacctacgtgatccggccggtgtccaagacgagtgctgcggcaggcgccggtggcgtgggcgtgaccgccgccggtggcagctcctcggtggatccgtatcgctactactatgaataccatcagcagtaa

SEQ ID NO: 36627 - protein, 282 aa, DROSOPHILA
MKRLEWLLLLALVASVSTAVTPRRRRHSAVESATTSSPGDWGTAWGLGPEMALVRRVYDDCQDKNDFIGCLKQKALHALSRALDQDSIKIVDGLALEKQNQSETESILGSLTDARQFGNLSPIDRALLSKADKLMRTHTLKIDMDVGGGEDSVGREHGHKKKKHKEGGHIKYVVAALLTAMGIAGPLGLKALAAIAGKALVISKVALTIAGIIALKKLFSHDHSEETSFQVHAGEHNRRNTYVIRPVSKTSAAAGAGGVGVTAAGGSSSVDPYRYYYEYHQQ

SEQ ID NO: 36628 - DNA, 2690 bp, DROSOPHILA
tgattgtcggttgggtctattctctggcctatccgtccaagacgtgactggcattccacccggggatccctccgtccgaaagggtttcatggaggggaacggaaccgaccgtatctggagcacaacgaacggaacggtctcataaccgtagcgattccatatagtttactgaactctcgccgcacagaaacaaatatatataaattagttcttccgaaatgggcgcttgttaaaaacatagtggaaaatcgaggaaaaaaaatgcaacggaatgttcgatgaaaaatgcgttcggtttaccattaatccgctgccctgatccagggcgacagatcattacacacgcgcgggacttccgaaacgggaggagttcctcatttggggacatgcgacaggcgagtggcgatgtttaggggccccccgaaatcgtatgtatatgtaaatttattaataaaaactcccaaaaaaaaaaaacggatgcacattggcccctaaaaatgggagggtgggtgtgcactgctgcagttgttgcctgtccgtaatttatagacccgctgccgaatgacatgctaactaatagtatcatcataatttatacatacaaatacattgcatttgttatttatgcccttgcgccacccctcgcaactaaagccaccccccaccccatcccttacgtgatttccatacacagatccccgatgacagaggtcacagcacccaaaagggcagaaggttagccggcgttaatggcaccgtttgaccctcggccatatttgaatatcgattacaattaaacggtcacaactatagataacgtacacgtgatcgcagattgataaatgtgccaaatatttattatgtgatcaatttattattcttaaacgggaaatttcgagttacttgctttgtgaatatacatttcatgggaagcctattatatttaattttcaagtgccaaatgagattcgtaaagttagttaggaactaatgggctcttctagaaccaactaccacggtgggattgcgaagggttcggatcattgagacctacaaaaaaacgattttaatgcgattcttcattaggtaagtaaaatgccttaccattcgaagagtagcctccagctaacctttgaccaccacgcatggaaccaactcgcattccagcgccaaggccattgctcatgcccatgccggaacccatgcctccatcgaatcccatagactcgggcatggaatggcccattctgttacccatttcaagaccaggctctgagcccatgccctgtaccgaagccgggctaatagaacccaaaacagttttagatcagccttaagatccataaaaaaaaacttacccaacttgagaatgaccgtaactgggcttaaaattcgtgtacatgttcatcatattttggttgtaggaggcgaatggatcacctggagatgcgttattctggtgcgatcccattccactggatccatgcaaatagttttgggtgttcgcttgacttgagtgcagccactgacgaccaccgcctccaggaggagtactaccccttcccatctgaaaccattccatggtttagacccggataccgaagtacgtaggcagactcacctgtgagtagttgggatttccctgaccaccatggctgtactcccaattgaattccggaccgttttccatcgttaaaaaatttaaaaatttcaaaaaaatttcaaatggtttttgaaaaaattttgttggccgatctgttaccttactgaatgccggactaaaaatgaggatttctaattcgagccaactgaagtacacattaatgtgttttccatgcttacttgatttgaaaacttctaacttgttttagtcatgtacaatctatacgtttataatcttctataacaggaaaacaaacaaaataaatcatttcgttgtcgcatcatgaatatcattagcaaaaaccagtctgtgttctatactcgctcttaacggaatatttgagatcatgctgagattttgaaatgttatctctgatcttctcatataatcttagacataataaaattcaaattttgtgcaaacacagtcataataaacatttttaatcatcatctcgagattattagcctattaatggcagttaagaacagccattcaaacttattgaattaatcatttcagtgtctgggtggctgatttatggaattaatgtccagatgctggtgataaataaataaatgtttaagcaaatgtagcgcaataaatactgattattgttttattctaaaaatgtaatatattcagacggtgtgcttggtgaaagttgtaagaaatataaaccagttggataggaaactactaaataaattttgtccgaaaaggactttagcactacaaactaaaacccatgttgggccacacttcggtagataagaaaccttgttatccttagcgacttccacctgtacacaccgcatgccgcacagctgtatctttttccctgcctctgacaaaccagtttcctatcgatgcaagttttatttatgtttcttgccgatctgcagaacaaaggccaaagactgacctacaaaggagcagcagacaatggcagatgacctcataaattgcatcgttatgaggttcataaataaattattgcttcatattcataatgcacttgaggcca

SEQ ID NO: 36629 - DNA, 525 bp, DROSOPHILA
atggaaaacggtccggaattcaattgggagtacagccatggtggtcagggaaatcccaactactcacagatgggaaggggtagtactcctcctggaggcggtggtcgtcagtggctgcactcaagtcaagcgaacacccaaaactatttgcatggatccagtggaatgggatcgcaccagaataacgcatctccaggtgatccattcgcctcctacaaccaaaatatgatgaacatgtacacgaattttaagcccagttacggtcattctcaagttggcccggcttcggtacagggcatgggctcagagcctggtcttgaaatgggtaacagaatgggccattccatgcccgagtctatgggattcgatggaggcatgggttccggcatgggcatgagcaatggccttggcgctggaatgcgagttggttccatgcgtggtggtcaaaggttagctggaggctactcttcgaatggtctcaatgatccgaacccttcgcaatcccaccgtggtagttggttctag

SEQ ID NO: 36630 - protein, 174 aa, DROSOPHILA
MENGPEFNWEYSHGGQGNPNYSQMGRGSTPPGGGGRQWLHSSQANTQNYLHGSSGMGSHQNNASPGDPFASYNQNMMNMYTNFKPSYGHSQVGPASVQGMGSEPGLEMGNRMGHSMPESMGFDGGMGSGMGMSNGLGAGMRVGSMRGGQRLAGGYSSNGLNDPNPSQSHRGSWF

SEQ ID NO: 36631 - DNA, 4014 bp, DROSOPHILA
gatcgatatgtgctcgccatatatgagatatatgtacatataaacggggtgcatatgatttttggccaaccggtttggttgtcaaagaaagagccaagattgcgagtccaagagaccctattaggaccgacttgcagaccaatgttcccggcttttgggcggcaattgtgcaaccgaaaaggaaagttgaaagggctccagggcgcgggaggtggggcgggaaatgcgatgacttttccagcgagcgcggcgcaatttacttttacttgggtaacccatttcgcttttgattgctctttgcatttcacttcgccggctgccagtggccggtgttgtccagttgcaagttgtccgccgccagctgccggttgttggtcagccattcgagtggtgcggtgcgttgtggtgcggggggtggagggtacggcagggtgatgtggctacgacggcggttagtctggcgtggtggtatccatgcagtaagaaaaacttgttggtatcagatattgatcaaagaaaaagaagtctttaaattatactattataacttctcttttatttacaaatatatatatgtaattttaagccataatatactcctatataatttaattaaattttaaaagaaagtgttaaaactttgtctctgtgcaatgattgctgaaattgcggccattctctctggcgttgcttttttgaaggtgggatgcaaatgcacatcgatcatctttatgacttgtgattgtccagttggctttgcgtgaaagtaaaatttgattttctaccggctctggccattcgttttagccgagtgagagccgcccggccaattcagtctgtcctctggtccaggtgcattgagcccacttgcctgcacaatatatgctgctacaaaaactgaagttttagcgtcacgccatttgcttatcagccagcgattgtggtttcaattaagatttcctctgctcagctggagctgctgagtacttccattagctggatgggtcatttggccaatcaatccgtatgggataaaaagcctttcgaaaaccaggaaatgtgtaaagtaacaaacagtttatatacaagaagtgaaacgtacatgcattttcattcgaagtaaaagattagtttaataaaacattttattatggaaagtttaaaatgggacaataaaccaattgactatatttcccatatattttcttgcagatcgaggttatcgggtatttgctgatcctaatgacgattgctctaccactttcttccgccggatttggcttcgactcggccaactcgtgcagtcccaatgggaagatatcgcgacgtggtagggcccagatcctggctgcgattccctgcgacctgggtcagcaggcgttctgccacctgccaggatccgcttatccatggcacgctgtacgacgattcgtgcacgagaaccagggtctgatgaagcgcatgtacggcgatgtaaggcacatttccatcctgcgggatgagatccagaacaacgaggtggatgcggacgacattgaggagacggcggagcgatatagcaaggatggcggacggcggagtgccaagtatctgatgaacaacagagatcgcgatcgtgagcgtgaagatttcggaagcttcaagagcaacgatgtgctaatggagccgcactttcgacctgtctccacgattaccacaagtacgactaaggctacgacgactacaaccactgctccggaaatagttagtagcaccacggaacgagttccaaatgaggttaccgacacaacgcctggaaataccaatagtacgataagtactactaaaggaactgcgccacctttacacgaaaaacccgaatcggaaacagacattgtggagatccagcccagtccagaatcgaacagcgtctacgaagtggtgtccccttccgttctttcaaccacgtccactgccaaaccttcgtccgcagctggtgaaaatatacagatcattgactcaccacagttggggcttcgtaatctaagcgcagaggcaagtccatcacaagaaccacccacagccacaactgggaagcccacatctgtgcccaagagcacgacacctttacccatcaggaaaaggaaaccggcagagacgaccaccagtgcagccagtccaaaagtctcgagtaccatttcgacaccaaccacaacaacagcaactttgctgatacgtcgcaatgtaaccaagtactcacccgcatccgtgaccacgcccgtcagcttcgcctcgctcttctccggcacctccagcgggctttttagtccggagaggttgcgcagacccttgaccacgacgagcagtacaagtgctccagcttcatcccctccggcgggtggaactccagcgagcagctctaccggaagcgccagcaagtctggactgctaagggagggtcagctgtttcaggatgccatgaagcaagagcccgtagctgtggccagcaacttgcgtggagtgtaagtatatgacccatttgcttatcaaattatataatacaatattgatctctctgcagaaatgcctgtcccgtgaaggatgaagtggtggctcccttttgggcaaacaatacccgcggcgaggtcttagccctcctcaatctctatcccttcgagcagtacgtccactgggagaagtgcacccacgagttcaagcaaatgttctgccgcgatggatgcagatgtgaacagcagtaccgcctccacagattgttggcctacgatccgcataacgagtgccgcgggatattctccgactggttccgattcccgtccagctgcatatgcaagtgctacaatataccaatggagttccgcgcaacatcacgtagtccacggtccgacagtcgcttcgatgctccaaaatccgatcccatcgaggctgccgaggcggaggtccaacgggccatttacgaacatgccacggaagagtggtatcgcccacgtgatgagttcgatttcttggaggactaatcccattagattccctcctgtgaacaattgtacagtagtattaggttttatagaattaagctataatttccaattagtccttacaatacacatttaagaaacttcaaccgatcaagttaataactttcgatcattcttcgatcatatttcacacagaccttcaatctcactttaaacctataagtaatcaataattataaattaaatcataaaagcggcgttatgttaatgtaaatatagtccaacataatgcccgatttacggaaaaactgcagagcgaatgtaccttgaaatacttacgaacgcattgcggccattgagctgcgtacgatggtatttactagagttatgtatttatttattcaaatgatagctataaggataaccataaacgtggccataacataaaccccaaatcttttgatggacccctaaacgaaagcataggcgttctggaaaaatatttattgcaaaaatgtagtctgtatatttagaatgcttatgtataaaatagattttattgtatttaatacgttgatatattactgttgtttactctttatgtacacaagtgtacgatgataaattagatttataaattgtatttattttgtagaaaaggttttctgtttttttttttaagcaatttgaaggcatttaaggcacttcatttcagtttaaccatttaccacttaaggctagtgatagcattttgtctatcacacatttaaataaaatttctagtgttgcttagctagtcgcgtttttaatttcgtagtcgggcaaaggcagttgccagaattagataagttttaagtaaagcttgattttgaagcggttcacgaaggtaattggatagtcgaaactatttaatatacacagttgaaaagttgaaggctttaaagccacgctctattgccatcgagtttatcgaatcgtttgggtaaataataaaaaaatataagatgcctttacttacaattacataataataaattgc

SEQ ID NO: 36632 - DNA, 1767 bp, DROSOPHILA
atgggtcatttggccaatcaatccatcgaggttatcgggtatttgctgatcctaatgacgattgctctaccactttcttccgccggatttggcttcgactcggccaactcgtgcagtcccaatgggaagatatcgcgacgtggtagggcccagatcctggctgcgattccctgcgacctgggtcagcaggcgttctgccacctgccaggatccgcttatccatggcacgctgtacgacgattcgtgcacgagaaccagggtctgatgaagcgcatgtacggcgatgtaaggcacatttccatcctgcgggatgagatccagaacaacgaggtggatgcggacgacattgaggagacggcggagcgatatagcaaggatggcggacggcggagtgccaagtatctgatgaacaacagagatcgcgatcgtgagcgtgaagatttcggaagcttcaagagcaacgatgtgctaatggagccgcactttcgacctgtctccacgattaccacaagtacgactaaggctacgacgactacaaccactgctccggaaatagttagtagcaccacggaacgagttccaaatgaggttaccgacacaacgcctggaaataccaatagtacgataagtactactaaaggaactgcgccacctttacacgaaaaacccgaatcggaaacagacattgtggagatccagcccagtccagaatcgaacagcgtctacgaagtggtgtccccttccgttctttcaaccacgtccactgccaaaccttcgtccgcagctggtgaaaatatacagatcattgactcaccacagttggggcttcgtaatctaagcgcagaggcaagtccatcacaagaaccacccacagccacaactgggaagcccacatctgtgcccaagagcacgacacctttacccatcaggaaaaggaaaccggcagagacgaccaccagtgcagccagtccaaaagtctcgagtaccatttcgacaccaaccacaacaacagcaactttgctgatacgtcgcaatgtaaccaagtactcacccgcatccgtgaccacgcccgtcagcttcgcctcgctcttctccggcacctccagcgggctttttagtccggagaggttgcgcagacccttgaccacgacgagcagtacaagtgctccagcttcatcccctccggcgggtggaactccagcgagcagctctaccggaagcgccagcaagtctggactgctaagggagggtcagctgtttcaggatgccatgaagcaagagcccgtagctgtggccagcaacttgcgtggagtaaatgcctgtcccgtgaaggatgaagtggtggctcccttttgggcaaacaatacccgcggcgaggtcttagccctcctcaatctctatcccttcgagcagtacgtccactgggagaagtgcacccacgagttcaagcaaatgttctgccgcgatggatgcagatgtgaacagcagtaccgcctccacagattgttggcctacgatccgcataacgagtgccgcgggatattctccgactggttccgattcccgtccagctgcatatgcaagtgctacaatataccaatggagttccgcgcaacatcacgtagtccacggtccgacagtcgcttcgatgctccaaaatccgatcccatcgaggctgccgaggcggaggtccaacgggccatttacgaacatgccacggaagagtggtatcgcccacgtgatgagttcgatttcttggaggactaa

SEQ ID NO: 36633 - protein, 588 aa, DROSOPHILA
MGHLANQSIEVIGYLLILMTIALPLSSAGFGFDSANSCSPNGKISRRGRAQILAAIPCDLGQQAFCHLPGSAYPWHAVRRFVHENQGLMKRMYGDVRHISILRDEIQNNEVDADDIEETAERYSKDGGRRSAKYLMNNRDRDREREDFGSFKSNDVLMEPHFRPVSTITTSTTKATTTTTTAPEIVSSTTERVPNEVTDTTPGNTNSTISTTKGTAPPLHEKPESETDIVEIQPSPESNSVYEVVSPSVLSTTSTAKPSSAAGENIQIIDSPQLGLRNLSAEASPSQEPPTATTGKPTSVPKSTTPLPIRKRKPAETTTSAASPKVSSTISTPTTTTATLLIRRNVTKYSPASVTTPVSFASLFSGTSSGLFSPERLRRPLTTTSSTSAPASSPPAGGTPASSSTGSASKSGLLREGQLFQDAMKQEPVAVASNLRGVNACPVKDEVVAPFWANNTRGEVLALLNLYPFEQYVHWEKCTHEFKQMFCRDGCRCEQQYRLHRLLAYDPHNECRGIFSDWFRFPSSCICKCYNIPMEFRATSRSPRSDSRFDAPKSDPIEAAEAEVQRAIYEHATEEWYRPRDEFDFLED

SEQ ID NO: 36634 - DNA, 2390 bp, DROSOPHILA
cttcgctttgtgagtcttcaaaatcggattaaaaattaaacaaaaacacttttattgtttaattaggtaacggaaaccgctcttaaacaaatgagagcaaaacgcgatgcgttgtctgcgacacgactgattttgatcataaggcagcatgacaattcctacattaaaaaggtcgaaattacaaaataaaaataagttggctgactaaaaaaaagggtttacccacagaaagtcgatgagattgaggcgatttctggggaagtcaaattggaaacctatctgtccgcggataacgacgttcagcagatggttaccactctaaacagtgagttaaataaaacgtaacaagtatctatctattttaattttatttacagataaaaacgctgaactggaacgcatgtgtacgctggtgaaaaccaaaatccataccatttcccatctgcgatgtcgacggaagctgctgaatcgcaagttcagggaggccaaagatgagttacgagaaaggcaaaaacggcaaatagcattgcgcgatgaagtatataattgtaatctaacacacaataaacttcttgaccagatcaaagaagtccgtcgtgagggtggcattatgtgctatcccaagttgttggccgattttgatcggaccgagaagtttattgccatcaaacaggcgagtattgtggaactaaagacacaacatgacaatttgctgaagagaatcgaaaagatcgaactaaagattctggaatctaataagagtgaaatcatgtctaagtcggattaagtatgtatgtaagatgcaggggtcttggccaaaaaataaatcaaacaaatcttaaataaatattatatttacgttttaaatttgttaggtaacaaataagcgatgaaataacccagataagtcaaatcagacgtgtcaaaattgaacaataaaaattaaagtttttaatttattggggcatttcaaaattctattgaaaatcatatcaaatcgatggctttcttcctcatccgcttggccctggtggccggtgcggtgtatggaacccaagagctggggatttgggaaagttccgaccacacaaaggtgctcttcgaaggcgccaaacgggaggtgagtccctacgccgaggacctgatgaaccgattctgctgctggcggtgcgacaagtgcaaggaggatgtacaggttaagccctggcaggaatccatggtggatgcttggaacgagacgatcaaaaagacattccacgccttgggcgttcaagttcccttctactacaaacggttctcggaagacttccagcagggcatcgatgacttggtcaacgagaaggaggaaattgataccaatgcaaaaaaaggccccaaaaagataaaataaccaagtcacaccttcaaatattttggtaattaacattaaaaatattcacaaactcgtcgataaattgacagttgccaatgtaataaaagtattataattttaaagatttcgattatttcatagttgcatgcgtggtttctttgtgaccgagggagatcctcctgctgcgtcagccatcgagctataggatctattgatgtacatcctaggagtagaatgacttcttattgcgctaccacgagcatccttgcgaactctatcgggtaaaatcgttggcaaggtaaaattgtcgaaaagattcgccttggtgccaatgggaggagcaagggagtgtgaagccttaagacccgggcttgaagatccagtagtcagcatcgaattggagccagagtttagaccaggagtagaagctgttaccggtgttaggggtggcacgggcttgggattcggtggctgagtctcagggaccttgtccttcaattcggccattgtacccatctgacactgccgccaggtgggcagcatcagtccacggctcacagtcggcgagggcagagatgcctggctgggaataagggacttcaccggcgtatggatcgctctcttgctcagctcctctgtccgctccaggttggccatcttcaagtcctcgatactcactttggtgcgattgaccaactttgcgaaacgttgagcctcgacgagtttgtcccttgccaaagctatgccaagacattctcacattaaatgtttctatatatctactctccggatatcaactcactataagccagatccaagatgaccccacgagcctgcggctccacctccaattgcaggtccttcagcataccatctacgaactccagatcagagcggatgtctaagtcgcgctcgcttagcttgtattctggttttttgttcattttacaaatgtaattgattgacaggcagaacgttcccaatttgctactgacaacttgtcgatgaacaaattgca

SEQ ID NO: 36635 - DNA, 390 bp, DROSOPHILA
atggctttcttcctcatccgcttggccctggtggccggtgcggtgtatggaacccaagagctggggatttgggaaagttccgaccacacaaaggtgctcttcgaaggcgccaaacgggaggtgagtccctacgccgaggacctgatgaaccgattctgctgctggcggtgcgacaagtgcaaggaggatgtacaggttaagccctggcaggaatccatggtggatgcttggaacgagacgatcaaaaagacattccacgccttgggcgttcaagttcccttctactacaaacggttctcggaagacttccagcagggcatcgatgacttggtcaacgagaaggaggaaattgataccaatgcaaaaaaaggccccaaaaagataaaataa

SEQ ID NO: 36636 - protein, 129 aa, DROSOPHILA
MAFFLIRLALVAGAVYGTQELGIWESSDHTKVLFEGAKREVSPYAEDLMNRFCCWRCDKCKEDVQVKPWQESMVDAWNETIKKTFHALGVQVPFYYKRFSEDFQQGIDDLVNEKEEIDTNAKKGPKKIK

SEQ ID NO: 36637 - DNA, 2809 bp, DROSOPHILA
gcaaaaacggcaaatagcattgcgcgatgaagtatataattgtaatctaacacacaataaacttcttgaccagatcaaagaagtccgtcgtgagggtggcattatgtgctatcccaagttgttggccgattttgatcggaccgagaagtttattgccatcaaacaggcgagtattgtggaactaaagacacaacatgacaatttgctgaagagaatcgaaaagatcgaactaaagattctggaatctaataagagtgaaatcatgtctaagtcggattaagtatgtatgtaagatgcaggggtcttggccaaaaaataaatcaaacaaatcttaaataaatattatatttacgttttaaatttgttaggtaacaaataagcgatgaaataacccagataagtcaaatcagacgtgtcaaaattgaacaataaaaattaaagtttttaatttattggggcatttcaaaattctattgaaaatcatatcaaatcgatggctttcttcctcatccgcttggccctggtggccggtgcggtgtatggaacccaagagctggggatttgggaaagttccgaccacacaaaggtgctcttcgaaggcgccaaacgggaggtgagtccctacgccgaggacctgatgaaccgattctgctgctggcggtgcgacaagtgcaaggaggatgtacaggttaagccctggcaggaatccatggtggatgcttggaacgagacgatcaaaaagacattccacgccttgggcgttcaagttcccttctactacaaacggttctcggaagacttccagcagggcatcgatgacttggtcaacgagaaggaggaaattgataccaatgcaaaaaaaggccccaaaaagataaaataaccaagtcacaccttcaaatattttggtaattaacattaaaaatattcacaaactcgtcgataaattgacagttgccaatgtaataaaagtattataattttaaagatttcgattatttcatagttgcatgcgtggtttctttgtgaccgagggagatcctcctgctgcgtcagccatcgagctataggatctattgatgtacatcctaggagtagaatgacttcttattgcgctaccacgagcatccttgcgaactctatcgggtaaaatcgttggcaaggtaaaattgtcgaaaagattcgccttggtgccaatgggaggagcaagggagtgtgaagccttaagacccgggcttgaagatccagtagtcagcatcgaattggagccagagtttagaccaggagtagaagctgttaccggtgttaggggtggcacgggcttgggattcggtggctgagtctcagggaccttgtccttcaattcggccattgtacccatctgacactgccgccaggtgggcagcatcagtccacggctcacagtcggcgagggcagagatgcctggctgggaataagggacttcaccggcgtatggatcgctctcttgctcagctcctctgtccgctccaggttggccatcttcaagtcctcgatactcactttggtgcgattgaccaactttgcgaaacgttgagcctcgacgagtttgtcccttgccaaagctatgccaagacattctcacattaaatgtttctatatatctactctccggatatcaactcactataagccagatccaagatgaccccacgagcctgcggctccacctccaattgcaggtccttcagcataccatctacgaactccagatcagagcggatgtctaagtcgcgctcgcttagcttgtattctggttttttgttcattttacaaatgtaattgattgacaggcagaacgttcccaatttgctactgacaacttgtcgatgaacaaattgcaggctaaagcgcagcaactctataaattgtcataatttttatcgaactctgtgcggtaatcttttaattcattatacatgttgttcagcaaatatatttttaaacaaataccaattttggaagatatttttttttttagaattctaaacttaataataagttggtcttttttttgccatatgccgtctttgaaaaactcaatcataggatctttttctttctttgaactgcgattatttaaatttaaatgccatccaaccgttaaaatttgcatatatatcttattttattatttcattttttattttattgtgatatttacttcaagtttgttattttaagaaacagtgctttgaatacacgttttcttaaatggtcgaaatatttctaacccatttttcattttcaataatttcaatttcaatcaattttgctacagctcaatataagtttggtttatttaaacacagttttttacaataaagtcgagtatacatatagaaaactcaagataaggataagataagtatatccatggatgggatagtgtgggctggtggcggcactgcacataaaatcattggtgcagttataactgacccggtaattgcggttggagttcgatctggaggtagtccatccttggtattggttgtgatatagagagctggaaatttgttttctgggaggcttgtatgccggcggtctttcgcgaatgttcgtgggtgctccacccacggtatcatgagctgagtaagccggcggaggtcctttgggcaaattgtgtcccaagtcgaacgtgggaagcgaaaaggttttcgacaaagatgaataggatggaggagagtaggagtgtcttgacccagaaccgtaagtggacccataattggatccataactagatccataactggatctaggactgga

SEQ ID NO: 36638 - DNA, 747 bp, DROSOPHILA
atgaacaaaaaaccagaatacaagctaagcgagcgcgacttagacatccgctctgatctggagttcgtagatggtatgctgaaggacctgcaattggaggtggagccgcaggctcgtggggtcatcttggatctggcttatactttggcaagggacaaactcgtcgaggctcaacgtttcgcaaagttggtcaatcgcaccaaagtgagtatcgaggacttgaagatggccaacctggagcggacagaggagctgagcaagagagcgatccatacgccggtgaagtcccttattcccagccaggcatctctgccctcgccgactgtgagccgtggactgatgctgcccacctggcggcagtgtcagatgggtacaatggccgaattgaaggacaaggtccctgagactcagccaccgaatcccaagcccgtgccacccctaacaccggtaacagcttctactcctggtctaaactctggctccaattcgatgctgactactggatcttcaagcccgggtcttaaggcttcacactcccttgctcctcccattggcaccaaggcgaatcttttcgacaattttaccttgccaacgattttacccgatagagttcgcaaggatgctcgtggtagcgcaataagaagtcattctactcctaggatgtacatcaatagatcctatagctcgatggctgacgcagcaggaggatctccctcggtcacaaagaaaccacgcatgcaactatga

SEQ ID NO: 36639 - protein, 248 aa, DROSOPHILA
MNKKPEYKLSERDLDIRSDLEFVDGMLKDLQLEVEPQARGVILDLAYTLARDKLVEAQRFAKLVNRTKVSIEDLKMANLERTEELSKRAIHTPVKSLIPSQASLPSPTVSRGLMLPTWRQCQMGTMAELKDKVPETQPPNPKPVPPLTPVTASTPGLNSGSNSMLTTGSSSPGLKASHSLAPPIGTKANLFDNFTLPTILPDRVRKDARGSAIRSHSTPRMYINRSYSSMADAAGGSPSVTKKPRMQL

SEQ ID NO: 36640 - DNA, 4611 bp, DROSOPHILA
taattttatggccagacaggcggggcaaaatctcggccaggcattgttctaaccataaatatccatataatctggcctgcccaaaacggttatcagaagacaatgcactgagtcccgggtctggtaataagcgtttaatgcaataaaagactttcggggcttatttataaaccaactgattgtcggtaattgttaataatttcaaattattaatgcgctcagcgctcaacgcccactccagataatgccgcgaatgccagtagataacaaccgaaacgatctcgatagacatggtagcctgtggtgcgtaatctaatctattttgaccaggttctgttccaaattgttggtttccacttagctgattgattgcgacattggcaggcactgcattcaagtggaccgaccataaacaatgtgcgtcagttggatcaacaaatttgagtccacctgtcaggcggcggacccattaaagccctgctaaacagctcattatccaaactgattagcaaagtgtggcaaaaaatgctataaaagatacaatgttccattacatactcttcaaagatttataaattttctttttgcaagaaaaatcatttctttctatttttaacaaacagtttcattgaatattattagaaacatttaatgatatgaatgaatttcagttctgtacaaggttcctatcattttgacaccgttataaactaatttattaagaaattgccctcttatcattgttggaatttttggtgcctattattacgattgatcacatgccttggcaataaaaatgtctaataaagcttaaaaagtcaatttttatgtgcacctgattgctttgtcataaaataaaaatattacaatatgcaccaataaagaacatgaataaacaacacttaaaaaatcgtcacagccaaattaattacacctttagcataccaattttgaactatatatatatttttttttgcagttatagacactcgatttgaacatgggtgacatgttccgcagcgagaagatggccctgtgccagctgttcatccagccggaggcagcctacgcctccattgccgagctgggcgaaaaaggatgtgtccagtttcgcgatctgaacgaggaggtcagtgctttccagcgaaagtacgtcaacgaggtcaggagatgtgatgacatggagcgccgcctccggtacgtggagtccgagatgaagaaggacgaggtaaagctgccagtcctgcgaccggaggaggagcccattgctcccaatccccgcgagatcgtagaccttgaggctcagctggagaagaccgacaatgaactgcgcgaaatgtccgccaatggagcgagtttggatgccaacttccggcacatgcaagaactcaaatacgtgctagagaacaccgagggcttcttctccgatcaggaagtcattaatctggacgtcaaccgaaaactggaccccgaggatccggccaatttgccaggagccgcccagcggggtcaactggcctttgttgctggtgtcatcaagctggagcgattcttcagctttgagcgcatgctgtggcgcatttccagaggaaatatcttcctgcggagagccgacattgatgggctcgtcgccgatgaggaaactggaaggcctgtactaaagaccgtcttcgtggccttcttccagggagagcagctgaagcaaagaatcaagaaagtctgcacgggctatcatgccgccgtctatccctgtcccagttcgcatgccgagcgaaaagagatgatcaaggatgtgaatgtccgtctggaggacctcaagttggtcctcagccagagcgccgatcatcgcagccgggttttgaactcagcctctaagcatttgccacgctggtcgattatggtgcgcaaaatgaaggctatctatcacattctgaacttcttcaatcccgatgtgacgggcaagtgtctgattggcgagggttgggtgcccaccaacgatatatccacggttcaggatgcactagctcgagcctcgaagatctcggaaagttccataccggcattcatgaatgtcatcgagacgaacgaaatgccgccgacttacacgagaaccaataaattcaccaatggcttccagaacctggttgactcgtatggaatggcctcatatagagaagtgaatccggctctttacgcctgcatcacattcccctttctgttcgccgtgatgttcggtgacttgggacacggactgatcctgctgctcttcgcctcctggctaatcatcaaggaaaagcaattgtcttcgatcaaggaggagatcttcaacatattcttcggcggccgatacatcatcttcctcatgggaattttctccatttacaccggattcatttacaacgatgtgttctcaaagtccatgaatatattcggctccgcttggcacatgaactatacaagggacgtggttgaggatgaaaaccttaaatatatcaccctcaggccgaacgatactgtttacaagacatatcccttcggcatggatcccatttggcaactggccgacaacaagatcatctttctaaacacctttaagatgaagctgtcgatcattgtgggtgtgatccacatgatcttcggcgtctccatgtcggtggttaactttgcctactacaagaagtacgcaagtattttcctagagttcctgcctcaagtcctgttccttctcctgttgttcggttacatggtcttcatgatgttcttcaagtgggtcgtttacaacgacaccgttgaaggaccactttcaccggcttgtgctccttctatcctgatcctgttcatcaacatgatactgcagggcagccaggacactcctgagccctgcaaggagttcatgttcgacggtcagaagagcatccaacaggtctttgtcgtcgttgccatcatttgcattccttggatgcttttgggcaagcctctgtacatcatgatcaaacgcaagacgaacggagctcccccaccaaaaccacaaagcggtggaggggagggtcatggagaggacgatgagatgggcgagatcttcatccatcaggccatccacaccatcgaatatgtcctgagtacggtctcccacacggcctcatacctccgattgtgggccttatccctggctcacgcacgtaagttacactttttattaaatttttaaacgtattgttgtattgatttccttttatataattattattcattttcaataatatattatgtttcatgtttacagagctctccgaagtactgtggaacatggtgttttccatgggattcaagtacgacagctatattggcggcattctcatctacgtattctttggagcctgggcgttgctcacagtcggtatcctggtgctcatcgaaggactctcggccttcttgcacacactgcgtttgcactggtgagttgcgaataatgaggacacaattcagatgcattttaacctgcgatttgctctttcagggttgagttcatgagcaagttctacgagggcgctggttacgcctttgagccttttgcctttaagaccattttggatgtcagcgaggatgactaaggagcgcggcacgagaggtcaaaggagaacgacagggcgcaggacgcacttccttaaagcaattttccgtttattccgttttatctttcgttttttcacggaaaaataaatttcgtttgatatgcatacagaactcgggtgtctccctatgtatgtatgtctggctcatttctgggttttgtcagccgacgacaaatgtttgtcatatgctttttgacagttttgctttgggcacgcaagtgacaactgcaaagcacactctagaaaacacatcttgtgtgtaaacacacacacacccacattcccaaacggactgactgcacattttcgaaacaatctcaaagcaaattgcttgatatccgcaaaagaaagtttgctctactgtgtgtgagtgtccgattttttctcattagaaaagttgtcatatgctgaaattatgttgtcagttcgactgtccattgggcattgagttgcgaaattgaacactgagcaatttaaataataatagtatgacatatcgcatcaacgaaagagaaggcccggattatagcgcagttgtttctgtcattcggtgcatgtgaaatgagcaaaattgatttattttaccaagtaagtcagtggatcaataacgacagataaaaaaaacgtaggttacgaagtttttttccacttaaactaaaaactatatatacaatatattattttcaagcaagttaaatctaattccatgaaaatatatacaacttggcaatcaaatttaaacctttcatggattccatgccaacgatttcgctataaaaaaaaaattgttaaatggcgcgaaattcttttcaatttcaattttgagcgacaaccctcgattctctgggttcctggaaccttttcgccggtgttgtttttgcttcagagctgccctctgcgcgttaccaaatatttgcattcgaactcaattggctgcgttttgtgtttattgcctattgcttgctggcaaaatcgaacg

SEQ ID NO: 36641 - DNA, 2445 bp, DROSOPHILA
atgggtgacatgttccgcagcgagaagatggccctgtgccagctgttcatccagccggaggcagcctacgcctccattgccgagctgggcgaaaaaggatgtgtccagtttcgcgatctgaacgaggaggtcagtgctttccagcgaaagtacgtcaacgaggtcaggagatgtgatgacatggagcgccgcctccggtacgtggagtccgagatgaagaaggacgaggtaaagctgccagtcctgcgaccggaggaggagcccattgctcccaatccccgcgagatcgtagaccttgaggctcagctggagaagaccgacaatgaactgcgcgaaatgtccgccaatggagcgagtttggatgccaacttccggcacatgcaagaactcaaatacgtgctagagaacaccgagggcttcttctccgatcaggaagtcattaatctggacgtcaaccgaaaactggaccccgaggatccggccaatttgccaggagccgcccagcggggtcaactggcctttgttgctggtgtcatcaagctggagcgattcttcagctttgagcgcatgctgtggcgcatttccagaggaaatatcttcctgcggagagccgacattgatgggctcgtcgccgatgaggaaactggaaggcctgtactaaagaccgtcttcgtggccttcttccagggagagcagctgaagcaaagaatcaagaaagtctgcacgggctatcatgccgccgtctatccctgtcccagttcgcatgccgagcgaaaagagatgatcaaggatgtgaatgtccgtctggaggacctcaagttggtcctcagccagagcgccgatcatcgcagccgggttttgaactcagcctctaagcatttgccacgctggtcgattatggtgcgcaaaatgaaggctatctatcacattctgaacttcttcaatcccgatgtgacgggcaagtgtctgattggcgagggttgggtgcccaccaacgatatatccacggttcaggatgcactagctcgagcctcgaagatctcggaaagttccataccggcattcatgaatgtcatcgagacgaacgaaatgccgccgacttacacgagaaccaataaattcaccaatggcttccagaacctggttgactcgtatggaatggcctcatatagagaagtgaatccggctctttacgcctgcatcacattcccctttctgttcgccgtgatgttcggtgacttgggacacggactgatcctgctgctcttcgcctcctggctaatcatcaaggaaaagcaattgtcttcgatcaaggaggagatcttcaacatattcttcggcggccgatacatcatcttcctcatgggaattttctccatttacaccggattcatttacaacgatgtgttctcaaagtccatgaatatattcggctccgcttggcacatgaactatacaagggacgtggttgaggatgaaaaccttaaatatatcaccctcaggccgaacgatactgtttacaagacatatcccttcggcatggatcccatttggcaactggccgacaacaagatcatctttctaaacacctttaagatgaagctgtcgatcattgtgggtgtgatccacatgatcttcggcgtctccatgtcggtggttaactttgcctactacaagaagtacgcaagtattttcctagagttcctgcctcaagtcctgttccttctcctgttgttcggttacatggtcttcatgatgttcttcaagtgggtcgtttacaacgacaccgttgaaggaccactttcaccggcttgtgctccttctatcctgatcctgttcatcaacatgatactgcagggcagccaggacactcctgagccctgcaaggagttcatgttcgacggtcagaagagcatccaacaggtctttgtcgtcgttgccatcatttgcattccttggatgcttttgggcaagcctctgtacatcatgatcaaacgcaagacgaacggagctcccccaccaaaaccacaaagcggtggaggggagggtcatggagaggacgatgagatgggcgagatcttcatccatcaggccatccacaccatcgaatatgtcctgagtacggtctcccacacggcctcatacctccgattgtgggccttatccctggctcacgcacagctctccgaagtactgtggaacatggtgttttccatgggattcaagtacgacagctatattggcggcattctcatctacgtattctttggagcctgggcgttgctcacagtcggtatcctggtgctcatcgaaggactctcggccttcttgcacacactgcgtttgcactgggttgagttcatgagcaagttctacgagggcgctggttacgcctttgagccttttgcctttaagaccattttggatgtcagcgaggatgactaa

SEQ ID NO: 36642 - protein, 814 aa, DROSOPHILA
MGDMFRSEKMALCQLFIQPEAAYASIAELGEKGCVQFRDLNEEVSAFQRKYVNEVRRCDDMERRLRYVESEMKKDEVKLPVLRPEEEPIAPNPREIVDLEAQLEKTDNELREMSANGASLDANFRHMQELKYVLENTEGFFSDQEVINLDVNRKLDPEDPANLPGAAQRGQLAFVAGVIKLERFFSFERMLWRISRGNIFLRRADIDGLVADEETGRPVLKTVFVAFFQGEQLKQRIKKVCTGYHAAVYPCPSSHAERKEMIKDVNVRLEDLKLVLSQSADHRSRVLNSASKHLPRWSIMVRKMKAIYHILNFFNPDVTGKCLIGEGWVPTNDISTVQDALARASKISESSIPAFMNVIETNEMPPTYTRTNKFTNGFQNLVDSYGMASYREVNPALYACITFPFLFAVMFGDLGHGLILLLFASWLIIKEKQLSSIKEEIFNIFFGGRYIIFLMGIFSIYTGFIYNDVFSKSMNIFGSAWHMNYTRDVVEDENLKYITLRPNDTVYKTYPFGMDPIWQLADNKIIFLNTFKMKLSIIVGVIHMIFGVSMSVVNFAYYKKYASIFLEFLPQVLFLLLLFGYMVFMMFFKWVVYNDTVEGPLSPACAPSILILFINMILQGSQDTPEPCKEFMFDGQKSIQQVFVVVAIICIPWMLLGKPLYIMIKRKTNGAPPPKPQSGGGEGHGEDDEMGEIFIHQAIHTIEYVLSTVSHTASYLRLWALSLAHAQLSEVLWNMVFSMGFKYDSYIGGILIYVFFGAWALLTVGILVLIEGLSAFLHTLRLHWVEFMSKFYEGAGYAFEPFAFKTILDVSEDD

SEQ ID NO: 36643 - DNA, 2656 bp, DROSOPHILA
tgatctcaaaatattcagggtattatgactttccatggggacaaagtcgagctgaaaactgccccacagaaagaacaattttcgggtcgaaaaggcgctccatggcagcgaaaatggcaaactgacttcaagtggcattttgacattttgttgaatttcaactcgcttttcgttttgggatgcaacgatggggtccgaggtatgtatgtaaaaagtgaaaggggcgtgttcagggggccagaaaactcgcaggtggctgggcatgcaaacgaaatgcaaagagacgcatatttttttacttaaattagaaaaacaattgccagcgttgtgggtagtgaaagctgcaactttggtcagcaggttgaccacacaaaaagttcgcaaagtatttacttttttcacgatgcatttcaacttcgcagagctggtgttaaaacttcgccattttggagcccagctttttacccataaattgttttttaagtgtaataccaaacgaagtttaaaggctttttgttgaggtaattaaaagactggacttaaattacgaggaaaacatatacaattttatcaagttacattatagaacttaatcacttatatcactttataataaccacaacattttcagagccttatcgtttttttttttttttaaatagtttttaatattttcacatacaactcgaaaacttgttgcaccatctctaagtgtgaccattacttgagatcacatcttaactatcgatatggcgttatagacgatttcagtttggcgaaaagttccgttagcagcaagaacaagagcaaatgcattgtaaccacataatattagtactaaagttgttgtttttgtcccattgaaaatggagttacgcagccgaacaaacaggagattagttgacttcctcaaaagtaagatattctaaattagacgtccttaacatacatacatatataactaactatttgctcaggcgcaggcgtttacgaggaaggcatggatattgaggaaatgaccgaattagcaagtgtcgtgcagcaatcagctagtatcagtccccaggatgaggatctagaaagggctctgcacgtgggaaaagtattcagttaacaataaacaataaatagtaattagcttctcattaatgtcgacaggagagcgagtctgattttttgacttcgcatcccagtgctttgcacaactccacgatgatcatgtcgccgcaagtgtccagaagaaatccctcagacatggacagtccaccgagcgagccgatccgtataacttttcgggctttggtgcaccgtgccatggactggagtcccaccacgggcaatcaaattcccgatcgcaagcgcattgctgcggatcgcaatcaaaacgtcgaactagttggcaaacgttccagagcaacgccggctatcagcattggccaggcaccggaggatgagccgcacaatgccgacgccacacccgtttccccgggcaacgaatgcgactccggcgtcagctgggaggagatatctttgtccagcgccagcgatagcaccactcttccttccatcggcgaaatgcccgatcgacatttaatcagcaccagcagcgtcgccgtctcggatttctcagatgccaatgaaatcagccaggaataggctatttccgcccatgtcttgtggtttatgtttcccaatcgaatgcagtagagattttacaatgtttatagcccacatatgtctaagaaagagtactcgaataagttaactatatgtcacattaaaggattgaatttattgcataattgtggcttgtgtttttggtcgagctgtatttattccaattccagtttccttaactatttagtcataagcatgtcaagttcaataaaaacgaacacccaatatataaaaacatttccaaaggtggaattaaattgtgatggcttgactttacataaatatgtataattacatttgtatttggaagtttgtaaattaagcctgttgtacaacactggtacgtctttttataggaatttaaactttttatgtttaactgccattttaaggctaaacttaaccaaaattttaaggctcaaatttaccaaaacctttagtataaatttctatttttactaaatgttaagaacacgtgacttgagctttaactgaattttatatattaattacatatgctccagtaagttttcaacagtattttgatcaacactgatgttcttattaaacattccttggagtggacacactggccgcacggcttttcacattgtcattttccaggagctaggcgttgaaaatttgttaaaaatgtaattaaaattaaagcagttcattaaatatattgatggattattcattgcaggtcccaatcaaaggttcctcatattgtgggcgatgatgatgaatatcaagaagctacgtaagacttcattaatttagcttcagaaaaacactgacaatatatgtatttcctttctagtgctcccgaaagtgacgagattacctgcgagtcttctgtgtaagtctttttaatataatgttttgatagattatttttaagttgccttataatcagggaaagtgatcaagatgatgactgttccaacgaagatgagtgagtaaatttaatgttata

SEQ ID NO: 36644 - DNA, 591 bp, DROSOPHILA
atggatattgaggaaatgaccgaattagcaagtgtcgtgcagcaatcagctagtatcagtccccaggatgaggatctagaaagggctctgcacgagagcgagtctgattttttgacttcgcatcccagtgctttgcacaactccacgatgatcatgtcgccgcaagtgtccagaagaaatccctcagacatggacagtccaccgagcgagccgatccgtataacttttcgggctttggtgcaccgtgccatggactggagtcccaccacgggcaatcaaattcccgatcgcaagcgcattgctgcggatcgcaatcaaaacgtcgaactagttggcaaacgttccagagcaacgccggctatcagcattggccaggcaccggaggatgagccgcacaatgccgacgccacacccgtttccccgggcaacgaatgcgactccggcgtcagctgggaggagatatctttgtccagcgccagcgatagcaccactcttccttccatcggcgaaatgcccgatcgacatttaatcagcaccagcagcgtcgccgtctcggatttctcagatgccaatgaaatcagccaggaatag

SEQ ID NO: 36645 - protein, 196 aa, DROSOPHILA
MDIEEMTELASVVQQSASISPQDEDLERALHESESDFLTSHPSALHNSTMIMSPQVSRRNPSDMDSPPSEPIRITFRALVHRAMDWSPTTGNQIPDRKRIAADRNQNVELVGKRSRATPAISIGQAPEDEPHNADATPVSPGNECDSGVSWEEISLSSASDSTTLPSIGEMPDRHLISTSSVAVSDFSDANEISQE

SEQ ID NO: 36646 - DNA, 2566 bp, DROSOPHILA
cgaatgcagtagagattttacaatgtttatagcccacatatgtctaagaaagagtactcgaataagttaactatatgtcacattaaaggattgaatttattgcataattgtggcttgtgtttttggtcgagctgtatttattccaattccagtttccttaactatttagtcataagcatgtcaagttcaataaaaacgaacacccaatatataaaaacatttccaaaggtggaattaaattgtgatggcttgactttacataaatatgtataattacatttgtatttggaagtttgtaaattaagcctgttgtacaacactggtacgtctttttataggaatttaaactttttatgtttaactgccattttaaggctaaacttaaccaaaattttaaggctcaaatttaccaaaacctttagtataaatttctatttttactaaatgttaagaacacgtgacttgagctttaactgaattttatatattaattacatatgctccagtaagttttcaacagtattttgatcaacactgatgttcttattaaacattccttggagtggacacactggccgcacggcttttcacattgtcattttccaggagctaggcgttgaaaatttgttaaaaatgtaattaaaattaaagcagttcattaaatatattgatggattattcattgcaggtcccaatcaaaggttcctcatattgtgggcgatgatgatgaatatcaagaagctacgtaagacttcattaatttagcttcagaaaaacactgacaatatatgtatttcctttctagtgctcccgaaagtgacgagattacctgcgagtcttctgtgtaagtctttttaatataatgttttgatagattatttttaagttgccttataatcagggaaagtgatcaagatgatgactgttccaacgaagatgagtgagtaaatttaatgttataaaacaaaatcatttttcttcattttgtgaaccttttagtatggatttggatggggcagactggtccccatatgtcacttatgaggcgggtacaccgtaagttatagtttcgtaatgtagaacgtggaataacgggttcggattctctacagaagacgtccccacagtgctttggagattaccgaaattaccgagtttccgaaaattccaaagaaaaaccccacctcacccgaactggtgatacagaagccagagactccggatcaaaacgactcgggatctcaggagcgtctcaccttctctcgcgccaataatgcgctatcagagtccattggagctcgcgtttcccaacgtagcaggggcaacttggaaccattcatccgtagaatggcacgtagccctacgcccgaggcctcagaggaaaacggctcggtatcacaaggtcagctgctggccaagcccgtggatgtcaccgagttctttcaccgcattgctgtgggtctcgtcgagcagcgcgtctgcttgaagcctttcttggcattgcgcaaacatattgctcaactggtgggtcagactttgaagaaatccaagaggatgcgccgttaatccatttaacatccaatgttacaacatccatgtaataagtatcctataatatccaataaataatatattgcgttcaccgattggatatgaagttaactcaaattcgtaaatttaattaaattaatataaaatataaaagtaaaattaagcacaatattagtatccacacggttcgtcgtccatttcggtgcaattgcagtagttaatatcgggaacgttgtcggataccagatcatcctcggcaattgttacacagcgcacgttacacggatatttctggggaatggactgatttaggtgctatcgatggatagtaaatggataaacccaccaccacgaccaagggatgtccatcatcgtccgtgagtcccacattatcgcagccatcgccctcgttctgccggtgaactatgaacttggtcatacaacaaagcacgatctaaaaagatgattgacttagggaggtcttatcttaaaatacaattttgttgcatattcaaattttttgatttcaatatgacttacgctaatgaatttgacagaatttaatgaatatggctccaatattcaccattgttctgactttaaaacgttgcccattaccaattacttaccagaaacttaagggccaggacccataacgccatcaggatgtaaaagcagttccacaccgcactaacgaacgcaggcaagcatccgttcgcattgattgagtccacggtgagagcgggaaaaggctgccggctattgccaccgatggactgcccctcactgggcaggaaattgttaaagcagctgtcgcaggagcgcttgcagcaggcgaagggtgccaggaccatcgacgtgcagttattctcccgccgtggcatccactccgcgttcatccagtccttgtagccatgcaccccgcagcactccttgtgccactgcagtccgtcccacaggagtttccactcgggacacgagtagtacatgtcgatgccgcgggtcagcgaggtgt

SEQ ID NO: 36647 - DNA, 510 bp, DROSOPHILA
atggatttggatggggcagactggtccccatatgtcacttatgaggcgggtacaccaagacgtccccacagtgctttggagattaccgaaattaccgagtttccgaaaattccaaagaaaaaccccacctcacccgaactggtgatacagaagccagagactccggatcaaaacgactcgggatctcaggagcgtctcaccttctctcgcgccaataatgcgctatcagagtccattggagctcgcgtttcccaacgtagcaggggcaacttggaaccattcatccgtagaatggcacgtagccctacgcccgaggcctcagaggaaaacggctcggtatcacaaggtcagctgctggccaagcccgtggatgtcaccgagttctttcaccgcattgctgtgggtctcgtcgagcagcgcgtctgcttgaagcctttcttggcattgcgcaaacatattgctcaactggtgggtcagactttgaagaaatccaagaggatgcgccgttaa

SEQ ID NO: 36648 - protein, 169 aa, DROSOPHILA
MDLDGADWSPYVTYEAGTPRRPHSALEITEITEFPKIPKKNPTSPELVIQKPETPDQNDSGSQERLTFSRANNALSESIGARVSQRSRGNLEPFIRRMARSPTPEASEENGSVSQGQLLAKPVDVTEFFHRIAVGLVEQRVCLKPFLALRKHIAQLVGQTLKKSKRMRR

SEQ ID NO: 36649 - DNA, 2618 bp, DROSOPHILA
ggaggcacagggccactaaaatgcttaggaatttcattgttaccgggttaatccacttgctagactgattccatactggagttgcacacattttttcattcaatagagctttggctggttttcgatttggccacttatcttatcagcactcgtggtgctttggagtgagtagtgttttggttttttgtactattgtacattgtgattggctagccgttgaaatacgagctattccagttcctagagattgctatgcttagcatatgcattgcaaattatttgaataatttatggactccggcactttcagcttaattacttatttagcttatcgcagaaccaaacacgcaattgtttatagtcaaacaaaaagctcacaccgaaaagctataccatactcactctattactcagtatatttaagagcttttcccccatttctctctgccttcttatcagcgatcaggtagtgtcgcgggaatttcccaatctacacaaaatttacatgcactttgctacgttttttaggaggcacggtaattaatgtaacgccagcctttttgtgagccaatttacacgacactagctattcaatttcaattgccattcaatttcaattagcttagctgcctgggcggccctggggaaattcgtctaagttatatccagttgtggagtcactgccgctatgagaggtttacttatgattctgatgctcttcatcttcgccattctgacggttcgcgctctaaactgccagccgtgtaagttactggaagcccggaaggcacatgcaaatgaaacgaatacccggcagatgtgagaaaaagtgaggagtgttgggcgtgttttggaggtcgggagaggagtgcgaagtaatcagcagcttgtttgactaattagcaaaacttacgcacacacaaaggccccgacaacttttattcacagtctcgacaaacaactcagattcgaaactcagtcttaattgaatgctcggcagcgcaacgacgacgtgttccgcacagaaacccccattcattccacacatccacacgtatagaaaacatgaagtatctgactttgctgctcgttttgggccttttgatcgccctctttgccggatcgtcggagggcagctattgtccttgcgatctgaagaccaagggcactcaggtctgcggctcaaatggtgtcaccttcaaaaatcgctgcgagttcgagtgcagccaaagggattataagaaacttggacggaccctgaacatcaggaaggatggaccttgcaacgagacaaactgaaatattattcaaccttcgatcccaactggagtcaaatacctaaacactgtagtgatgagtgctgtgagatagtttttgagatgatataatatgaataactatcaaaagcttaatactcttattaaaacactctgaaatgctttctctcgtttatctgtaatgtatattataaccaagatactctaaacaaataaagccttgtgtatgttaattaaagtgaaattcagtcttggtagaacattcggtggaatacgactgcgagcatcggataatttttcattttctgaggaaaaatgaagttcttggctatgatggctcttttgggcctattggctatattctttgtgtcttcatcggaggctagttattgcccctgtaatcttcgaaaggcagaggtctgtggaaccaatggtgtgacctatcagaatcgatgtgtttttgagtgcactcagcgggaatatagaaagctcggaagaattttgaacatcaaaaaaatgggatcttgtcaagctaatcgtttctcttgattacgcaattacttcataattcaattaaaaaaaaaacacaaataataataaagaataaccaattatatcatcagcacgacgagctcttttttcttttttgttaaaaccaacgatttcaagtgtacagctgaatacgaataagctgtggtgtgagtactccgagtattcatatgttcccataatgtccaatcactttaatggtatacatagatgtcattctgaagttttaatttctaagaatctactgaattttagtttgtgtttaaattccctaaaaaaattaattgtttatcacgtgatcttgtttacactgtaagtgtattacttacgtctaagttaaagtgagcttgcatttctgttttataatctgtttctcgacgaggcgcatcggtgtgtactatatgcaaatagcttcattcaatgctaattaaaatcgccgtcgagtgcgtcatcacctcgttaatcaactggtgactttgggtcgcagctcgttttcgttgtcacttttggtggaagattaaggcgcagaggctttcggcaccgattaaacactcgcctcacgcacatcaatcaaatttatgcataattaatcgttcctcagtagcgattcgatattctggaggatggctgatggttgggatttgatttattaactctgcacagtggcttgactaattgaatcccaatacgtgcctacgcgcaacatccaaattggatgcaaacaaaccaactggctaataccgaaggcgtagtactaacaagaccgaatagcaagtctaataaaggtaatgg

SEQ ID NO: 36650 - DNA, 618 bp, DROSOPHILA
cgcaacgacgacgtgttccgcacagaaacccccattcattccacacatccacacgtatagaaaacatgaagtatctgactttgctgctcgttttgggccttttgatcgccctctttgccggatcgtcggagggcagctattgtccttgcgatctgaagaccaagggcactcaggtctgcggctcaaatggtgtcaccttcaaaaatcgctgcgagttcgagtgcagccaaagggattataagaaacttggacggaccctgaacatcaggaaggatggaccttgcaacgagacaaactgaaatattattcaaccttcgatcccaactggagtcaaatacctaaacactgtagtgatgagtgctgtgagatagtttttgagatgatataatatgaataactatcaaaagcttaatactcttattaaaacactctgaaatgctttctctcgtttatctgtaatgtatattataaccaagatactctaaacaaataaagccttgtgtatgttaattaaagtgaaattcagtcttggtagaacattcggtggaatacgactgcgagcatcggataatttttcattttctgaggaaaaatgaagttcttggctatgatggctct

SEQ ID NO: 36651 - protein, 77 aa, DROSOPHILA
MKYLTLLLVLGLLIALFAGSSEGSYCPCDLKTKGTQVCGSNGVTFKNRCEFECSQRDYKKLGRTLNIRKDGPCNETN

SEQ ID NO: 36652 - DNA, 3885 bp, DROSOPHILA
caccaaaacatttcgctttaactttccactttccccgcctctttggcatttctccagaggtgcggcctcgaaattacagcgaattttcttcgctttgattttggttggaaaaggaatctcaatgcgaacagccacgcccccttgtcaaacccttttcatgtcgccgtgaaaagcaagaaaattatgccgactcgactcgcttacacgtgaagatttttgcacatatttgtgcaacaattttcaatatacataaacttctaagcaagctgtttgctcaaaggtagaaaggaacgcaatagcagctccttgtttctcctgtcccgactccagtaaaatgtttaattaagctgccagattcagcccacaataagtctgggggagattgggtgaaattccatttggtcgacctggtcacgcaacggaagttcgcggttggaaatcttaattggcgtatatttaatggctgctttgtgaagtgggtaaaaatctgttatttaaaatggagtgggttataaattaaaacaatagtttagaaatttgtgaaacgttcagtttatgtttggtgagatattacatgaatatattacatttcatcaagaattgcggttaagaacaaatgtttattctgttttatagtgtaagtcgtaaagaaaattgccatgtagctgtttcaacaatactacaagtcatctttaagcaataactatgtatcgatttagttccgtccttcctgcccgccagttttacatgttcattgttttaatggaaaatttcccactgtttggtcaactggccgttgtaaaagccggctcgaataaaaaaactttaaatgcttaattccatttaaacaattttcaaagtgattcaacaattgctcaaatatttaagcgatcaaatcgccaagtcaaataaacaaaaccggaattgaaaagccggcagcagtataaaaagccggcaaaagtttgatgataatagaaaacaagttcgttcgttgaccacgatggttgtagtgaaaatagctttcattttgagtgtgggcctagtaggcatattggcccataagcaccagtcaaaggagctggatgcgaaatataattggtggcagcacgaggtcttctatcagatctatccgagatcctttcaggacagcaatggtgatggtattggtgatcttcaaggtattacttctaggctacagtacttcaaggatacgggcatcacgtccgtatggttgagtcccatttatgagtcaccaatggtagactttggatacgatatatctaactatacaaatatacagccggaatatggcacccttgaggactttgacgccttgatagccaaggccaatgaactgggcgtgaaagttattttggactttgttcccaatcacagctcaaataagcatccctggttcataaagtcagtagcccgagagccagggtacgaggatttctatgtgtgggaggatggtattctcctggagaacggaactcgtgtgccgcccaacaattggctgtcggtgttctccggatccgcttggatgtggaacgatgagaggcagcagtactatctcaggcagttcacttatggacaacccgatttgaactaccgaaatcccgccgtgattaaggccatggatgatgtgatgctcttctggctaaacaagggtattgccggcttccgcatcgatgccattatatatatttacgaggatgctcaactgagggatgagcctccgagtggcactaccgatgatccaaataatgaggcctacttgagccacatctataccagaaatcagcctgaggattacggtctacttcagcattggcggcaacttctggataattatacagctaaccacgatgggccattgaggataatgatgaccgagggttatgcttcggtgtcgcaactaatggaatactatgaagattcgaatggtgtacagggcccccagtttcccttcaactttgacttcatcaccgaactgaatgccaattcgacagctgcggactttgtcttctatatctccaggtggctcatctatatgccacatggtcatgtggccaactgggtgatgggaaatcacgacaatcctcgagtggcatcacgattcggtgagaaatctgtggacgccatgaatatgctgctgatgacattgccaggaattggtattacttataatgtgggtacagaacactcattattaaaggataattttatacagactttccattactttagggcgaggagttgggcatgactgactacagggacatcagctggagcgatacggtggatcagcccgcttgtgaggctggaatcgacaactacaagacgatttctagagatcctgagcgaactcccatgcaatggagtagtgatgtgaatgcaggattctcctccgccgatcgcacttggttgcctgtcaatccgaattataaggaacttaatcttcggaatcagcagcaggcgaggcgaagtcattacaagatctatcagtcccttctgaagctcagacaactgccagttctgaagaacggatcctttgttccagaagtggttaatcgcagggtcttcgctttcaagcggtaagtagggaatggatattggcgttgtattgacattttaatgtattttgacctttattctatattatcagagaactgaagaacgagcacactctgctgaccattgtgaacgtgagcaaccgcactgaactggttgacatcgcggactttatagaacagcccaatcgattgagtgtccttgtggcgggagtggactcgcaacaccgggtgggggatcgacttaaggccgagacaattgaattggcgcccaacgagggattagttattcagctgaataagcgaaagtaagcggcgaactacttggaattccacattaaagtacgaggaaactttccatttgccaaccagccgtgcttttctattttcgtatttaaatgtatctcacaggggccatctaatcgagtttccatttcatttgacagcggaacacatttccatttacattagcgcattgcaaacattttaattgaattgagagcacttggtgtcggaccttctacttctcactttggggcactttccctgtactgtttggcctcgactttaattccaagtcgtaattcataattgtcgtcaggttttttggcccttttcgggggctcaggccgcttgacaaatggttgccgaatttaattaaattcccacttagcggtggttgacgaccttaaaatttgctttgattttaattctcactgcaattgtatgctataaactagttgattggtaggtgttctcaaagcaaaggcattattcaaaatttatgacaatgttctgatgttatctcgtatttggttcgtttttgcgttgtttctgtgattacacttgacaatgtgaaattttaatttctcatcaattcactattttacagtacagtgaaagaaaatttgcatactacataccacaatacaggcaaagaagaaacaaagtttaaataaataattgcctactctctaaggcttcaatggaattaatttataaacaaaaaatatattttatttaaaacttatatatattaataaaattacttaaaactctcgagatttttatttgccacctgaaagttctgtacattgtgatcttctccaatcgtctgtggatccaaagctctcgaacagctgttggcatccaattccccaaaagctttgagttgatcgccgccggcagatgctaaaaacgcatcgagaattataattgtgttcagtttattttaatttccttgaggtgagcatagtgattttggtcggcgaagtgtctataaaaagcacctagttttccaccgattggcttg

SEQ ID NO: 36653 - DNA, 1755 bp, DROSOPHILA
atggttgtagtgaaaatagctttcattttgagtgtgggcctagtaggcatattggcccataagcaccagtcaaaggagctggatgcgaaatataattggtggcagcacgaggtcttctatcagatctatccgagatcctttcaggacagcaatggtgatggtattggtgatcttcaaggtattacttctaggctacagtacttcaaggatacgggcatcacgtccgtatggttgagtcccatttatgagtcaccaatggtagactttggatacgatatatctaactatacaaatatacagccggaatatggcacccttgaggactttgacgccttgatagccaaggccaatgaactgggcgtgaaagttattttggactttgttcccaatcacagctcaaataagcatccctggttcataaagtcagtagcccgagagccagggtacgaggatttctatgtgtgggaggatggtattctcctggagaacggaactcgtgtgccgcccaacaattggctgtcggtgttctccggatccgcttggatgtggaacgatgagaggcagcagtactatctcaggcagttcacttatggacaacccgatttgaactaccgaaatcccgccgtgattaaggccatggatgatgtgatgctcttctggctaaacaagggtattgccggcttccgcatcgatgccattatatatatttacgaggatgctcaactgagggatgagcctccgagtggcactaccgatgatccaaataatgaggcctacttgagccacatctataccagaaatcagcctgaggattacggtctacttcagcattggcggcaacttctggataattatacagctaaccacgatgggccattgaggataatgatgaccgagggttatgcttcggtgtcgcaactaatggaatactatgaagattcgaatggtgtacagggcccccagtttcccttcaactttgacttcatcaccgaactgaatgccaattcgacagctgcggactttgtcttctatatctccaggtggctcatctatatgccacatggtcatgtggccaactgggtgatgggaaatcacgacaatcctcgagtggcatcacgattcggtgagaaatctgtggacgccatgaatatgctgctgatgacattgccaggaattggtattacttataatggcgaggagttgggcatgactgactacagggacatcagctggagcgatacggtggatcagcccgcttgtgaggctggaatcgacaactacaagacgatttctagagatcctgagcgaactcccatgcaatggagtagtgatgtgaatgcaggattctcctccgccgatcgcacttggttgcctgtcaatccgaattataaggaacttaatcttcggaatcagcagcaggcgaggcgaagtcattacaagatctatcagtcccttctgaagctcagacaactgccagttctgaagaacggatcctttgttccagaagtggttaatcgcagggtcttcgctttcaagcgagaactgaagaacgagcacactctgctgaccattgtgaacgtgagcaaccgcactgaactggttgacatcgcggactttatagaacagcccaatcgattgagtgtccttgtggcgggagtggactcgcaacaccgggtgggggatcgacttaaggccgagacaattgaattggcgcccaacgagggattagttattcagctgaataagcgaaagtaa

SEQ ID NO: 36654 - protein, 584 aa, DROSOPHILA
MVVVKIAFILSVGLVGILAHKHQSKELDAKYNWWQHEVFYQIYPRSFQDSNGDGIGDLQGITSRLQYFKDTGITSVWLSPIYESPMVDFGYDISNYTNIQPEYGTLEDFDALIAKANELGVKVILDFVPNHSSNKHPWFIKSVAREPGYEDFYVWEDGILLENGTRVPPNNWLSVFSGSAWMWNDERQQYYLRQFTYGQPDLNYRNPAVIKAMDDVMLFWLNKGIAGFRIDAIIYIYEDAQLRDEPPSGTTDDPNNEAYLSHIYTRNQPEDYGLLQHWRQLLDNYTANHDGPLRIMMTEGYASVSQLMEYYEDSNGVQGPQFPFNFDFITELNANSTAADFVFYISRWLIYMPHGHVANWVMGNHDNPRVASRFGEKSVDAMNMLLMTLPGIGITYNGEELGMTDYRDISWSDTVDQPACEAGIDNYKTISRDPERTPMQWSSDVNAGFSSADRTWLPVNPNYKELNLRNQQQARRSHYKIYQSLLKLRQLPVLKNGSFVPEVVNRRVFAFKRELKNEHTLLTIVNVSNRTELVDIADFIEQPNRLSVLVAGVDSQHRVGDRLKAETIELAPNEGLVIQLNKRK

SEQ ID NO: 36655 - DNA, 4128 bp, DROSOPHILA
ggaccttctacttctcactttggggcactttccctgtactgtttggcctcgactttaattccaagtcgtaattcataattgtcgtcaggttttttggcccttttcgggggctcaggccgcttgacaaatggttgccgaatttaattaaattcccacttagcggtggttgacgaccttaaaatttgctttgattttaattctcactgcaattgtatgctataaactagttgattggtaggtgttctcaaagcaaaggcattattcaaaatttatgacaatgttctgatgttatctcgtatttggttcgtttttgcgttgtttctgtgattacacttgacaatgtgaaattttaatttctcatcaattcactattttacagtacagtgaaagaaaatttgcatactacataccacaatacaggcaaagaagaaacaaagtttaaataaataattgcctactctctaaggcttcaatggaattaatttataaacaaaaaatatattttatttaaaacttatatatattaataaaattacttaaaactctcgagatttttatttgccacctgaaagttctgtacattgtgatcttctccaatcgtctgtggatccaaagctctcgaacagctgttggcatccaattccccaaaagctttgagttgatcgccgccggcagatgctaaaaacgcatcgagaattataattgtgttcagtttattttaatttccttgaggtgagcatagtgattttggtcggcgaagtgtctataaaaagcacctagttttccaccgattggcttggcaagtgcagaatgccgtaaaattgggaaaaacaattttgtttactcatttaatttgcaccgcaatttgttttgattggtgctgataaaaatctgacaacaaattatagctttaatacgactgctgataattagacaaagactaatgcaaaaattattttaattatatggtagaatcgctttaaaagtgcctgtcgcactgccaactctcgagcacattaaatagaatacctcgccgcaatgcgcgctccactcatccaaatccttctttttagtctactaaactccggctccattatggccggtctggttaagagcgatacggaggactttatcgactggtggccgcacacggtgttctatcagatctacccgaggtcattcaaggacagcaatggcgatggtatcggcgatttgaaaggaatcacctccaagctgcgctatctggcggacactggcatcacggccacctggttgagtcccatttttcagtcgcccatgattgactttggctatgatatatcggattacaaggcaatccagccggagtatggcaccatgcaggatttcgaggagctgatcgacacggctttcgagctgggcatcaaggttgttctggactttgtgccgaatcacagctcggatcagcatgagtggttcaagaagtctgcggcaagggagccgggttacgaggatttctatgtgtggcacgatggcatcgtccaggagaatggcactcgggtgccacccaacaactggccatcggtgttctacggatccgcttgggagtggcacgaaggtcgtgagcagtattacctgcaccagttcaccaaggagcagccggacttgaactatcgcaatcccaaagtggttcaggccatggatgatgtgttgcttttctggctcaacaagggcgtagctggtttccgcatcgatgcagtgaatcatttgtttgaggacgaatctcttaaagatgagccattgagtggcaaaacaacggattcactttcctatgactacactaagcacatctactcgagagatctgccagaagtcttggaaatgattcatcactggaggcaactgctggatgactttagtgccaagcaccccgaaagaccaacacgcatcatgatgacggaggcgtacgcaggactaacccagctggcggactactacgaggattccaacggggttcggggctcccatctgcccttcaactttcactttatcacggatgtcaaaggcgactcggatgcgcgtgactatgtctacaacgtggagaagtggctgatctacatgccacgcgggcacgcggccaactgggtcatgggcaaccacgacaacccccgagtcgcttctcgattcggtccagccagtgtggacgccatgaacatgctactgctcacccttcccggtgtcgccgtcacttataatgtgagattttgttgctgacttggttggttgcttgtggtcctttggctttacccctacacttttcagggcgaggagctgggcatggtggactaccgcgaactgagctgggaggaaacggtggatccaccggccagaaatgttggagagaagctataccaggaggtctcccgtgacccagtccgaacaccgttccagtggaataacgagaccaatgctggtaagccattgatattattattataatttaaatatgtctcattaactttttcgcacaggtttttccactgccgccaaaacctggctgcctgtccacccgaactacctcgagctcaaccttgaggcccagaaggtggccaacaggagccattaccaggtctacaaggatctgcttgagctgcgaaaatcggccattatgcgtgtgggccgatttaatattgaaccccttactcgttgggtgtttgcctttaagcggtagatgaacgaaatttgcccttaagagacattgattaattggaaaaccgttttgcaggtcctatcccaattttgagtcgataattaccgtgataaatgtgagcgacaaggagcagttggtggatctctcagagtttcttagccagcctaagaaactagtggttgaagtttccggcgtggattccaaatatcaacctgggtaagtttgttcctttgaattgtggtcactcatttcccgctttgcaccgtaaaaaacaatcgtaaaaagctaaataatattcgaagaacatcaatgtagagttcccttaaatctcaatgtcccttttaccattttctttctgtattcccgctgcagtcaatccctcgccgcaagtgcattgctcctggccgcccgtgagggtctcgtctgtcggctggtctagccgggaatgggattagaggaattaccagctgatggcggcaaactttgctctttaattgcatttccagttcaaaatgtcacgcgattgaatacataatggggggaaaattaatgaccctcgagctggtacattttttcgtttgactcgattgaattgaacgctgtccagtggtaatgaaggcaaagggggcagtgtggtccggatcctgtccggaaaaaagtggccacaacgtcgcctgttcctggcaacttgcccagaacacttggccgctgttgatgttggtgtttcattcttgcccggtcactgtaatttttcatgtatggaggaagaacacacacaggaaccaagaaagatttatggaactggtgcagaatcctcccacccatgcggaaatgtcgcaaggacggcacaaaatataataccacatgcaaaagtttttaaatgtcctttaataactgaatttaatatttgtgagtggcaactatggcaaacttgttggaaacttttgattgctcgatgcttgtacaaatattttgccagcaaatggaagttgtttggattagaagttaatagttgcgaatggccggaaaattacaaaaatgttgttaacttccatgcaatttcattaattttccgttagctcgaaaatgagaaaactactactatttaaatagcacagcgattaagtttctttcttaaacctttaatcccagttattttcagtaaaacttaaaatcattaagcgatatgtatccattcagttcgacaaacgatataattaagaattgctcggctcttaaccgattcacacgaaatttaaaaatttcattacccatacgccacgttgaaccggatctctcatcggattaaaagtatatatattttgctgtctatatgccccgctgcgtttcatttcgttctgctcttaacccagtctgtttcggaatcggtgaaagtacttaatataaactacttaaataatccagcgacagcattttgg

SEQ ID NO: 36656 - DNA, 1790 bp, DROSOPHILA
ccaactctcgagcacattaaatagaatacctcgccgcaatgcgcgctccactcatccaaatccttctttttagtctactaaactccggctccattatggccggtctggttaagagcgatacggaggactttatcgactggtggccgcacacggtgttctatcagatctacccgaggtcattcaaggacagcaatggcgatggtatcggcgatttgaaaggaatcacctccaagctgcgctatctggcggacactggcatcacggccacctggttgagtcccatttttcagtcgcccatgattgactttggctatgatatatcggattacaaggcaatccagccggagtatggcaccatgcaggatttcgaggagctgatcgacacggctttcgagctgggcatcaaggttgttctggactttgtgccgaatcacagctcggatcagcatgagtggttcaagaagtctgcggcaagggagccgggttacgaggatttctatgtgtggcacgatggcatcgtccaggagaatggcactcgggtgccacccaacaactggccatcggtgttctacggatccgcttgggagtggcacgaaggtcgtgagcagtattacctgcaccagttcaccaaggagcagccggacttgaactatcgcaatcccaaagtggttcaggccatggatgatgtgttgcttttctggctcaacaagggcgtagctggtttccgcatcgatgcagtgaatcatttgtttgaggacgaatctcttaaagatgagccattgagtggcaaaacaacggattcactttcctatgactacactaagcacatctactcgagagatctgccagaagtcttggaaatgattcatcactggaggcaactgctggatgactttagtgccaagcaccccgaaagaccaacacgcatcatgatgacggaggcgtacgcaggactaacccagctggcggactactacgaggattccaacggggttcggggctcccatctgcccttcaactttcactttatcacggatgtcaaaggcgactcggatgcgcgtgactatgtctacaacgtggagaagtggctgatctacatgccacgcgggcacgcggccaactgggtcatgggcaaccacgacaacccccgagtcgcttctcgattcggtccagccagtgtggacgccatgaacatgctactgctcacccttcccggtgtcgccgtcacttataatggcgaggagctgggcatggtggactaccgcgaactgagctgggaggaaacggtggatccaccggccagaaatgttggagagaagctataccaggaggtctcccgtgacccagtccgaacaccgttccagtggaataacgagaccaatgctggtttttccactgccgccaaaacctggctgcctgtccacccgaactacctcgagctcaaccttgaggcccagaaggtggccaacaggagccattaccaggtctacaaggatctgcttgagctgcgaaaatcggccattatgcgtgtgggccgatttaatattgaaccccttactcgttgggtgtttgcctttaagcggtcctatcccaattttgagtcgataattaccgtgataaatgtgagcgacaaggagcagttggtggatctctcagagtttcttagccagcctaagaaactagtggttgaagtttccggcgtggattccaaatatcaacctggtcaatccctcgccgcaagtgcattgctcctggccgcccgtgagggtctcgtctgtcggctggtctag

SEQ ID NO: 36657 - protein, 564 aa, DROSOPHILA
MAGLVKSDTEDFIDWWPHTVFYQIYPRSFKDSNGDGIGDLKGITSKLRYLADTGITATWLSPIFQSPMIDFGYDISDYKAIQPEYGTMQDFEELIDTAFELGIKVVLDFVPNHSSDQHEWFKKSAAREPGYEDFYVWHDGIVQENGTRVPPNNWPSVFYGSAWEWHEGREQYYLHQFTKEQPDLNYRNPKVVQAMDDVLLFWLNKGVAGFRIDAVNHLFEDESLKDEPLSGKTTDSLSYDYTKHIYSRDLPEVLEMIHHWRQLLDDFSAKHPERPTRIMMTEAYAGLTQLADYYEDSNGVRGSHLPFNFHFITDVKGDSDARDYVYNVEKWLIYMPRGHAANWVMGNHDNPRVASRFGPASVDAMNMLLLTLPGVAVTYNGEELGMVDYRELSWEETVDPPARNVGEKLYQEVSRDPVRTPFQWNNETNAGFSTAAKTWLPVHPNYLELNLEAQKVANRSHYQVYKDLLELRKSAIMRVGRFNIEPLTRWVFAFKRSYPNFESIITVINVSDKEQLVDLSEFLSQPKKLVVEVSGVDSKYQPGQSLAASALLLAAREGLVCRLV

SEQ ID NO: 36658 - DNA, 3211 bp, DROSOPHILA
gatgatgaatatcaagaagctacgtaagacttcattaatttagcttcagaaaaacactgacaatatatgtatttcctttctagtgctcccgaaagtgacgagattacctgcgagtcttctgtgtaagtctttttaatataatgttttgatagattatttttaagttgccttataatcagggaaagtgatcaagatgatgactgttccaacgaagatgagtgagtaaatttaatgttataaaacaaaatcatttttcttcattttgtgaaccttttagtatggatttggatggggcagactggtccccatatgtcacttatgaggcgggtacaccgtaagttatagtttcgtaatgtagaacgtggaataacgggttcggattctctacagaagacgtccccacagtgctttggagattaccgaaattaccgagtttccgaaaattccaaagaaaaaccccacctcacccgaactggtgatacagaagccagagactccggatcaaaacgactcgggatctcaggagcgtctcaccttctctcgcgccaataatgcgctatcagagtccattggagctcgcgtttcccaacgtagcaggggcaacttggaaccattcatccgtagaatggcacgtagccctacgcccgaggcctcagaggaaaacggctcggtatcacaaggtcagctgctggccaagcccgtggatgtcaccgagttctttcaccgcattgctgtgggtctcgtcgagcagcgcgtctgcttgaagcctttcttggcattgcgcaaacatattgctcaactggtgggtcagactttgaagaaatccaagaggatgcgccgttaatccatttaacatccaatgttacaacatccatgtaataagtatcctataatatccaataaataatatattgcgttcaccgattggatatgaagttaactcaaattcgtaaatttaattaaattaatataaaatataaaagtaaaattaagcacaatattagtatccacacggttcgtcgtccatttcggtgcaattgcagtagttaatatcgggaacgttgtcggataccagatcatcctcggcaattgttacacagcgcacgttacacggatatttctggggaatggactgatttaggtgctatcgatggatagtaaatggataaacccaccaccacgaccaagggatgtccatcatcgtccgtgagtcccacattatcgcagccatcgccctcgttctgccggtgaactatgaacttggtcatacaacaaagcacgatctaaaaagatgattgacttagggaggtcttatcttaaaatacaattttgttgcatattcaaattttttgatttcaatatgacttacgctaatgaatttgacagaatttaatgaatatggctccaatattcaccattgttctgactttaaaacgttgcccattaccaattacttaccagaaacttaagggccaggacccataacgccatcaggatgtaaaagcagttccacaccgcactaacgaacgcaggcaagcatccgttcgcattgattgagtccacggtgagagcgggaaaaggctgccggctattgccaccgatggactgcccctcactgggcaggaaattgttaaagcagctgtcgcaggagcgcttgcagcaggcgaagggtgccaggaccatcgacgtgcagttattctcccgccgtggcatccactccgcgttcatccagtccttgtagccatgcaccccgcagcactccttgtgccactgcagtccgtcccacaggagtttccactcgggacacgagtagtacatgtcgatgccgcgggtcagcgaggtgtccgccgcattctcgaggacatcgacaccccggtaaagattccaaacgcacccgaaaccggaggcaatgattacgcaggagtagaaggcccacacggatagcaagaggcgaatgttcggcgtgcagcgacgccgccaaattcgccgccacatggcaatgctgcagagaaaggtcaccaccacctgggcgccaaacacgtagatcccaaacagatagccgtagaccaggcggcactcaatatccgatagatagccggtgagcacggtgtggtagtaggcggtcaccaccaggatcagcagtccgatcacggcctcggttattaacagcaggtggaggtagacggaggctcggcggaagggctggcgcatttggtcatcctcgtgggcatcgatccaaagtttggcttgtcgacgaggttttagctctgaactcgaatttcatttggattgacgctgattgcaaggacttgggtgtttgaattttaaagtgtactacaacttgaatttaattttttttatccctaagggcagtaaaaacaatgatgcattgaaaaatcgctttacaaatatgtatatttacatctttttatttggtaagcagttgataaatgtatacacttaactatatttcagtttaaaaccttttcattttggagcttgatcagttggagcatatcccactcatggggcagcggtttaccgcacaaagctaaacttgagtacgccagatgtgtagtccgtattgggtccaatctgttttgcatccacctttatcagccttatgttatcaacgcagcgcgaactttgaactatttccggattgatatcgctatgccggatccacagctctagagggcgaatgcgccagctttgcttggccaaaatggcaatacacctccagacgaaggattctccatggcagaaggttcgagtgatgtcgaggactctcagctgtcgacaattgatcacgaattccagcaggcccaaaggactctccaactgatagccacacaaatggagttcggttagctcacccagttgactggctagctgccgcagtatctgatcccccaggcactgcacctggacgccctcctccttctcctcctcttcctctggctggctgtgcagctccagtcgcgtcaagtgactaagatttcccagctccctgaagaaccggccatagtcgtgcaaaactccactgaaactaaaggcctcaatttgtcggccatcgccgggaggacttgtgggactaactatcctcgataggacatcaaagacaaagttcctggaatagatcgacagctttcgcaggtttggcaatgtcagtagttgctgcgtaatatccgactccatacacacgtggtaa

SEQ ID NO: 36659 - DNA, 981 bp, DROSOPHILA
atgcgccagcccttccgccgagcctccgtctacctccacctgctgttaataaccgaggccgtgatcggactgctgatcctggtggtgaccgcctactaccacaccgtgctcaccggctatctatcggatattgagtgccgcctggtctacggctatctgtttgggatctacgtgtttggcgcccaggtggtggtgacctttctctgcagcattgccatgtggcggcgaatttggcggcgtcgctgcacgccgaacattcgcctcttgctatccgtgtgggccttctactcctgcgtaatcattgcctccggtttcgggtgcgtttggaatctttaccggggtgtcgatgtcctcgagaatgcggcggacacctcgctgacccgcggcatcgacatgtactactcgtgtcccgagtggaaactcctgtgggacggactgcagtggcacaaggagtgctgcggggtgcatggctacaaggactggatgaacgcggagtggatgccacggcgggagaataactgcacgtcgatggtcctggcacccttcgcctgctgcaagcgctcctgcgacagctgctttaacaatttcctgcccagtgaggggcagtccatcggtggcaatagccggcagccttttcccgctctcaccgtggactcaatcaatgcgaacggatgcttgcctgcgttcgttagtgcggtgtggaactgcttttacatcctgatggcgttatgggtcctggcccttaagtttctgatcgtgctttgttgtatgaccaagttcatagttcaccggcagaacgagggcgatggctgcgataatgtgggactcacggacgatgatggacatcccttggtcgtggtgaaatatccgtgtaacgtgcgctgtgtaacaattgccgaggatgatctggtatccgacaacgttcccgatattaactactgcaattgcaccgaaatggacgacgaaccgtgtggatactaa

SEQ ID NO: 36660 - protein, 326 aa, DROSOPHILA
MRQPFRRASVYLHLLLITEAVIGLLILVVTAYYHTVLTGYLSDIECRLVYGYLFGIYVFGAQVVVTFLCSIAMWRRIWRRRCTPNIRLLLSVWAFYSCVIIASGFGCVWNLYRGVDVLENAADTSLTRGIDMYYSCPEWKLLWDGLQWHKECCGVHGYKDWMNAEWMPRRENNCTSMVLAPFACCKRSCDSCFNNFLPSEGQSIGGNSRQPFPALTVDSINANGCLPAFVSAVWNCFYILMALWVLALKFLIVLCCMTKFIVHRQNEGDGCDNVGLTDDDGHPLVVVKYPCNVRCVTIAEDDLVSDNVPDINYCNCTEMDDEPCGY

SEQ ID NO: 36661 - DNA, 3417 bp, DROSOPHILA
atccgttcgcattgattgagtccacggtgagagcgggaaaaggctgccggctattgccaccgatggactgcccctcactgggcaggaaattgttaaagcagctgtcgcaggagcgcttgcagcaggcgaagggtgccaggaccatcgacgtgcagttattctcccgccgtggcatccactccgcgttcatccagtccttgtagccatgcaccccgcagcactccttgtgccactgcagtccgtcccacaggagtttccactcgggacacgagtagtacatgtcgatgccgcgggtcagcgaggtgtccgccgcattctcgaggacatcgacaccccggtaaagattccaaacgcacccgaaaccggaggcaatgattacgcaggagtagaaggcccacacggatagcaagaggcgaatgttcggcgtgcagcgacgccgccaaattcgccgccacatggcaatgctgcagagaaaggtcaccaccacctgggcgccaaacacgtagatcccaaacagatagccgtagaccaggcggcactcaatatccgatagatagccggtgagcacggtgtggtagtaggcggtcaccaccaggatcagcagtccgatcacggcctcggttattaacagcaggtggaggtagacggaggctcggcggaagggctggcgcatttggtcatcctcgtgggcatcgatccaaagtttggcttgtcgacgaggttttagctctgaactcgaatttcatttggattgacgctgattgcaaggacttgggtgtttgaattttaaagtgtactacaacttgaatttaattttttttatccctaagggcagtaaaaacaatgatgcattgaaaaatcgctttacaaatatgtatatttacatctttttatttggtaagcagttgataaatgtatacacttaactatatttcagtttaaaaccttttcattttggagcttgatcagttggagcatatcccactcatggggcagcggtttaccgcacaaagctaaacttgagtacgccagatgtgtagtccgtattgggtccaatctgttttgcatccacctttatcagccttatgttatcaacgcagcgcgaactttgaactatttccggattgatatcgctatgccggatccacagctctagagggcgaatgcgccagctttgcttggccaaaatggcaatacacctccagacgaaggattctccatggcagaaggttcgagtgatgtcgaggactctcagctgtcgacaattgatcacgaattccagcaggcccaaaggactctccaactgatagccacacaaatggagttcggttagctcacccagttgactggctagctgccgcagtatctgatcccccaggcactgcacctggacgccctcctccttctcctcctcttcctctggctggctgtgcagctccagtcgcgtcaagtgactaagatttcccagctccctgaagaaccggccatagtcgtgcaaaactccactgaaactaaaggcctcaatttgtcggccatcgccgggaggacttgtgggactaactatcctcgataggacatcaaagacaaagttcctggaatagatcgacagctttcgcaggtttggcaatgtcagtagttgctgcgtaatatccgactccatacacacgtggtaatccgcaatcttgatatgctccagtgtgggacacagctgcagatccgccagatcacagcagttcacctcgtcacagtcctccattatgtcaaatttgcgtagtcgcagctgccggaagatgtccctaaagtgttgcgattccagaaaatggcaatcatgcaggcggagatcggtaagctcatccaggtcgcataggtattttccggtaatttggcagcctctaagtttgaggctttttagattgggaaataccctctgcagcattcgcacatcctcatccacgaagcgaacgcgtctccgtctatacacattgcccagccactcgaaagagtgaatcctctccagcgtgtggttactgagcagtcgcagtcttcggacatccaactgcttgcaactcaggtgctgcatgtgcggagccagggccaagatgaaagccacaaactgtcgggaattggctcccgagcgtccgaacatctcgtcctgcaggacaacgttgcgaacacgggtctcccagagcatgtgcactacgcccgccaagcgcctgttcaacctgctaatctggaactgctggtacgtgtccagctggcggatgatcaaagccaggacatcgtcattcagctggagcagcgttactgcagtgggttctaaaaagttgaaggacgatcgtcttaataggctcagttgtattgtttttttttttttcgtttttagccaattccttacctgtatcgcttgcggacgtcatctgcggtctgttctcgatcgtggtacttggaatactaatgaattcacgcagttgccacggtcagtagtccgatgctacctagtgcgaaggtcatttaggggtgggtttccaggcagatcgggcggaattcgcgctacctaaacgacttatccttttggagatgggaaaacgaagcgatagttttcggggtatcccagagatacgaaatcataataatatccttaaccaaaaaatataattctactcagggttactcagtttcttgtaaaatccggttttatgcttatgctgcgcgtttttgctgctcatttatttgttttgtttagtgcttactacttcataaattttaattacattttactcgtaacttgtacaatatatactatatatatatatatttcatttgttgtccaatttctgtcgtataggcatatatattttaggtatatatagtgttgtattgtatctgatttatagtacattattgtttctatttagtattgttactgtttgttgcttttaatgtttacgttaattggggcattccaagcgttttcttcagcttctgttaatttttctcctaggaaacatttttgccgctgtcccagcgtttaatcattaaggttaatgggtatgtgtctgtcgatcagtgagtgtgggttgtggagaaagttacctctattctcacggcttgcactacgcaacttacaagtaaattatttcgtttgttcattaatattgcaacacaagtgaattgtctccataaacttgcctttcacgtactacacatacatatccgttatatattagtcaataatcgtacaataatatatatctctatatgcattctatatactgcgctctatacacatcaccaaaaatccaaaaacacccaaaaactaacacggatactcaactacataattatagacgtgtgatagtgtgtgtttgcgacttcgaaaacaattattttcagtgtgaaagcaaaatacatgcatat

SEQ ID NO: 36662 - DNA, 1338 bp, DROSOPHILA
atgacgtccgcaagcgatacagaacccactgcagtaacgctgctccagctgaatgacgatgtcctggctttgatcatccgccagctggacacgtaccagcagttccagattagcaggttgaacaggcgcttggcgggcgtagtgcacatgctctgggagacccgtgttcgcaacgttgtcctgcaggacgagatgttcggacgctcgggagccaattcccgacagtttgtggctttcatcttggccctggctccgcacatgcagcacctgagttgcaagcagttggatgtccgaagactgcgactgctcagtaaccacacgctggagaggattcactctttcgagtggctgggcaatgtgtatagacggagacgcgttcgcttcgtggatgaggatgtgcgaatgctgcagagggtatttcccaatctaaaaagcctcaaacttagaggctgccaaattaccggaaaatacctatgcgacctggatgagcttaccgatctccgcctgcatgattgccattttctggaatcgcaacactttagggacatcttccggcagctgcgactacgcaaatttgacataatggaggactgtgacgaggtgaactgctgtgatctggcggatctgcagctgtgtcccacactggagcatatcaagattgcggattaccacgtgtgtatggagtcggatattacgcagcaactactgacattgccaaacctgcgaaagctgtcgatctattccaggaactttgtctttgatgtcctatcgaggatagttagtcccacaagtcctcccggcgatggccgacaaattgaggcctttagtttcagtggagttttgcacgactatggccggttcttcagggagctgggaaatcttagtcacttgacgcgactggagctgcacagccagccagaggaagaggaggagaaggaggagggcgtccaggtgcagtgcctgggggatcagatactgcggcagctagccagtcaactgggtgagctaaccgaactccatttgtgtggctatcagttggagagtcctttgggcctgctggaattcgtgatcaattgtcgacagctgagagtcctcgacatcactcgaaccttctgccatggagaatccttcgtctggaggtgtattgccattttggccaagcaaagctggcgcattcgccctctagagctgtggatccggcatagcgatatcaatccggaaatagttcaaagttcgcgctgcgttgataacataaggctgataaaggtggatgcaaaacagattggacccaatacggactacacatctggcgtactcaagtttagctttgtgcggtaa

SEQ ID NO: 36663 - protein, 445 aa, DROSOPHILA
MTSASDTEPTAVTLLQLNDDVLALIIRQLDTYQQFQISRLNRRLAGVVHMLWETRVRNVVLQDEMFGRSGANSRQFVAFILALAPHMQHLSCKQLDVRRLRLLSNHTLERIHSFEWLGNVYRRRRVRFVDEDVRMLQRVFPNLKSLKLRGCQITGKYLCDLDELTDLRLHDCHFLESQHFRDIFRQLRLRKFDIMEDCDEVNCCDLADLQLCPTLEHIKIADYHVCMESDITQQLLTLPNLRKLSIYSRNFVFDVLSRIVSPTSPPGDGRQIEAFSFSGVLHDYGRFFRELGNLSHLTRLELHSQPEEEEEKEEGVQVQCLGDQILRQLASQLGELTELHLCGYQLESPLGLLEFVINCRQLRVLDITRTFCHGESFVWRCIAILAKQSWRIRPLELWIRHSDINPEIVQSSRCVDNIRLIKVDAKQIGPNTDYTSGVLKFSFVR

SEQ ID NO: 36664 - DNA, 12920 bp, DROSOPHILA
aagtatatattataattgtatgcctatgcatatctgcatatgtttatgtatgatgaggatgctttctatgaatgtcgctccatatggatataatcataacttagtcaaaacacaataaaaatacaagatggtgcgcttctgctggttacggcaacaaaaaccccttaactttaagtgtctagcgagaaaattgcctgagacggattggtcttcggatccatttgattcactgagcgcagctaaggaacaatcggatatcacaaaaaccatatcgatcgacccaaacaaagtcacgcgccgcctggcacacatttcaaaaatgtagaaaacacgtgaataaaattagacgctaagcgcctaagcattaaagatacacataaaagggagagataccaagaacaaactatgagatgattcgtattgcacgttaaagctggcggcggcagactaattgaggagtgtttaatttgcttgcgattgggacacatatctcgttgagtttccagggtgatttgattattttaaattacttgatttaaaatatttcacgaattaaaatcttaataattgataacaaaatatttaattaccatcaattaaattttggggctttagaagactggacattttaaaggcaatactgtgccatttcgtcctaaaagtaatatttaccacacacgcttgctttaaaaatcgacacaccctagaaacccagcgtatcacgatatccgcttggggccaccgatcagcgtaaccagcgcgctgctaaaactattgtacatacaactagctgcttatatggggtgcgcttgttatgatgtgtgtcctatctagagaagtcgcgtcagctcggctcactagcactggctcactggtggcacgcatgccttcaccacgccgcttgcgacgacgcagtggccgctgtggcagctattgaggtgctggtcgtgctgctggagtgggctgtggtgggagtgtagccgtgcaggaggggctactgttagtaaacaaccgggtgctgttccacgttcgctggcagatgctgcagctggatggcggcacgtgccagagcacttgggtcactgatcaaggcgatgggcggcggctgctgttgctgctgcggtggcggggcctgtggatgaccctgctgttgctgctggtgatgctgttgctgttgttgctgctggtgttgctgttgctgctgttgacgatgctgctcctgctgatgatggtgagccgcctgttggatggacaactgaagcagttgttgctgctgctgcaactgctgttgctgctgctggtgtgcagccactgcagcctgctgttgatgttgcgcggccacttgttgttgatgctgctgatgtgcagcagccgcctgttgctgagctgcttgctgttgggcagcagcggcggctgcggcctgttgctgtgcagctgctgcggcggctgcttgctgcttctgcgactgctgttgagcagccgcattatgtgagatgagcgtagaggtaaccaggggcaccagacccggtgttaactggaccgcaccggctccgcccgccgcacccgccgtgatctgctgaatggtgtgcattgtggtggtcgccgagtgatggggaactgaaacggtaggaggaccggttaagttgggcgacttgggcacgggaagactcgcttgcgctagcgcagtcgtgtttgccgactcacttatgatcggtttcacttcctgcttgacttgcgtcagcacaccagccggtatttgcggatgcggatgcacgggtggtggcggcatcatagcatccgggtgattcatcttcatgtggcgcttcaaattgccgcgctcgacgaacgccttgctgcacagtgtgcacgcgtgtggtttctcacccgaatgggagcgcatgtgcgagaccaagtgacctgcgaaacggacaatggaagcgacatgaagatctgatcgtcggggatcttgaatttcgaaaacggctcaggtaagttttgggggcttgctctcacagtcgttgtcggcatgcaaattaggctcaagaggtaaatgtctagtcatcatttttgttaacaagaaaccgaaatcttaaataatgctagaagttatctaataagtatttacataatttgcttttcaatgcaacaagttttgcactgatcataaaatgaataaatgtattaaatcaagaattatgtacacattatctatttaattcctttctatatgatttgcaattctttactttctttactgtttaattaaaatagctacatatattaaaataataaaacaagtttttaaacatgaatcttctgaaaaactaaacgatttttgatttggtttctgactagaatcgacccacgaaaacgacatttggaggctgtgaaagcaatccccacaacagcaactggagaagaggatcgggattaaggtatttggattatgactgtagctgggacactatgctgacgccacgccacgcgtgcctccactggatgcatgcaacgcacagccaacaatcatagagctcactcacctttgcagatgaagttcttggggcacttctcgcaggcgaatggccgctccatctcctggcccttggtatggctgcgctgatggaagagcagattgcccttgagcgggaacgatttgccgcacgtctcgcaggtgaagggccggtcaccggtgtggcaccgcgacatatggttgatcaggtgttccttgcgcgtaaacggcttgttgcaaacgttgcagcaatgcggattgtcgctcgaatgctggcgcatatgattgttgaggtgctccttccgcgtaaacgtcttctggcagtactcgcacttgtgcggcgagtcgcccgtgtgcaggcgcacatggttcgtcaggtgctccttgcgcgtgaacgtcttggtgcagtacgtgcacttgtgcggcgactcgcctgtatgttgccgtacatgattaaccatgtgatctttgcgcgtgaacgctttcgtgcagtacgtgcacttgaacggtgtctcacccgtgtgctggcgtatgtggttgaccaggtgctccttgcgcgtgaacgtcttcatgcagtaggagcagcggtgtggcgactctcccgtatgctggcgcacgtggttaagcaagtgctcctttcgcgtaaacgtcttggagcaaaagtcgcaccggtgcggcgtctcgcctgcttgcgtggcaaatgtgtgggtgtcgcgcgaatgggacgagaaaatgtttagagattagtaatcatcgccatggaacagggggggcggtcatggtttggtctggctggttgcgggtcactggacacctggcgcggattggtcttgtgttgtttatctcctctaggcgacgggggaaaagagctgcgtgttgcaatcgtgtgttcaccgtccccgcgatctggattttaggaaaactaactacaagaacaaaccatatgtctaaaccttgagtttcaagggattaaagagaagtagaagaatttaaaagctagaatcaatcagcttttaaacattaaaaaaaaaaggattaaagaaaataatttaaagacttgctgacttctaagttaagtcctatcaaaacatatttttatagagagttacgctgaaaatgactatcaaaacatacaattgctgtaagtaattctaagactacattctaaatcaaaagttagttatattagaaatgattaatctctttttaacaagaatgttaaaagtaaagttggaaaagtaattgatccacaaagaacagtggagtgcaactagcttttaccccaatcctagccagagttcgttatcgctgcgccgccaagtgtctgtgtatacagggtttttttttatgtgtcgtggactgtagctggaggctgggtaggattcgatcgggatcgaggtgcaggaagcgggcttacgattcgttttgtctctttacctgtatgccaaagtatgtgattggtgaagtgctccttgcggctaaagctcttgccgcagatctcgcaacggaacggcgtctcgttggtatgggatcgcatatgattggctaggtgctccttgcgcgtatatttcttgccgcagacatcgcactggtgcggcgtttgacctggatatgtgggagagggtagcagaacagaacggaattgttgtatatagggaatggcgtttgatctcgttcgacaagacaaaatcgcattcgtaagcgcaagcattttcttttttctcgcttaactcgaatcagcggtcatttctccaagagggatccttgcggcagcccattggagaaatgttggcgaatcggagaaaaaacaaaatttcagatcccccgacccatcctcgcgcgcaccgccgctcagtcttatttttttgttgtctttttttttttttttagttgtttagtgatggggtggctgcgtgggtgggtgggtttatttctttcgtattaaaatcttttcttcgtttttttttctgtttggtgtgaaactggccgtggcttgcgttgttgtggtttcgaacgaacgaagcgaacggaggctgctggctcgggcatatggacgtgggcgtggtggtgtcagatgtgttgtggattgtatgtggtgtggatgatgttcattggatgtgtgtcttgttttgtgtgtgcctgtcaactctgcttctactcaatgctgatcctcaggatgctgttcttgttacgtttttttttttttgtgcggaacgtgcagttccagaagaaagtttcgccaaagagctaaagtttaaggtaggtatctaagcctacctagcagatatttatgcaggtgagctgattggtgtgtttgtgtgtgcgtgtttcttgtgttgtgtgtgatccaattgctttcgtgtgatcgagtgtgaaatgtcgcagttacacagagacgttggcaatcgacaagcagcaacaacgaacttttcttagcttttctttactttcttgacttttctttgctttgctttggacaccctgttcgacagcagagagagcgtagacaaagttgcacaggcattagatatcgaatcgaaacgggagtaaaggattggacgtggacttggagtgatggagtggagcgagcactggatgaagtgtttggattggtggtgcatgtgagcatgattaagacttggtgaagctggggatgtgtgatgcagagatcatggttggggggaaatggagcggtatgagcgagtgagcgtgttttcttttaattttgtagcgggattaggcgaggagcgttctccacttctttggagattcgctcgcatgaagcgttagttgacacagagaaaaaaatcagaactatatctatacctaaaagttctagagaattaagaaccttagcttgagttctataatatatatgcaattaatgaatttatgaaacccttaggcagaattagttgttttgtttctgaactgatttgtaatactatccttagaatgttgtcatttcagaaataaagcttaaaatgaaattcatgcggttttagtgtgattatatatcatggaatttggaaaacatttgtaagatgttttaaacgaaatgaattttgaattccggcactttctaagtaagttggtgataagaaagtatagctatttgaccaggaaaggtaccaaagttaatgaccaatttcagtttatgtttttctctctgtgtgagtacagtgggcgggactgtgggagttggcgggtagaagaagcacaagcgatgagcgagatagaagtgtatgagagagtgggtggaagaagacgtaggacgcacgatgaagtttatatatatttttttttgcggtgcttattgtcaattctttttgattggtttggttggttggttgaatttttgatttggttcttggttggtttggttggttggtgtgatgtggtgatggctgttgttgttcttgtactctatggatagaatttggtctgactggagttggtcttggatattttttttttttcggtatttagttctgagagaatctgatctgtctttttgttttggcgctcgccgctcgcattgtccgcccccaccaatcaatcacactcaccagtgtgccacatgtagtggttaacatagtgttccttgcgcgtaaaggacttcttacaaatatcgcaacgatgtggcgtctcacccgtgtgtttgcgcacatggttgaccatgtgctccttgcgcgtgaacgtcttggcgcagtactggcaacggaagggcgtttcgcccgtgtgcgagcggaagtgattgtccagatgctctttgcgggcaaaggtcttttggcaaatggtgcaggcgaacggtttgtccgtcgagtgccgtttcatgtgccgctccaggctcgtattgttcgcgaacacattgaagcacacgatgcaggtgaacatgggcccgccaatatggatcttgccgtggcgcgtcaaatcctgcgacgtggtgaacccctggccgcacacctggcacatgaacggcttccgttcgctgtggtagcgccggtgcacgatcagctggtaccggaactggaacatcttgccgcagatgtcgcagacgtgcgtccccgtcgcaatgggcgtaccgtctggcgccagcgccacgttttgtccgccaccattgccgccattgccgctgccgtccacgccatgaattccgccctccattttaggcataagcaactcacccgccgtggtcgtggtgcccccactggtggtgctcccgccgctgctagtcgagctgctggtcgtcgtcaccgtcacctgctggcccccattgccgctggtggccggcggtagtcctccccccgccgatgcagctgccgccgcggccgctgctgcattcgctgatgccattaccgctgcaacggcggcattattcgtggacgccgctgctgcggctgccgctgcactcgccgcatgactggtaacctgcggcggcagcggaggaggtggtggcaactggccgccgtgggccgctgctaattgatgattgaccacatcgccgtggattttgccaaagacctcgtggtaggtgaagagctgcgaaatgtcctcaatgttcaccttgtacatttcgatgccgtgcggcggcttgccatcctctttgtgctcggatttagggagcggtggtgggccgcccaatgtgatcgttgtcccaccagtggtcacaacaggagttactactgatggcaccgagctggcagcgctcacgtgctgcattcttgtgtccagatccgggcgatcgttgtggcgttgctcgttccctgattcctatatcctaatgatgttcttgttgttgtgttgttttttttttgttttgggagttattggtttgttgggagtagttgttgttgatgttgctgctgttcttggctgttgtatttcatgtgttgctgctgaggagcgcctacatattgctgttgttgctgctgtcgactgctttcgctgagcgtggctacaacaaacaaaaaatgcaagtggaaggtggaggtggtgtcacttagtctctggctgctcaggtatttttcgaggtctttcttatcgacgctgactggggacaattaccatgaaattgctgcctcttgctctggctcccgttgtgctgatgttgtggctgctactgtaacagttgatccatttgggtgtttaattggcgcacaaccaatttgtattgttcacctgtaaatgaatgaaatttattggaatcaaatctattgactgacgagaaggtgtatttttcttaaaggtgtatctacgaggatatgggatgtatgatgttgcaaatatgctgcatatcccaaatctaaaagctttgctcctaataaggactatgatcagacaaagattagtacacagtcgaggtgaaggtgttggtcctttggcattttgacagcattctggtgccgaaggacattacaggacatttgcaatgcaacaatgcaaatgtcagttgcatgtatgtacgtgcatacaagtacagttgagccttaaccctcacacttacacacaaagtaaacaatcatcacccagaactaatttatgtaaaaagatgttggccagctagctcttcattttattgattttgctgctggtcaatgaaagtaatataaattgcccattagcggaccgcaggactcacacacatttacacacacacccatattgctatgtatgtcttcatcaccgaaggaagaggaagaagaagatggcgcacaatgaaataactttatataaattgtaaatggcaaaaggcagcaaaacgaatgacaagggacacgaaaatgggagtggagctggaatttgaggctgttaagtcgagggaggggcaggatccaggatttagatatccaatcagagaatgcaagcagaagagagagagagcgcaacgtgtaagagagggaagagcaaaacgagttgggggggggggggggggtggctgatgtaaatatcaagaagtacaaatcgattaaagacaacgcgtgtaagtgtgtgcgtgtgtaggaaaaaccgagctgcgaattaaagatggatgagcaagtgcacgaggggagagcgcaaggggagctccaatagaagagagggagagcgcgcgcatgagcgggagaggtggggagtgtttgcataggtcctggtttcgccccttttcgctaagcgctttacagttacagcttacagcttacatgctaagcaaatggtagcaagagaaagagaggaggcgaggagtggagcgaatctcccccgtgattgcgctctcacactctcttgtttttctcgagcaaataattcagcaaacatcgaggagagcgcagagcgggagaaaggacactaaaaaagggcgccacttttaatgtggtgaggtaggaatgtttcattgatgtgtgtgtgtgcaaatctccaaatatgtacatacatatgtatgtcttctgcacacacatgtgtgtgagcaagtgcccagcccgggcagaaacaaaaaaaagaaaagtgggcgggtttcgtttcgggcatgaaaagtactgatgaagccaagcacagaacgcaagacaaatggcccaatctacaaaggggctggacccccgcccactattaagtaactgtaactcaagcaccgccacagaacgaattaatcgagtgcaaaccgcaagcgcaggtcaaaaaccttagcacttcatcaacggatcaaaagaattttgtgccaactaccgggtatccccaattccatatatctaagcatatctttaagataactttttagagttggtccattatcgcaattcactcttgattcagcaaggtgtatccctttgagtcatggttcaatgaagaatatttcaagttatttacatttaaagctcaagtaatctgcatcgtaacacgaatcccctaacctttacaagaattgaagtatacatcaagaatcttatgattatactgaaatcattgggatgatctacaaatagaccgatgacatagatttaaaaatctaatgtgccaaagtaatatgctataaagcaatgttattaaagtcatatgtatcttgatgaggtaatatccaaaaactggtaaagtaggaagttggaaaacaaccattaaagtttattttgaaactttgagatttgcatttaatcagttgctatccagcgaattaggttactcgttacgaaagggattataaatttcgaaagcgctgttttagacgaaaacactatgccatatggtccagaaacaagaatgatccgtatcgaatggggttgaataacccctttgggtggtgagtggcaaagtcaccctgtaatttgatgtgaaagctgcagcaattgaaatcacttacctcatgtgattctcttggcccgattccgccgattttactggggaggctcgccaggagcggacttgaaagtatatttagacggatgcggatgttcctttgggcagggccacctgcaagcagaaacgagaggggagacatggcaacaataataaccagtgagcaacagtttgtttgcggtgtttatgtttacgcgaaatattcaaacggcccgcggtacagtcttccccttttccctttgctttcagttttggttccacttccacacacacacacaaacacatgcatacttgcatacgtgtgtgggaagaacggacaggggggcaaaagcaaatcaagcgaaaatttatttgcagtcaatatatgtatatgtacatccatatgtatgcaaaagtcaccaacacaacgaaactaaggctgcgtctgcgtggaaagaagagcaaaaatattctaactctaattggaaagggaatgggaattggaattgccttcgggggggcattgcaaattttacatttccaactattccaattcgaaacgagcagtgctgtgcggtgcggtttcggtgctaacaaatcaaattaattgtatctatatctagaagagctgtatgtgcgtgcatctcctcgaccagtcagtcttctctgcttttcttctagattctagacggggggcctctcctcgttctctccctctcaccattctggtttgcttttggctgccagcagggaaaaaaagttgtgtctttcttgccatgccgcctcctctttgttcccttcttacccactgcttttcgtgcacttttgtacacggttttgctttttttattttgttattctcgtctcgcctctctctcgctcctgcctctctccctctctttgccttacattgtctctcattattcattgaacgacaacggcaacgtcaccccctatcccctggcccagcagcaacaacgttttgcacgaacgacgctacgtacaattcccagccgcctaaagcggaaaaccaataaaaacgaattgaatcgcaaagcgtaagtacaaaataaagcgaggaggcgagacagaaaaaaatgaaagctgagagagtagctaacgagcgagcgtgaaagagagacagagagagagagagagagagagagacaagcgagtacaggcggcgcgtcgatacaagttttgccttttggctcacattctatatgccgagatccgaaactcgagttatagttataattattgccgctgctgccgctttttatttttaagtttgtttggctgtcgctcaaatttcgaccgagagagcggcgaatcgaatgggaaaaagagtgagagagaggagaaggaggatcaagttggagaaacgtccgtcacattttcattacagccaattagtgtgcatttcataattgttaaacaaaacacaggcacacatctgagcacaattggaaaagctaaaggaattggaatcgggagctgggttctaacatatggcggcgaaaaaagtgccaatacggaaagcgccaccgatcgcttaaagtgctatagttaataaattttagaaaaatgcaaccctgcgtctgccctctctcgctctaaaacttgcaagaatgacacgatgatgacgttaatggaaactctgtagctgtggatgtgcgcgcagctcatacacaagcacacacagatactctcgcactcgcacacaaaaacactcacacaccaatacactgacagcgaagtcgaccgcaaagtcatttgattaataattctcgcattctttttggcctgcgaatttcacaaataaactcaattgtttccaatcagccccggtacttgtccctctccccatcccatcatatccgacccaccccctctagcagcttctcccctcgtacaaaacactgcattttttacaagctttaaaaaggttgttcggttcgttcttatgacgccagtatatgaaaatttacttgatattgcaacggtggtggtggcgggcacactctccggcgaatgtgtgtgtgtgtgtgcaacagtagtggcaatcagaatcgaaacgccgcgcgggtgagaggcggtggtgaacggcgaacagagcaaagcaaactgaaaactgaatgagacgcggaggcagcagaaggcgagcaggcaaaggcgaccgatgtaaaagttcttcgtgcggcgcgttcgggcggcagccgaaagcacaaaagtccagtgggagagccagtgcaggcggtttggctttgacgagggatcaattgattcgactcttatatttaaaagttatttattgaacttcctaagtgtggcataataacaaggctatctgattatcttattgaaaatttgacagtcaaatatcaaatataagttttttttaataatatggcaaaggcataacaaatatcaggtaatgagttgattagcttagagctgtaaaaagcccaataatcccaatccaatgctaaaaaaagttaacatttacataagccagtgagaaaaataactttaataacaaggcggtttatctgatcggaatacatgaaaatttaaaacacttattaaaataattcaatttaatctttataaccttatattcaaatggaaaaagtcaaaaaagcatttataaattactgattaaagtatccctttcaacaaatttttatattagatgaaaacttaaactacttttagcattcagagtagataactagccaagcagcacctgcacttactccaattacaaaaactggctagagagaatccaagtggccagcactggcaagaggtgtggaggcagcgagagagcgagagcgactacgagagacaccgcaagatacagatacaatgcgtgctcgagcccgcatgtgtgtgtgtgcgtgcgattgcgttgttcttattaacgatttgctgccgctgtctccgccgctccctccaccaaccccctcccgttgttgtgctgctttttcggggcttgggcacaaaaaggcggcaaaacggttaagcacacaaattcggccgggtccaattggccaatttgaatacgaatgcaagagtcgccaattcgaattgcactcaccag

SEQ ID NO: 36665 - DNA, 3269 bp, DROSOPHILA
ttcaccaccgcctctcacccgcgcggcgtttcgattctgattgccactactgttgcacacacacacacacattcgccggagagtgtgcccgccaccaccaccgttgcaatatcaagtgaacaatacaaattggttgtgcgccaattaaacacccaaatggatcaactgttacagtagcagccacaacatcagcacaacgggagccagagcaagaggcagcaatttcatgccacgctcagcgaaagcagtcgacagcagcaacaacagcaatatgtaggcgctcctcagcagcaacacatgaaatacaacagccaagaacagcagcaacatcaacaacaactactcccaacaaaccaataactcccaaaacaaaaaaaaaacaacacaacaacaagaacatcattaggatataggaatcagggaacgagcaacgccacaacgatcgcccggatctggacacaagaatgcagcacgtgagcgctgccagctcggtgccatcagtagtaactcctgttgtgaccactggtgggacaacgatcacattgggcggcccaccaccgctccctaaatccgagcacaaagaggatggcaagccgccgcacggcatcgaaatgtacaaggtgaacattgaggacatttcgcagctcttcacctaccacgaggtctttggcaaaatccacggcgatgtggtcaatcatcaattagcagcggcccacggcggccagttgccaccacctcctccgctgccgccgcaggttaccagtcatgcggcgagtgcagcggcagccgcagcagcggcgtccacgaataatgccgccgttgcagcggtaatggcatcagcgaatgcagcagcggccgcggcggcagctgcatcggcggggggaggactaccgccggccaccagcggcaatgggggccagcaggtgacggtgacgacgaccagcagctcgactagcagcggcgggagcaccaccagtgggggcaccacgaccacggcgggtgagttgcttatgcctaaaatggagggcggaattcatggcgtggacggcagcggcaatggcggcaatggtggcggacaaaacgtggcgctggcgccagacggtacgcccattgcgacggggacgcacgtctgcgacatctgcggcaagatgttccagttccggtaccagctgatcgtgcaccggcgctaccacagcgaacggaagccgttcatgtgccaggtgtgcggccaggggttcaccacgtcgcaggatttgacgcgccacggcaagatccatattggcgggcccatgttcacctgcatcgtgtgcttcaatgtgttcgcgaacaatacgagcctggagcggcacatgaaacggcactcgacggacaaaccgttcgcctgcaccatttgccaaaagacctttgcccgcaaagagcatctggacaatcacttccgctcgcacacgggcgaaacgcccttccgttgccagtactgcgccaagacgttcacgcgcaaggagcacatggtcaaccatgtgcgcaaacacacgggtgagacgccacatcgttgcgatatttgtaagaagtcctttacgcgcaaggaacactatgttaaccactacatgtggcacactggtcaaacgccgcaccagtgcgatgtctgcggcaagaaatatacgcgcaaggagcacctagccaatcatatgcgatcccataccaacgagacgccgttccgttgcgagatctgcggcaagagctttagccgcaaggagcacttcaccaatcacatactttggcatacaggcgagacgccgcaccggtgcgacttttgctccaagacgtttacgcgaaaggagcacttgcttaaccacgtgcgccagcatacgggagagtcgccacaccgctgctcctactgcatgaagacgttcacgcgcaaggagcacctggtcaaccacatacgccagcacacgggtgagacaccgttcaagtgcacgtactgcacgaaagcgttcacgcgcaaagatcacatggttaatcatgtacggcaacatacaggcgagtcgccgcacaagtgcacgtactgcaccaagacgttcacgcgcaaggagcacctgacgaaccatgtgcgcctgcacacgggcgactcgccgcacaagtgcgagtactgccagaagacgtttacgcggaaggagcacctcaacaatcatatgcgccagcattcgagcgacaatccgcattgctgcaacgtttgcaacaagccgtttacgcgcaaggaacacctgatcaaccatatgtcgcggtgccacaccggtgaccggcccttcacctgcgagacgtgcggcaaatcgttcccgctcaagggcaatctgctcttccatcagcgcagccataccaagggccaggagatggagcggccattcgcctgcgagaagtgccccaagaacttcatctgcaaaggtcacttggtctcgcacatgcgctcccattcgggtgagaaaccacacgcgtgcacactgtgcagcaaggcgttcgtcgagcgcggcaatttgaagcgccacatgaagatgaatcacccggatgctatgatgccgccaccacccgtgcatccgcatccgcaaataccggctggtgtgctgacgcaagtcaagcaggaagtgaaaccgatcataattccccatcactcggcgaccaccacaatgcacaccattcagcagatcacggcgggtgcggcgggcggagccggtgcggtccagttaacaccgggtctggtgcccctggttacctctacgctcatctcacataatgcggctgctcaacagcagtcgcagaagcagcaagcagccgccgcagcagctgcacagcaacaggccgcagccgccgctgctgcccaacagcaagcagctcagcaacaggcggctgctgcacatcagcagcatcaacaacaagtggccgcgcaacatcaacagcaggctgcagtggctgcacaccagcagcagcaacagcagttgcagcagcagcaacaactgcttcagttgtccatccaacaggcggctcaccatcatcagcaggagcagcatcgtcaacagcagcaacagcaacaccagcagcaacaacagcaacagcatcaccagcagcaacagcagggtcatccacaggccccgccaccgcagcagcaacagcagccgccgcccatcgccttgatcagtgacccaagtgctctggcacgtgccgccatccagctgcagcatctgccagcgaacgtggaacagcacccggttgtttactaa

SEQ ID NO: 36666 - protein, 934 aa, DROSOPHILA
MQHVSAASSVPSVVTPVVTTGGTTITLGGPPPLPKSEHKEDGKPPHGIEMYKVNIEDISQLFTYHEVFGKIHGDVVNHQLAAAHGGQLPPPPPLPPQVTSHAASAAAAAAAASTNNAAVAAVMASANAAAAAAAAASAGGGLPPATSGNGGQQVTVTTTSSSTSSGGSTTSGGTTTTAGELLMPKMEGGIHGVDGSGNGGNGGGQNVALAPDGTPIATGTHVCDICGKMFQFRYQLIVHRRYHSERKPFMCQVCGQGFTTSQDLTRHGKIHIGGPMFTCIVCFNVFANNTSLERHMKRHSTDKPFACTICQKTFARKEHLDNHFRSHTGETPFRCQYCAKTFTRKEHMVNHVRKHTGETPHRCDICKKSFTRKEHYVNHYMWHTGQTPHQCDVCGKKYTRKEHLANHMRSHTNETPFRCEICGKSFSRKEHFTNHILWHTGETPHRCDFCSKTFTRKEHLLNHVRQHTGESPHRCSYCMKTFTRKEHLVNHIRQHTGETPFKCTYCTKAFTRKDHMVNHVRQHTGESPHKCTYCTKTFTRKEHLTNHVRLHTGDSPHKCEYCQKTFTRKEHLNNHMRQHSSDNPHCCNVCNKPFTRKEHLINHMSRCHTGDRPFTCETCGKSFPLKGNLLFHQRSHTKGQEMERPFACEKCPKNFICKGHLVSHMRSHSGEKPHACTLCSKAFVERGNLKRHMKMNHPDAMMPPPPVHPHPQIPAGVLTQVKQEVKPIIIPHHSATTTMHTIQQITAGAAGGAGAVQLTPGLVPLVTSTLISHNAAAQQQSQKQQAAAAAAAQQQAAAAAAAQQQAAQQQAAAAHQQHQQQVAAQHQQQAAVAAHQQQQQQLQQQQQLLQLSIQQAAHHHQQEQHRQQQQQQHQQQQQQQHHQQQQQGHPQAPPPQQQQQPPPIALISDPSALARAAIQLQHLPANVEQHPVVY

SEQ ID NO: 36667 - DNA, 4637 bp, DROSOPHILA
taaaataaattacaaaataaaatacattttgcatataattcgtatccttatatgtctagtacattaatttactcacaaatcttttgggttaatattgcgctgtgctccttgcaactctcgctcggattttgtttgtttttctaatgctaagaaccaaaaaaaaacaaatcaacttgccgcaggccgcgcccccagaaaatcgatttgtgcctgaagcctgacgcggggaagccgaatatcgttcatcgtatataaagctaaatggaaactatataagaatcacacgaaatcatattgagttattaagaaaacatggatgtaaggtaaacaaattaaattcgtaacaaatgtacagggaaatgtttttcttttctttttttgggcgcggacgcgctaagtaaatgacaatttggtggccgtggccaaccgttgagattaaattgcttagatgccagctggattaggtggccaagtcaattacaatattatttaagccgttttgtacaaacaattctctactgttcggtttaggtttctgtatctctttctgcttctgtgatctttcgtttggcaattggttacgcgttgctgtagtagtacttctgtgtctctgtttaaaatcatcatccaaatccatgactgcatcggtagtttcgcttacatacatcgatcgcatgtacgtatatgtaaaaagtggtccttaattcgagacgtgtggttaaaacgcttttcttcgtgtatgtatatattgtatataagactgtgattctttctgcacgtatttgggtgttccttttagagtctgtgtgctggctaaaaagccacccgcaaaagcttatgcaaccgggtggcctacgaaatgtatctgaatctgtgtgcaaaatctgattcagcgcagagctacggttctcaaatgacgttcgatcggactacggactacagagtacggatctcattgctgctgttggttggttgttcggttttagtaagctaatataaatcacgatagtatggccacgctgcgtcgcggcccgccctgactgatgttgtccatggaggaccacttcttgatcccattcttcagtgcctcggcagtgaccttgtcctgcatcacacgcgacatggcctccagcttctgggcccgctccttggacagcggctccgtggggaagttgagctcgttggcctcggcgagcgtgcgcaggtcgaagtagtatttggcgtacaccgaggacggtacattgatgttgaactgcagcagctcgaggaactggcgctccagctcgttcatgtcctccacggtgatgtctttgagtatttggcagtaatctacattccaaacggcctggtcatcccacacctttgaggcgaggagaatggcacctgcagaacatcaatagtagaaattagtaagctataccaaattagtgatctactgcttgttctgaatatctgatgcttgcagcactccactcacccaacaccatgcgcttccagttgcagggtcccacatccagctcggcgtaggtgagtagccgctccaggtagactagcgtgatgatcgcacactcggccgtcagctgggcggcgttaaagagcgtgcgcacgaacttgtagatctgccggtgttccggattgtgcgtgtcatagttatccggcacctggtcgtgggtcagcggatgaagcttctcgtcgaagatgtccagccggcgatccgattgccgattcttgatgtgatagtaaatggccagtgagacgcatttgaccgtattcttaagattcggctgcgacacagtgctgtcgtccagatagatcgtcgagcaggaggagctcttcttcatgccgccaccaccgccgcaactattgccaccgggagtactgccgccgccaccgccgccgcctcctccgccgccgctgcccgcctgctgggcaatctgctgttgcgaacgcttgcgcgtcatgccgccgttctccacctttgatcgttccaggaacatggtggctgcagtgggatcgaccgacggatcctcctcgccctccagcgcctctcgctcggagatgtgctgcagattctgctggttctcatagttgtcaccgccgccaccctgctgattctgttgctgattgtggccgtgatgatggtgatgcaggtgcaccgccgacgcggatccatggtggccgtccaactggtgctgtgacgtgtgcggcggatgacccagctggataatccgctcctcgaagacgggcggcatgtccttagacttgcggtccgactgcggactggagtacgcgcagcacgagttcttgttgcccattttgccgtttcggattggttcggttggtcgggcgctcaaactaaatgcaaacttggcttggcactcactcgctcgcttgctcactctctcttgactagcggatggaccccgtggttacggatcctgctcctggcagtcgctcacgctcggttctcgcttttggcacttggtcgtcgtgcgtctatgtctatgggcatggcgctggcgtttctatcgctccacaattaccgctgcccgtcgtcgagcgtttgctgcaaagagtatatgtatgtatatagataacgcttagcctcggctttcattcgatcttatctgcaaatctgttctcattctcatcccataacccattattaattgcactgcccttttttggggagggtgctattcgattttagagaagttttgactactttttcactacttgtggtggcatttaaactattgttaataacactttctagtgctacaaatttgaatgacctgataagactgactatttgattgatttgaaagtttgggggcacttctatcatataaattgtagggaaagtcagctgtagatatgataaaaactttgttgtttttaaagataataacgtgaaagaagtcacatgacgaaaaccaaatatgccatgcatatcgaacttagcctaggagggttactttggttagggtatttcagcattcgatctgcaagttgtgctattttcactatctaccatttatatttgctctgtttataggcggaatcgttttggcttaaaggccggccagattgttgtgcgaaaagttaattaacctaattgcctaatttggcgaggtctttgctttattttcgccgatttcttgttttctgtgtggggagcacgactctaacttcttcttcttcttcccatttctgggaggggcggggcggcagcgaagcttgtgactttgtttacggcgcggaaggccggagatattggataatttgtcaccgggtgggcagctgattgcccagttcctagattcctactatctctgctcaaatcacttgaattgttttttccccgcacattaatcattgcagtgaatgaatgaatgaacgctggcgccgctgtcgtcgccggcagcgctgctcggcctctgcccggagaaacacccacgaatgactaccaaatcgggattattgggtgattaggcttaattggtggctatctcactgatgaggcgatggccgtcagttgggcaaggtagtaatgcaacacttttcacacatctttggtgttttctcgcgtttttttgtttaattacctgctcgaaaatgaaatgtatcgtattttataaatatcgatagatatcagtggcggtgtgcccgttgatggttagcacaaaaacaccatccggctaagagatggcattttgcggtataaaaataccagataaatgctctagtgcctagttttaaaaacattgcgtaaaatcttaaatattattaataagtaataaattagtccctgaaatatatgatcattcacaattacaataataacaacaaaaggatatataaaagggcaatgtaagaaagtcgataagtaaagtactgaaacgccacttatcgatatcacacatgactatgtggcagcactaaattcaaaaaaagggcgggcctttaattaaacaaaatatgtaaactcctttaaaaaaaaaccgtccccagttaggtttaataagaatttttattagtatattaaaagtcatatggtgttattataatttacttgaaagtatttcgtaataagcatacatctcagccatataccctttatctcaaatacttgttttgcaatttttagaccatcgccgttagtttatgcatattaaatgttgagtttaacatagtaggaaaattaaaaacgtttcattagtaggcttttgtttcgagataacttgtaaagtacacaattagtttgcttatgcgatatataaataactgggctagaaatgaacagatgaaacaaagttatttacagatctcagtaatatgcgattccttcggtttttagttggtgtgggatggctacagtattccctttagttagagtgcattccgctaatatactacatctttttgcatcctgtgcaagttgtatttacacaaaatgtattttatatatattttttttccattagggactttatagttaagtagtttatatttattgtttaaatgtaatgattgctttcaacttatttaccgtatgcaagtgtgtatttcatattgttccatcagctaagtttctctcgttaacaagtttgcacatcggccggaactatataata

SEQ ID NO: 36668 - DNA, 1501 bp, DROSOPHILA
aaaatacgatacatttcattttcgagcagcaaacgctcgacgacgggcagcggtaattgtggagcgatagaaacgccagcgccatgcccatagacatagacgcacgacgaccaagtgccaaaagcgagaaccgagcgtgagcgactgccaggagcaggatccgtaaccacggggtccatccgctagtcaagagagagtgagcaagcgagcgagtgagtgccaagccaagtttgcatttagtttgagcgcccgaccaaccgaaccaatccgaaacggcaaaatgggcaacaagaactcgtgctgcgcgtactccagtccgcagtcggaccgcaagtctaaggacatgccgcccgtcttcgaggagcggattatccagctgggtcatccgccgcacacgtcacagcaccagttggacggccaccatggatccgcgtcggcggtgcacctgcatcaccatcatcacggccacaatcagcaacagaatcagcagggtggcggcggtgacaactatgagaaccagcagaatctgcagcacatctccgagcgagaggcgctggagggcgaggaggatccgtcggtcgatcccactgcagccaccatgttcctggaacgatcaaaggtggagaacggcggcatgacgcgcaagcgttcgcaacagcagattgcccagcaggcgggcagcggcggcggaggaggcggcggcggtggcggcggcagtactcccggtggcaatagttgcggcggtggtggcggcatgaagaagagctcctcctgctcgacgatctatctggacgacagcactgtgtcgcagccgaatcttaagaatacggtcaaatgcgtctcactggccatttactatcacatcaagaatcggcaatcggatcgccggctggacatcttcgacgagaagcttcatccgctgacccacgaccaggtgccggataactatgacacgcacaatccggaacaccggcagatctacaagttcgtgcgcacgctctttaacgccgcccagctgacggccgagtgtgcgatcatcacgctagtctacctggagcggctactcacctacgccgagctggatgtgggaccctgcaactggaagcgcatggtgttgggtgccattctcctcgcctcaaaggtgtgggatgaccaggccgtttggaatgtagattactgccaaatactcaaagacatcaccgtggaggacatgaacgagctggagcgccagttcctcgagctgctgcagttcaacatcaatgtaccgtcctcggtgtacgccaaatactacttcgacctgcgcacgctcgccgaggccaacgagctcaacttccccacggagccgctgtccaaggagcgggcccagaagctggaggccatgtcgcgtgtgatgcaggacaaggtcactgccgaggcactgaagaatgggatcaagaagtggtcctccatggacaacatcagtcagggcgggccgcgacgcagcgtggccatactatcgtga

SEQ ID NO: 36669 - protein, 406 aa, DROSOPHILA
MGNKNSCCAYSSPQSDRKSKDMPPVFEERIIQLGHPPHTSQHQLDGHHGSASAVHLHHHHHGHNQQQNQQGGGGDNYENQQNLQHISEREALEGEEDPSVDPTAATMFLERSKVENGGMTRKRSQQQIAQQAGSGGGGGGGGGGGSTPGGNSCGGGGGMKKSSSCSTIYLDDSTVSQPNLKNTVKCVSLAIYYHIKNRQSDRRLDIFDEKLHPLTHDQVPDNYDTHNPEHRQIYKFVRTLFNAAQLTAECAIITLVYLERLLTYAELDVGPCNWKRMVLGAILLASKVWDDQAVWNVDYCQILKDITVEDMNELERQFLELLQFNINVPSSVYAKYYFDLRTLAEANELNFPTEPLSKERAQKLEAMSRVMQDKVTAEALKNGIKKWSSMDNISQGGPRRSVAILS

SEQ ID NO: 36670 - DNA, 6727 bp, DROSOPHILA
gcgactcaagccctccactttctgctctcacttttgtcccgcgctcatgtataaaaataaatatgttttgtagaaacgtgactattatattcttaacaataaatattatatatcccatcgtataggtagctatgtgcatttgtagagtggaaagtttttgaaatctttgccttcttcttggatttttggtttttctttttcttgtggggaaagtctgttaggggttggtgtagagtatatacaagtcgtatagctagttgtcaggtattttttggtttagcttttagttaggtacttaatatctagacagatcgacgcgtctgtcgttcctttcttgaaaaaccactcgtttaattgagcaattcgaatgcttggtaaatgcaaacacacaaaaaactaagggcaaaaataaaaggtagaaacgattacaaaaatatatatgtatttaattagaaacgatattgcgtacatcgaacttagacaaatcatacgataaattccacatttgactaaaactaatcaagtacaacacaagtacaactgaattctaaatataaatgctcgcaacgaactaacaaattcacaacaaatttcagttgaactcctttgctatttacatctacgcgttctttttttctccactgttcgtttgtatttgtgcttggccctaatattttcatatttatcaatttgcttcttccttttgcaacaacaaagtaaacagtatttatacatatatatcgatattaatgtacctatgcgtatagatgatgtacgtttattctaactctaccacaattcacatagagagcgcatttgaagcgttttgttatcaataattctaggctgattctaagcttagtaaacaatattcttgcagcttcgttcgttcctcggtttctctcagtgtagccatcaaagtttcctcttgtgttccgtttttccgcattagttttccgattcagttggccgctggccgccaggtggcgcaattgtccccttaggccgcagcgccatctgccggctccgcagctggctcactctgctcgccatcggccgtttccgtttccggcttgctttcctccgcttccgccgccgctgcagctgcagcttcctccgctgcggtggccaaagcccgagcctcggcatctgaaaacaggtgaatttttaattttccaattcctcactgcataagttaattaagcataatttgaactattttccaggccacttacagactgcattagaccataatttgtttcagatcatgaaagctgttattatatttaaaattgaaataagtgtaagtcatgtataaggaagtaaataaatgcaaattccaacttaaaattccaaggacttttaagcaaaaatcatctttaacttcagagcaagcttgatggcacataacttcctgccatatcctgcaatgcctctctcatcattaactttagatcgtaataggattgggtttgtcttgggaatggtggaaggtagaggctcttgattcttgatgcctaatgaccgctctttcggcgccgttctatcagctctgcgtaagaaggtttatgcatgaataataaatgcccattggcaggcggcagatcaaagcgaaggacatgtcaaactcaattagcgctctaaatgtgactacaaaaagcggccgagtcgccaggcaattaatatgataatgaaagcgcaccacactgagaactacgcatggcattggcatttcacgaatatctcttcaattcgaattctttactttgaatttgcctcagtgcagtgaactcacctttgacggcctgctccttccatatccgcttgttctccaccagacaggtgagccacggcttgggtatgttgaacttggaggcggtggtgccggtgacactcttgcgtgcgaggcactcggcggcggtggtcttggcctcggtgcgatgatcccgtggcttgtccatgctgggcgtgattcccgaattgggtatgacgatcgccgagtttgtcgtggagttagcggtcgtctcgtgctccaccagagtggcgggcttggacttgttcatcggcgcaattggcgccagtatgagctccagcatgtcggacatgacgcccatgctgggctccacgatgaaatcgatgaaacagatctgagactcggccaccagcgtattgttgcgatcacacagcggactgaagggcaaacccagctccttctcgaggtcaccctggcggaagaactcctccagcagtagcatcgtccagcgatgatggacgccccactgcttggccggatgcgagatgtcgcagcagtggagaaccagggacagcaccttctgcttgtcaatggtcgcctcctggagcgtcagcagctggcgcatggccttcatctgctgaaagtgattggtcatatcggtgccgagtaccatttcgataaccaggccgcgcaattcgcggaactcctcgcgcgacaaatgcgacagtatgttgtactcatcctcgcgcagcagccggaaactggcgctggcatgatgattctccagcacagcccgatcgttgtacagcagtgccgtctccgaaccggacatcacatggaagttattggtggtgccggtgtgctcgtaatcgtggagcagggcggccagcagcgaggcaaagatctccaggtccgtcagccagttcatcagacccgtgttgcacaggcagtagtggatcgtctgcatcacgtccacggcgtgcagattgttatgatacggattccgataccggcagtagccctcctccacgcgatgcaggaacgcctccagaattcccggcgcaatcttgaacttgtgaatcgagccgtagcggttgaagagctcataggccacgtacttgaccacctggccgctggctgcctccgtcagggcgaacacatcgaaggtccagtcgtccaggttctgtgacggattattaaggtggttagggattggttttggatgtgaaagagtaagaaggggtttgtcttgtattgaatgagtactgtgtatgttatgaagcacccaccttgagcagcctgaccacgtccggtgggaaggccgttagggccgagctggagacgcggcgatacatgcggtccacaaagatgccagcacggatggcgtgggccaccgaacggaacttgggcttctcgtcgctcttgcgccggctggtggccatctggcgggtgaaggtggaggccagccactcgcgcacctccggcggcactgcatccggctgcacctccgacagctcatcgtcctcgtcggccaggcgcctgtttgaagaacaacccgaatgggtttggggttggggttggagtggaaaagagaatcatctgttagttgaattgcatttgagggggttttccgggttaatcggataccaaaacaatactcagtaaatgtacaaaaattaaaaccgaatcttaagttggttaagactgctttcgagttcgacaagctgtagctaagttcaacttaaaatggtagccaagtttaaaaacaatcaaaacttaaaacgaaaccaagtttcggtgttgattaaaattttgcacgttaaaaaggaaagttttttggtgttttcggggtagaaagaaagtttagtgttttgtatagtataaaagtttaattagtgagcgcaggaaaataagtagtttcacttggttagagcaacaattacaaatacagatagttatagattatacgctatatatttgcagtagctagttaacatctctaaaagtttgtggacgtgtttgggtgggaggggtaaagtggatggtgcaaaagttgctactatgcaaaaagctaacaagagcatgcttcgtgtggcatgtggcaagtggcatgtgtgtgacgcttgtgtgggtgcgagtgtgtgtgtgtgtatattatggtggcgactcaacggattgtcttaattgcatgccaagtatctgtgcattttatgtgcaacattgaaaaaacgacaacagtaactgcaacagaatttcgtgctcggtacggccggtttcacttgccaaagtcaccaactggcccacaaaagcatcccaagtcttcctaattggctccggaactcgccacccacactggcccacccacccacgcacagttggcgaaatccgtagtaattggccctatcaatgtcgctcctttttaccaggaacccaatcaatgcattcccttgacaacaagatgaataaccccacaaagacaacccacattattcccaggaagttgttgcaagaaatgaatatggatatattaaattattataaaattgttattatagtgtatatagatacacttcatacatatattttaatgatttgaatttttagaatttagaattaatgttagtgaatgcctcatagtcgaaagataaatttaatatcatcatctctagaaacatttacttatacacatagtttggctaagagctcaaagtataggatgacaaaaatggtgaatattaaatttctattaattaacttcaaacgaagatgacagttttcttggaaaatcattttcctctcattactggccattttcctcctacccacaatatgaaagcactttaacttaaataaaaagtgagtggaaaaagaggggacaagtgacttaagccaattagcgaatgattcaattatggttaattacactaacttcagagctcagtcagtggccccatctgcatctctactcacaaataatctagactttgcacacgatttctggccaggattctcaagtagctcttggcttagtaggttaacttgagatgatagcataacggttggttaggtgaaccgcgaactaaagaaagcgttaagcttaagtgggccagggtttttttttaataaatgtaatcaatttaaacaatcaatttaatatttggtaataatgagtatcacatgttagttttctgcacagctaattcactttttggtatctgataagtatcacttaaagtaccacaagatagtagatactgatttcacttaaagaacttgcacccattgcatagccttcacttttgtgtgatacaaataccctttcctcctgatcccataattccccaactgaagttcccaaaactgggtgtccttcatccttgcaggacactgcccataaagtgaggcgagtgtgtgtcatgtggaggatttattctctgtgcacttcctaccaatgttgcggttggtctatttattttgcagcaatataaattcactgggcttttcagacactgtgtgtgtgtgtgtgtgtggttttttttttttgttggttgcagtagaattacgccggatttaataccattcgctcagcatggcatgctccacttcggacacacagaacatagttagtgtctatcgtatggggatctttgttttatgtcttaaagaaatccgtgactggatatggctagatcgcaccttttcttcttctcctgcgtctccttggcgcgatactgaatgatgaactgtatcagctcgacggtgatgacgctttgtcggctgctttcacgcctcagacgactcatggcgcgaacggcgacgacgaccacgaccacggtaatgacggtcagccggctggagcggctcgccgatggctcctcagatacagatacagatacagatacagatactcctgctggctcgggctcagtctcagatacaacaccctcctcgctgctcgtacccggttcgtacatggaattcagctggaggttgactttgtggcaatgtcgtgcccgcttttttggcactcgattaatttaatacatcactttcacttggacattttccgtggttaggggatgggggtgctctgctctattaggccgacaaatttcactgccacttcactctcgtaattagctggcccgaaaagcaaaatgcgcttttaatgacggcggaatagcaaatatttgtgcagcacgtttttttttcgggtatttcgtctactttttttctcttttcgaatattctttcttgttgccgctcgttggtggaatttttgtgtacttggcccgttgcgagttaaatttaaactgagcgaaaaaaaagtacccgcaaacgcttggcgaaattttgccacagaaagagccattcccagttagtgtacaccagagttgcgtgatcctgggagtccgcggagtcctggcccagctggattgcgtgtacatggtgcggcacacgccaactgcaggaggaggaaaaacactggaggacggagtttaaggccggcaggaaaaaatggaaaactcggagaaaactgtgctagctgggccatatcaattatgtcagcagtaggacatcgccgagtcatgccaagcccaacgctcaactattattatgtagcaaaaggcactgagagaaaaatccgatgtggttcacaactaaatgcaaacatccttgcagagctttatagtagatttgtaatataccaatttaacattataatgccgttagctgaatctcaaatgcttagtttttactagaactgaagcttcaagttgagagcttttagttatttctcaacttttttctaaatattttaaagaaagtttgttggtgttttttaattgtttcaataccatctaattgtattgtaatttcgccctttttctgccagcgtattcccaaggcggatctagtccactcgagcgtgtatatttttactatttgccacaaaacaattacacaaaatgc

SEQ ID NO: 36671 - DNA, 1818 bp, DROSOPHILA
atgtacgaaccgggtacgagcagcgaggagggtgttgtatctgagactgagcccgagccagcaggagtatctgtatctgtatctgtatctgtatctgaggagccatcggcgagccgctccagccggctgaccgtcattaccgtggtcgtggtcgtcgtcgccgttcgcgccatgagtcgtctgaggcgtgaaagcagccgacaaagcgtcatcaccgtcgagctgatacagttcatcattcagtatcgcgccaaggagacgcaggagaagaagaaaaggcgcctggccgacgaggacgatgagctgtcggaggtgcagccggatgcagtgccgccggaggtgcgcgagtggctggcctccaccttcacccgccagatggccaccagccggcgcaagagcgacgagaagcccaagttccgttcggtggcccacgccatccgtgctggcatctttgtggaccgcatgtatcgccgcgtctccagctcggccctaacggccttcccaccggacgtggtcaggctgctcaagaacctggacgactggaccttcgatgtgttcgccctgacggaggcagccagcggccaggtggtcaagtacgtggcctatgagctcttcaaccgctacggctcgattcacaagttcaagattgcgccgggaattctggaggcgttcctgcatcgcgtggaggagggctactgccggtatcggaatccgtatcataacaatctgcacgccgtggacgtgatgcagacgatccactactgcctgtgcaacacgggtctgatgaactggctgacggacctggagatctttgcctcgctgctggccgccctgctccacgattacgagcacaccggcaccaccaataacttccatgtgatgtccggttcggagacggcactgctgtacaacgatcgggctgtgctggagaatcatcatgccagcgccagtttccggctgctgcgcgaggatgagtacaacatactgtcgcatttgtcgcgcgaggagttccgcgaattgcgcggcctggttatcgaaatggtactcggcaccgatatgaccaatcactttcagcagatgaaggccatgcgccagctgctgacgctccaggaggcgaccattgacaagcagaaggtgctgtccctggttctccactgctgcgacatctcgcatccggccaagcagtggggcgtccatcatcgctggacgatgctactgctggaggagttcttccgccagggtgacctcgagaaggagctgggtttgcccttcagtccgctgtgtgatcgcaacaatacgctggtggccgagtctcagatctgtttcatcgatttcatcgtggagcccagcatgggcgtcatgtccgacatgctggagctcatactggcgccaattgcgccgatgaacaagtccaagcccgccactctggtggagcacgagacgaccgctaactccacgacaaactcggcgatcgtcatacccaattcgggaatcacgcccagcatggacaagccacgggatcatcgcaccgaggccaagaccaccgccgccgagtgcctcgcacgcaagagtgtcaccggcaccaccgcctccaagttcaacatacccaagccgtggctcacctgtctggtggagaacaagcggatatggaaggagcaggccgtcaaagatgccgaggctcgggctttggccaccgcagcggaggaagctgcagctgcagcggcggcggaagcggaggaaagcaagccggaaacggaaacggccgatggcgagcagagtgagccagctgcggagccggcagatggcgctgcggcctaa

SEQ ID NO: 36672 - protein, 605 aa, DROSOPHILA
MYEPGTSSEEGVVSETEPEPAGVSVSVSVSVSEEPSASRSSRLTVITVVVVVVAVRAMSRLRRESSRQSVITVELIQFIIQYRAKETQEKKKRRLADEDDELSEVQPDAVPPEVREWLASTFTRQMATSRRKSDEKPKFRSVAHAIRAGIFVDRMYRRVSSSALTAFPPDVVRLLKNLDDWTFDVFALTEAASGQVVKYVAYELFNRYGSIHKFKIAPGILEAFLHRVEEGYCRYRNPYHNNLHAVDVMQTIHYCLCNTGLMNWLTDLEIFASLLAALLHDYEHTGTTNNFHVMSGSETALLYNDRAVLENHHASASFRLLREDEYNILSHLSREEFRELRGLVIEMVLGTDMTNHFQQMKAMRQLLTLQEATIDKQKVLSLVLHCCDISHPAKQWGVHHRWTMLLLEEFFRQGDLEKELGLPFSPLCDRNNTLVAESQICFIDFIVEPSMGVMSDMLELILAPIAPMNKSKPATLVEHETTANSTTNSAIVIPNSGITPSMDKPRDHRTEAKTTAAECLARKSVTGTTASKFNIPKPWLTCLVENKRIWKEQAVKDAEARALATAAEEAAAAAAAEAEESKPETETADGEQSEPAAEPADGAAA

SEQ ID NO: 36673 - DNA, 3918 bp, DROSOPHILA
caatcagccacgaacgatgtgagccaaaatatatatgcttactatactcagaactttcgaataccctaacatgaaccaaatactctcaaaaaaataaacaaaagtaagctatataagtgcatatgtgcacactaaatgaaaattacggcaaacttgtatcataaattccatttcatgtttatgttacacaagtagtgttccatttggcagcagccccatccaaattcccatcgtaatgaaacaagctattttcataaacttccattagatacaaccccccaaaaaagaaaaaaacccatgatggaaatggcctgcactttcatcaaaacgagagagaagcgttcgataaaaatccagctagggcatggcaaatcattgtgggactctgctcgcttaatcagtctgctgggagctgttatggctggtcgggatcgctgtccgcctggcctggcttggtttcccactcatcccggttcgcacgcccgttggcagtttcaatttcgtcgcgcttattcgccgcatttccagcagattggagctggatggcgttgcagcaatgcatataaatgacgtagcaattgaaagccatttgttatgcgcagctttgctttgtttcgcaattagaattgccaactggggacactcagtcagcttgaagacgtttacatggcttaaagagcagcagtttggattctggttaagcagaaaatacatcttcaatgttgcttatatacatgtgaaattacaatgtactcactttatttacaataaataaaggcagcagagtaagcaacaactattcgttcttacatctaaaaagcaaccggcttaacatatttaaatctcatccaactattaattggatttacttgaaataatttggaacagcacaggagcgtaattctatatcttaatgctaaccaactaggaactaattgagggaaatgttgtaagttttggccacgtgagatttggtttgtggttgcgcccagctgcgccatcagatggaagttgtttgtctgcggttccatcgccacacggtggcgtcatcgcacacgtagaccagtacgctggcatcgcgagagaaggctatctggcgcacagtggccacgctacgcgaattgtgcagggtggtcatgtgtgcgccctcgggatcgctgggatccagctcccacacatacaccttgccctgctgattgcccagggcaatcaccttctgccacggattgaagccgaatctcacgaaccagatctcgcactcgtcgtactcgaattccgcaattatcgtgcaggaggagtcgctcggcttcacctgctcgaagctctgatgtagttgtcccggtttccagcagacaatggcattttcgcaggacttggagagcacaaagttgccgaaccactgcacacagtccacatagttcctgtgtatatcccgcgttgaaaaatcggggaagtgcttggtcaccgtggggaaaggcagcgttgacttctcctggctgaaagtgttcgacagttcgatcttgtgatggaactcgggcgtattcagacaccacagcttcagcgagtgatccatgccgctcgacacaatgcgatctccacgcatattaaagtcgatggacagcacctcatcgcgatgtccctccactccgcccaggatggcaatgcacacatggctctggatgttccacaatcttatcgcgtgatccttgctgcccgaaagcaaaagctgtagcttgtgcggatggaacttcagctcgttaatggcctgtccatggccaatgtagttgcccaccgcctcattctgctcgacatcaataacccggatgactccgcggtatccagcagcggccaggagaggtgaagaggtcttaaggtcgtacgaccaggcgcaggtgtaaaatacttcatcgggctgggaagggaattcaagatttgttgatgtatttcgagtttgtacaattacatttgcgaccatattctcagttactctcggctaaattaacaatataagctttaatttgaaaacttgactgttatgaaaaaccaaacttaatacaagaaatgataaatgtttggatattgtgaaaccatgctgaaagcctgtaacgattgttcttactttaaaacaattaacaaaagcaatgatttaatagaaactttgactggatcccactttttctacagctttgaatgcgatgtctaatgtatgaagcccctaactttagccaactgatcaatagggtcttgaaagtgtattctgtatcctggcgactcacatccggatctgcatagcagtggagcagctgcatcccgccctgtcgagggcactcgtagacggtcacccggttgctgcccgccgtagcgaagacctgtggctcatccttgcccagcagcgtgttgaaggctacgccgaagatgttggctccgtggttctccttcacgtgggtgcttcatggtaatcatttgtaggttcagtatcagtggccagctgagaaagtgcatattcttactcgtatttgtaggcggcgcgactttttggcttcgatttggtgctccggcgaccgcggcgcttgctgcgcgtgctggatgacggggacttgctgcgcgaggtggtgctgttggtggtatagctggccgactcatcctgcagccggcacatggcccaaaagatccattaattctcggttcgcacagccatttgtcattcgctactcacgccgcatgattcctccgactcctcgggctcgttgccgtttttcactttatcactgctcatttcgaacgcgcggcacgtttgtacggttaaatgaaacccaaattaggccgcgacttcaatgaactattcgataatgctttttttaaatgtttaaataacgaggcgaatgaaaatgtttttttttggcggcaatggtgtgaccccagtcacggatcgcgtaaaatacccaggcattgcaggcagtacggtcttaccattgcgcagcgtggccacctggtcacgatcggctggccagtgttggtaaacattaaacggtatttaacacacttaggcgggaaagttaaaaaaagttcaaaaacgacaaaacacatgcgcaagctagttttttaatatagaaaacaaacaaatgtaggacaatcaacatgccatggattcatgtgcggtattcaaactttgtacatgtattcacaaaattacactggtcgacaagactaggagagttgctgcttgcgagtggcgtcaaaagtggaagatatagtttctcagaaatgcaaatgtatcatacaaatactttaagcagttttgaatacatttaaagtatatcttccagttctcactccttcaagtgcttactacgtatgaatgtaagtttgatttaatagttgcacggagtatttaaacgtagtaagcaattttttgtccaaacgcggcaacgaaacatttacaatcccgctgagcgcggctggggaacgaaacaagtgtccttttttctttttttttttttgattagtctaggataaaatagttatttacaacagaagcgagcaaaagatttggggtaggggacagaggctagacagaagattacagcagtggaaatcgcagacagaggtcagcagacagatggatagattggataaaggagagatagagagacagagttcatagagttatgtgtgtatatatagaaagtagttcattctggagctgtgtggttgttggttggttaacgcaaacgtgaaacgataaaggcaaatcgaacgaactgaagaggcgtaacggataaacgttagtctagcatagaaatcaaatttcaagtacgttttgttcgtcgacatggacctggcccaggtgggtgtccttaggcggcgttgccgatgcaccgccgctgggttactgcaactgccactgctgccggcact

SEQ ID NO: 36674 - DNA, 1420 bp, DROSOPHILA
ggtcacaccattgccgccaaaaaaaaacattttcattcgcctcgttatttaaacatttaaaaaaagcattatcgaatagttcattgaagtcgcggcctaatttgggtttcatttaaccgtacaaacgtgccgcgcgttcgaaatgagcagtgataaagtgaaaaacggcaacgagcccgaggagtcggaggaatcatgcggcgatgagtcggccagctataccaccaacagcaccacctcgcgcagcaagtccccgtcatccagcacgcgcagcaagcgccgcggtcgccggagcaccaaatcgaagccaaaaagtcgcgccgcctacaaatacgacacccacgtgaaggagaaccacggagccaacatcttcggcgtagccttcaacacgctgctgggcaaggatgagccacaggtcttcgctacggcgggcagcaaccgggtgaccgtctacgagtgccctcgacagggcgggatgcagctgctccactgctatgcagatccggatcccgatgaagtattttacacctgcgcctggtcgtacgaccttaagacctcttcacctctcctggccgctgctggataccgcggagtcatccgggttattgatgtcgagcagaatgaggcggtgggcaactacattggccatggacaggccattaacgagctgaagttccatccgcacaagctacagcttttgctttcgggcagcaaggatcacgcgataagattgtggaacatccagagccatgtgtgcattgccatcctgggcggagtggagggacatcgcgatgaggtgctgtccatcgactttaatatgcgtggagatcgcattgtgtcgagcggcatggatcactcgctgaagctgtggtgtctgaatacgcccgagttccatcacaagatcgaactgtcgaacactttcagccaggagaagtcaacgctgcctttccccacggtgaccaagcacttccccgatttttcaacgcgggatatacacaggaactatgtggactgtgtgcagtggttcggcaactttgtgctctccaagtcctgcgaaaatgccattgtctgctggaaaccgggacaactacatcagagcttcgagcaggtgaagccgagcgactcctcctgcacgataattgcggaattcgagtacgacgagtgcgagatctggttcgtgagattcggcttcaatccgtggcagaaggtgattgccctgggcaatcagcagggcaaggtgtatgtgtgggagctggatcccagcgatcccgagggcgcacacatgaccaccctgcacaattcgcgtagcgtggccactgtgcgccagatagccttctctcgcgatgccagcgtactggtctacgtgtgcgatgacgccaccgtgtggcgatggaaccgcagacaaacaacttccatctga

SEQ ID NO: 36675 - protein, 425 aa, DROSOPHILA
MSSDKVKNGNEPEESEESCGDESASYTTNSTTSRSKSPSSSTRSKRRGRRSTKSKPKSRAAYKYDTHVKENHGANIFGVAFNTLLGKDEPQVFATAGSNRVTVYECPRQGGMQLLHCYADPDPDEVFYTCAWSYDLKTSSPLLAAAGYRGVIRVIDVEQNEAVGNYIGHGQAINELKFHPHKLQLLLSGSKDHAIRLWNIQSHVCIAILGGVEGHRDEVLSIDFNMRGDRIVSSGMDHSLKLWCLNTPEFHHKIELSNTFSQEKSTLPFPTVTKHFPDFSTRDIHRNYVDCVQWFGNFVLSKSCENAIVCWKPGQLHQSFEQVKPSDSSCTIIAEFEYDECEIWFVRFGFNPWQKVIALGNQQGKVYVWELDPSDPEGAHMTTLHNSRSVATVRQIAFSRDASVLVYVCDDATVWRWNRRQTTSI

SEQ ID NO: 36676 - DNA, 14409 bp, DROSOPHILA
cgtagacggtcacccggttgctgcccgccgtagcgaagacctgtggctcatccttgcccagcagcgtgttgaaggctacgccgaagatgttggctccgtggttctccttcacgtgggtgcttcatggtaatcatttgtaggttcagtatcagtggccagctgagaaagtgcatattcttactcgtatttgtaggcggcgcgactttttggcttcgatttggtgctccggcgaccgcggcgcttgctgcgcgtgctggatgacggggacttgctgcgcgaggtggtgctgttggtggtatagctggccgactcatcctgcagccggcacatggcccaaaagatccattaattctcggttcgcacagccatttgtcattcgctactcacgccgcatgattcctccgactcctcgggctcgttgccgtttttcactttatcactgctcatttcgaacgcgcggcacgtttgtacggttaaatgaaacccaaattaggccgcgacttcaatgaactattcgataatgctttttttaaatgtttaaataacgaggcgaatgaaaatgtttttttttggcggcaatggtgtgaccccagtcacggatcgcgtaaaatacccaggcattgcaggcagtacggtcttaccattgcgcagcgtggccacctggtcacgatcggctggccagtgttggtaaacattaaacggtatttaacacacttaggcgggaaagttaaaaaaagttcaaaaacgacaaaacacatgcgcaagctagttttttaatatagaaaacaaacaaatgtaggacaatcaacatgccatggattcatgtgcggtattcaaactttgtacatgtattcacaaaattacactggtcgacaagactaggagagttgctgcttgcgagtggcgtcaaaagtggaagatatagtttctcagaaatgcaaatgtatcatacaaatactttaagcagttttgaatacatttaaagtatatcttccagttctcactccttcaagtgcttactacgtatgaatgtaagtttgatttaatagttgcacggagtatttaaacgtagtaagcaattttttgtccaaacgcggcaacgaaacatttacaatcccgctgagcgcggctggggaacgaaacaagtgtccttttttctttttttttttttgattagtctaggataaaatagttatttacaacagaagcgagcaaaagatttggggtaggggacagaggctagacagaagattacagcagtggaaatcgcagacagaggtcagcagacagatggatagattggataaaggagagatagagagacagagttcatagagttatgtgtgtatatatagaaagtagttcattctggagctgtgtggttgttggttggttaacgcaaacgtgaaacgataaaggcaaatcgaacgaactgaagaggcgtaacggataaacgttagtctagcatagaaatcaaatttcaagtacgttttgttcgtcgacatggacctggcccaggtgggtgtccttaggcggcgttgccgatgcaccgccgctgggttactgcaactgccactgctgccggcacttcccgcttgactctcggccgccttggcacttggctccgcggttgcgctggaggaggtggtggtttgggatgtcaatgtggatgtgctggcgggcggcggtggtcccttgtcgccgggatccttcgaaggactttcttccatcaccgattcccttacggtttccagggcgggttgaagcttaggggcaggttgtgcgatagtttcgctcgaggtgttggatggtggacccgttgggccactgtgggtctgcggcgcctgggaaacgcccttggtgcgactctctatgctgtcctggttgtcagcgcctggtgtgacacctgcacctgctcccccaggcgacgcctcctgcaggctgcaactcctattggagttgttgttgtcctgctgctggtcatcgcgtccgtggctatggcgactgcagttcaggttcttgcaattcccattgcagccctccctgcagaagtaaatggccggcatacgttgggcgccagtttcgagtgccaaggcggtcaagtttttcggcgcccagcagttggcagtgagtaacagcgaaaatgcaaatgggcaatttttgggcaacgagacaccacgttgatttgacgttgcatagcattcggattgtttgtgtgttttgtgcaaaagttttcatttagttttcatgtttttttttttttttggttttaggtaaatagttttggcaatagaaagaaagaatatataaatagaacatcagttgagagattgtgataaagcttttgggtttagtaggggcagtggattggacttttcccacgaagattgccttactctaaataaaatatctgtcaatcatgttctaaagttgaaccttcaagaatttcactgttcacatttatatacaaaaaaaaaaaacaaatattttgttaaaatagacaatacagttcaacaattcgtttccttctggtagggcaacttttaaaaatgcatcaattccgaaacaaaacaaaaatcctagacgaaatggcaatcggagttaactgcgtaactttgtgagatatttcacgaaaatcaaaattaaaacaaatgggaaaacgactttcaactcaacctcacttggcaatgtaaatcgaagaatcgtgtcatgtgtgggctcggcaggtagaaaaatgtttattaattcatgttccccggcacctgaatacaatggataccgcatactccatacatatgcagatgacattcgggagtggttcggttgtttttttttttttttttgagggggttgatttaattgaaagtgtggtaaataataaaaatgcactgatgcattgggcttgtatttgtggagagtccacttttgcggctgggaagcgaaccaaaatcgggttgtaaaatgcatagcttacaccggactactattttaacatttttaaaatcaataaaaaaacgtcgttttctgacataaaaacagcaattaggctcagtattcaagctaacaatatgttttgcaatcaataggctcgataaaagatattcaataataaaaaaaattgctagctggaatgttgagttctgtaaaaacccttaaaaatattattccaatttcggcccttcaaaaatattctggttaaagttgtatgtcaaattcaaaggcgaagttatagcagaaagaaaggagaacggtttaaattcagtagaagcacacagagaattccatctggtgaattgacaaacgaattgagtagacgtaatgcaatacaccgaaagaaatggcgagcacataagtaagacaccgagagttgagttagagacagtacttcaataagatacggtgctgcgattcgttaggggcggtgttttggggtcttaaccttagcttagtaactctcaagatccttagaatacagtacacagttatacgttacgtaagactaggctatgaaggctaagaaatactcgatatctgcaaacgttctatggcaatgagttcgatgagttatagaaagacagtatagatacgatcaatggcgataatgtagaagatgttgaagatgatggtctagagttcctttttattactggtagagcaaggcaaagaatagatttcgataatcgaaatacacgaactgaagagagcactacaaagaatgaggatagaaaaagtcagtaacagagttagaaagaagttgaaagttgaaaatagaaagaggtgagatataggtgaataatagtggttattgtgggttattggattcatgtggacgcgagttggggtatggttttactatagaagagatgttagagttcaaaatcaacagagttaacgacaaaaccaaagcgaaaaggttggctcgatgggaacacttactcttcgctctcaacggatgaggacgcaatctgccccaactttgttttacctgttgtggggcttctgctcaataacacagacacacacacagtaacagtaacagaacggatataaaaagaaaaatattcagatatatgtatacattcaataggcttaacaaggacctcgaacaaacgaaggtttctttttcttttaggaatatgcttattatatagcgaaattagatgattcgatgatgggtaaatggacttggttatcgctgagggggaaagcttgccttgggtgcaaatccgaaattttgaaactacgcagcatttcagttattttgtatcctactcaaaatggttaacaatgcctacaccaattcgatgggagccccaaagaagcccaagctgaagcagagttgtccacagatcatttcgattcgactcgctatcctcttggtcaggctagctcgccaagaagcttgcaaaatttttgtttttttttttttgggaatatctcattgggccgcagagccaccacattcacctaccttgattcgtctatgaagaccgcctcgagcacacgagccgcgtagtgcagattccgctgcatgtcctcgtaggcaacggtctcatgatccatgcggcggaggagactgcgtatcctgtggaaataaagaaaacattagttttatttgtgtaactataaatttgtaactttagcatatacgcttatgtgtatgttgtgataaaaaaataataataataatggttacagaattgtgaagctcaaattttcaattcaagtatgacagtaagaggggagttgttatgtacataatttaaataaaataagccttaaaaaaaaataataataattaaccagttggaacagctaactttgggtatgtacaaatacaagtattactcctaacttaaaaaatatactcatgtctacgaatatgtcataaagagtaaaaatatatgcaaagtcacgttgacattaaaatatttccttgtttaactcacttttatgtacatttttttttggggattagaaattaatgagttacgaactattgtgtatgtataaagcaaagtgaaatttaagatttacatggacttatttgtcgatcagatgttcttcttttgatctaattgcatccatagtatctaaagaacaagactaatcattatttcctttacattttcatcatgacctgcatctattagactaaaccaaaccacttttgagtccagacgtttcagtctgattaacttaaattaagtcactgcaataccctgatacggtaaattgaaatgtatcgcttacaaaaaaaaaaaacatttcctgttgcatatacaaatatatttgcgagtcgatcgactgaaagtctcattcgcatcggatcactccaaaaacttataccatgtatagcccaattttcattgcactgtgcctcctggcatttgtcgtcctaactgaagcccaagtcacaagacccctttgcccgtgcccaagaatctactttcctgtctgcggatcggaccacgtcacctacaccaactcatgcgaacttaaatgcgcagcgcaaattaaattgatttatgtggtcaaggccggaaggtgctagtatcagatatacaaataataaatatagataaaaaaacatcacacaagtagtagcatttgataacaaataaatataaataaatatattaaaaataatctaaaaattaaatataaaatatgaaatacaataaaaataaatattaactgtagtgaaacgttaaaagtcaaagccgataccacgaataaatcaatgtcataaaacgtgaaattaaaatgtatcgctttagatgaattccctttgcttattcccttaagaaacagtatccatcggatttgaaagttgtattcgtatctaatcagtgaaaataaaatacaatgcattgcaaagttgttttcgctgtgtgcctacttgcagttttggtcctgactgaggcccaaaaatctcgttgcccgtgtcctaaaatctctgagcctgtctgcggatccgacaacatcacctaccctcacttatgctttctcatatgtaaagcctggcatgaaaatgttaattttgtcaagaaaggaagatgctagtaatcaaaagtatactttttaaatatattttggagttataagaaaaaaacttttatactcttcttggagaaagcgaaaaaggttcgtcacaatggctgtatgttaaatatgcgatcgttttcgcctttgtaccgcggtataagtgggcttggatttatattaaagtacagtgatccctcgtttgctcatacatcgcatacctactatagttattggttatttgataggaacttaccttccggccgctttgttaagagcatctggcgtgtcgactggcggcaaactttccgtatcccattgcccggcggtgaacgacatattcgagggcgtttcgaaggagtgtcccgactcctgcggtatatcggtgtccccccgcaggaacgaattgccgacgccaacgttaatcgaatgcatggcggtataatcggccgaatcgcgacccacgaccatttcggtttgcgatagattggccgacgagatctgtatattatcggccagatagttggttgcattcggcgatgatggctgcattttcacggcggcggaggcggctggtccggagtttgatgggccttgattgctggatcggctgtcgccggcggacgcggatccgttggatccaccggaagcacgaaagctcagtcgctccgcaagtggttcactgagcggcgtctgggcgaagccaattcccggcgctgtgctgctgcaggcggtggatgagggcgatgccagttggccgtcgaattgggtaaagttgcggctattggtgcgtcggataatcgtcagtgagccgtgtcctgcaagaaagccgttgagaattcagtgggcgaagaactgaatcggttgcttatatatatagttatatcactctaactgttgacacattgattaaggacctactgggatctaacgaagcacacaaggcagccccaaaggtcttgaaaatgcaagaagggtttgggtgaaaccagtacagtggtaacagagctatgcgaaccatatgcaaaattaggataacaggtatagaattgtgtgaagaaattttaaataaaaatttctttttattaataattctaaattgtgatttatttcattaccccacttgtttttatattaatatacatcattttaatcaagttgtggttctgaaaacaacttttttttttaattttaactttgcatttctccaccgttgttcgatcaaaaatcgttggacgcaatggacaagaaatcaataatttattcccatcatttgaggccattgtagcatggcagtctttatttagtttagcccccagtgagggcaaaatgcttaacgagcagcgaacaaaagccccaaagaagttgctctcccccaaaggcatgtcctggccccacccccccccccatccgcaccaatccccctctttgagctcgctaagtggcatcatcctaagttggccctaagttgccatcccgggcgtgtcgaaaaagtgcaaaggatttatctgtgtgtgtttgtcaagtggcaagttgggggtttgcagggagcaatctatctgcaaataccccaaccccacagggattgctgccccaagaagagcggagtgtcttcgtactggctgcgagaatcttaactgcattccatttattttgacagtgcaagcacctcggtagaaaaggtgatggggcagtcataaaatccgctttatgctgcacttaaatttatgttacacccgagattccttcgcttaactgctagatacgcgggctctttatcgagtcgagttttttttgggatgaaatgttttatgctccttttactggcgcctcttcacgtccttaatgactttcaacgcttcattttaccccacaatgttggggaaaccggaggaaagtgctctgctggcatccccacctggcatcgccttacgactaaaaacccaattccgtatgtagttttgacccatgtgagcacggcgatggaaattgccggcaattaaatggtctgatggccgcataaagtgcgtttcgcaactggtaacatgatcgatggccaaccatcaatcttttttatacactaagacagtttaggtttccatctactgcagtgcaaatcataaatatatttattcgttttgtaaactactgtataataaataagtaaatatttagtgcgtctgtccgtccgtatggaacattttaatttctcgtttgcacttccactacttaactaatgggtatcttatattcggggaactcgactaaagcctatctggtgctttatttgctagcccaaaaaatttgatacattaaaaactgtaaatatagtgcgaaattatggatttaacgctctatggatttcctggctaatgagtatataatcaaacttactatcaggttgtattcattatattctgcaacgatgcattgttatattcctattgcgttttgcttgttcgctcttttggaattaacaaacggggtgaacgaaaaggaaagttctacctattgtgtatcctattttaatggtgtatgctgggataaaagatttaatatgtggcccacgggaaagtagatgcgataaacgcttgtgacttgtaatcatgataccaagtaactttcgataataaagttggttattttctttttgtaagctatgtaagtagatttaatacttacaaggtatgatataaactttaaagtaaataacattacttcttcgaaatagtatatttacggacaattaaaatgtaagttaacgcttcacgttcaatagaaatctcttgtaatgtagtgggaaaattacaatttaacgctgtaggtggtaatgatttcctcatttatagatatatataaataaatctcagttgctgttcactatattttgtggccatgcatttctatcatttaaatgcgctttgcgtgattattttattagatttgaccaacgcgttgaatccaaaggaaggatctactttttgtgtacctaactatagaggatggtgctgggatagcaatgcgaatgtttggacctacggaagatagatgcggatagatcaacgatcaggttgtaaaacaagccgcataagaatattttacgaaaaataaaaacattagggtcagtaattccagtagtttgcaataagttatgtgtatattaacatgttgactattgtatccgaaatgttacaataaaattactgcctaaagctgttaatgctatttccaaaattttctagccgcagaaagagtttttaaaaagctctctatatctggtcaaattaattgggttaataaagcaaaacaatagcacaaaaatgtaattaagaccactgcgctgcgatgcaatttcaattaggtgatttggtttcgaaccacaacaatccacgaattgccatctcatctaaattcctgcaacttccgagcgatgttaaaccgacttagccaccgcaatctccgcagctgatgctggatggattatgcacggagtatcctgtcctcaaaatggaaattataatgccacctccccacaggacctccaggactaggaggactaggtttagatgatgaaatatgcaaaaataatgaaacacaacagcgaggacacaactgggctgcgaaatgccatgagctgcgctttacttacttgccacttgaccatttattgtcgcatttgagccgctgccactgagctcggagaccgtgggactggcggcttcttgtgccggcgtactgacaccacctgctcctccggacgccgatcccgtcccggttgccgttccgcttgcagggccaactgacccactcgctgcaccgctcgctgcaccaccaccgctgctgctgctgctggttgccgcaccacttgtgccgccactggagcccggcccaccacttgcctcgtcccgcttgctgggcaaactttccggcgtgctggcaactgaaagtaaaagttgatgtgttattacatactattatttaactatattgcatacaaatttatctatagaaatagcaaaaatatcagtagaaatcgaaagaacatttaaactgaatttcacatattctacttaatgcttgcttaagtgtgtatctgaatttcagtgtggcatccaacaggtttccgcatggcaatcagtattcaaactatcctcgcttgtgcacacatccatatgagccccaaatccttttgttgtctttcacttgctgcaaatcccccgtttctaatgctgtcgggcttagcaaaagtgtatttgtgttgtgtattttgtttgcttcttggccaaaagggtcggaatacttttttccttaaattggaagggcgtatcttaaacttagacagcaaatggttctgtagatgtcgaaaattcaatatatcactgttttattagatataaattattatttaaagtgaaattccactatctccaaatattaatattcatgtttttaactcaaccatttatttaagtttatattatcacatgctgtatattgtgaaaagagcatttggcaatcgctatggcatccgtgattcctcacttattttccttctgcttaagcttttcttcagcttcatcttgtaatatcctctgctttgattcgaccaggctaagctgcctcctttgccactacaagattagactgaaattgcttttgtgcgttaaaaggattttattaggccaagctaaaaaagatttcattgtacgaaagttgccaaggccaacagctgcgaccaactagcgaactaggggaacaataagcgtttatacaactatatatatatatatagatagatttatagatagattccattttcgtttgcttaaacttcatattgagtatacgccacgtcgtctagatgatgggcatttcccattgagaagcgagataatttacacagctatagtttaaatccgtttcgttgtgcctatacataaagcaaactgtatataattaattagaactttttcccctgaaaaacggcttttgaacttcaggaagtgcttaagtcacgtggcatagtatagcacgttctatatacggcttgtaaagtactgatcaagctccattcctttttaacctgtctagcactatagccatgcgatacctgccctttatcgcatttttcctgtttgctcttctggccctgtctgtgggcgaggaattttgcaattgtaatcttatctatagaccattgtgcgcatcgaactccaagacctataacaactactgtgaattcaagtgtgaagttaaaaggggaagccccataacagtggtaaaatggaaacagtgcaatgaaagtgcggggaaaataaagatagattgccaattgcctataaacttacagttgtgtaaaagtataaaatctaatcgaaaagatccaatcgctatagcttaaactatgtttacacaaacggcattgttgaaatcttcttcgcagtatatatttccaataggttcatgacaatgcaaataaatataaaatttaaatacatatgtacttattcatacttattctattgtcataacaaagcaaattagttgaaaaacaactgtctacagagaactaaatatttaagtatgcattttttgagtctgctgttattgacccaatttttcgcttggcttttatttaggcaaatattgcctgcgtatcagtattgcatattatattttggtataagattcggtggaatagggctgcgagcatcggttaactttaaactttcaaaaaaatgctaaagtctcggtttattgctgtagtttttccagcgaacaagggcttgctaaggtggcaggttctggcttatctataaataagtggcgatcaagtgggaaagctccagtcttgccaagcctgtctagcattttagccatgcgttgcctagccttcatcgctttctgtctgtctgctcttttggccatggctgtgggccaggtattccagtactcctgcccgtgtcctcgaaactatgatcctgtgtgcggatcggactccgtgacctatagtaaccagtgtgttttggattgtttaattaaagaaggacgctccattaccgtggagaagaagggaagatgctagaaaactgaacatggatcgccaactggttatcgacttacattcgtatgataaaaaatgaacaataaataatatgtataaataatttaaaaatgtatatgcttctggtatcagaccgaatcggtattttttaaatcttctgtggaacaaatcaatttttgcaatactttcaaggtgatgtgattactaatttgttcaatgccaaagaaaactaatccatttaaataattgaatattcatatttattcaattggtatgccgaagccgggtttaaaataaattatatgaaaaacaactgtctacagagtactgaatttctatgtgtgcaatttttaggtttctgttattgacccaattgttggcttggattctatttagacaaatgttgccatagctttagcctttataaaacaacaattatattataaaaagccagggctggggaatgaaagtaggtttttcaggtgttttgattagctctaaaaataaataattgacttgacacgcatatatatgaaaaatatgcttatacatatttttatttaagctacgatttaaatcggcccaattaaaaaacttcgaaaaatttgtgccaaatacttaagcattgaaagaactttattgatatggtttcaaataactgtcactttatttataaactaacaagtaattacttttttacaatctggttcatagtgtgaaagataggtgtttttaaagtgactcatcgaagattaatgttaaattattcgcgaaatgcactcttcgtaatctttggtggcgaaagccacttgaacgaaagtattgagttcataaatcactgcaagtttcggaagtgggtactagtttttgccagtgtcgcgttttatacgattcgtattggcgataaggtgttcaagcgctatcaaatgcaatgccaaatactcttgttgataagctgatttatttctatatttttcacattgatgattaatacaaggcactcttatacgatttgatttctggattcttctttggcttgtgtgtcgaaaggattgttggcttagcacgttccgtctctcagaagtcccatactgcgtccctggcgttcaacatttcgtcgtacacagtcgaactcgcatcgatttggataggtgaccaagttggaaccgcaaacgggctcgtagttcctgggacagggacagattggcctcaccaccttttccgtatcatcgcagctaatgggcgatatggtgagggccaggaggaggcacagggccactaaaatgcttaggaatttcattgttaccgggttaatccacttgctagactgattccatactggagttgcacacattttttcattcaatagagctttggctggttttcgatttggccacttatcttatcagcactcgtggtgctttggagtgagtagtgttttggttttttgtactattgtacattgtgattggctagccgttgaaatacgagctattccagttcctagagattgctatgcttagcatatgcattgcaaattatttgaataatttatggactccggcactttcagcttaattacttatttagcttatcgcagaaccaaacacgcaattgtttatagtcaaacaaaaagctcacaccgaaaagctataccatactcactctattactcagtatatttaagagcttttcccccatttctctctgccttcttatcagcgatcaggtagtgtcgcgggaatttcccaatctacacaaaatttacatgcactttgctacgttttttaggaggcacggtaattaatgtaacgccagcctttttgtgagccaatttacacgacactagctattcaatttcaattgccattcaatttcaattagcttagctgcctgggcggccctggggaaattcgtctaagttatatccagttgtggagtcactgccgctatgagaggtttacttatgattctgatgctcttcatcttcgccattctgacggttcgcgctctaaactgccagccgtgtaagttactggaagcccggaaggcacatgcaaatgaaacgaatacccggcagatgtgagaaaaagtgaggagtgttgggcgtgttttggaggtcgggagaggagtgcgaagtaatcagcagcttgtttgactaattagcaaaacttacgcacacacaaaggccccgacaacttttattcacagtctcgacaaacaactcagattcgaaactcagtcttaattgaatgctcggcagcgcaacgacgacgtgttccgcacagaaacccccattc

SEQ ID NO: 36677 - DNA, 1749 bp, DROSOPHILA
atgaaattcctaagcattttagtggccctgtgcctcctcctggccctcaccatatcgcccattagctgcgatgatacggaaaaggtggtgaggccaatctgtccctgtcccaggaactacgagcccgtttgcggttccaacttggtcacctatccaaatcgatgcgagttcgactgtgtacgacgaaatgttgaacgccagggacgcattgccagcacgccggaaagtttgcccagcaagcgggacgaggcaagtggtgggccgggctccagtggcggcacaagtggtgcggcaaccagcagcagcagcagcggtggtggtgcagcgagcggtgcagcgagtgggtcagttggccctgcaagcggaacggcaaccgggacgggatcggcgtccggaggagcaggtggtgtcagtacgccggcacaagaagccgccagtcccacggtctccgagctcagtggcagcggctcaaatgcgacaataaatggtcaagtggcaagacacggctcactgacgattatccgacgcaccaatagccgcaactttacccaattcgacggccaactggcatcgccctcatccaccgcctgcagcagcacagcgccgggaattggcttcgcccagacgccgctcagtgaaccacttgcggagcgactgagctttcgtgcttccggtggatccaacggatccgcgtccgccggcgacagccgatccagcaatcaaggcccatcaaactccggaccagccgcctccgccgccgtgaaaatgcagccatcatcgccgaatgcaaccaactatctggccgataatatacagatctcgtcggccaatctatcgcaaaccgaaatggtcgtgggtcgcgattcggccgattataccgccatgcattcgattaacgttggcgtcggcaattcgttcctgcggggggacaccgatataccgcaggagtcgggacactccttcgaaacgccctcgaatatgtcgttcaccgccgggcaatgggatacggaaagtttgccgccagtcgacacgccagatgctcttaacaaagcggccggaaggatacgcagtctcctccgccgcatggatcatgagaccgttgcctacgaggacatgcagcggaatctgcactacgcggctcgtgtgctcgaggcggtcttcatagacgaatcaagggagggctgcaatgggaattgcaagaacctgaactgcagtcgccatagccacggacgcgatgaccagcagcaggacaacaacaactccaataggagttgcagcctgcaggaggcgtcgcctgggggagcaggtgcaggtgtcacaccaggcgctgacaaccaggacagcatagagagtcgcaccaagggcgtttcccaggcgccgcagacccacagtggcccaacgggtccaccatccaacacctcgagcgaaactatcgcacaacctgcccctaagcttcaacccgccctggaaaccgtaagggaatcggtgatggaagaaagtccttcgaaggatcccggcgacaagggaccaccgccgcccgccagcacatccacattgacatcccaaaccaccacctcctccagcgcaaccgcggagccaagtgccaaggcggccgagagtcaagcgggaagtgccggcagcagtggcagttgcagtaacccagcggcggtgcatcggcaacgccgcctaaggacacccacctgggccaggtccatgtcgacgaacaaaactaagcacttgaaggagtga

SEQ ID NO: 36678 - protein, 582 aa, DROSOPHILA
MKFLSILVALCLLLALTISPISCDDTEKVVRPICPCPRNYEPVCGSNLVTYPNRCEFDCVRRNVERQGRIASTPESLPSKRDEASGGPGSSGGTSGAATSSSSSGGGAASGAASGSVGPASGTATGTGSASGGAGGVSTPAQEAASPTVSELSGSGSNATINGQVARHGSLTIIRRTNSRNFTQFDGQLASPSSTACSSTAPGIGFAQTPLSEPLAERLSFRASGGSNGSASAGDSRSSNQGPSNSGPAASAAVKMQPSSPNATNYLADNIQISSANLSQTEMVVGRDSADYTAMHSINVGVGNSFLRGDTDIPQESGHSFETPSNMSFTAGQWDTESLPPVDTPDALNKAAGRIRSLLRRMDHETVAYEDMQRNLHYAARVLEAVFIDESREGCNGNCKNLNCSRHSHGRDDQQQDNNNSNRSCSLQEASPGGAGAGVTPGADNQDSIESRTKGVSQAPQTHSGPTGPPSNTSSETIAQPAPKLQPALETVRESVMEESPSKDPGDKGPPPPASTSTLTSQTTTSSSATAEPSAKAAESQAGSAGSSGSCSNPAAVHRQRRLRTPTWARSMSTNKTKHLKE

SEQ ID NO: 36679 - DNA, 2525 bp, DROSOPHILA
cttacactgtggtcccgggcagtttattagccgaaacacaactggccggcaaccatgtaagccaagttgaaaggggcactgcggaggaaacggaaatacatcgtacatatggccaacagagcagaaggcggttatccaggttggccagaacggctgccactcaaaatggatcggggcccagagccttgtttgcctggtcatagactttaaaaatttccccaccgtgtgcgtaagcaactggctgggaatctaagcttttggtggccaggaaatctgcgtggcatatgcagaaggcatagaaagttgcacataaatttttacctcaaccgggctacaggcaacaagaatcctaaatgaattgttgctacccgtaagctgagtgggtagatgggtttgggggctgaggcgaagagataacttttataatagcgcagctcgttggaaattcaatttcattttcaatttaatgctgcaccgagccacgaacgtacctttcctgcagagaattaccctcaatctgctgctttttgtgaagctctttttgttgccatttgaattgacttacctgcaatgaaatgatagaaaaataagttacacacattcgcttccaagtattattttatgagtttcaagaggaaatgtgagtggcacgaaatttaaactagatctttgatactgcttagacttttgttctccttattgttcacggagttcagaaaaggtcaggtcaaagattggaaacaaagaaaccaagtcccaaggtgactcctgccgcacagtggttgtggtttattagaaaatatttcttccttaacatttttaattttgaaaagatatagttttcctaaagtttttttcaaatggttactagttagcagttggtaattatttttaatatgtattagtatttctaattttcctcggttgtttcttagcccataccaccaaaccacttgtcttttatccttccatcgtccaaagcttcccttgctatgtcctttcattgtacgtacttaataaaagaggagctttgaattgcattaaatccgaccagcagccacttacctatgacataggagtacccgtccagcgtgaggacgcacttgcgcgtggtggtgcccaccaggttgcccatgacactcaggccgatggcaccagcgccgccggacgggtacctggaactgttgagccgtcccgccttgccgagactggaggacatggtccccggactgcccacctcgcagctattgagactttcgcgacgcggctgggcatcgatgcccatgaattcgtctcggagttcgccactcgaaaccagaccgtcgctcgagtgatcccgtttctgatcccgatccgcgtgacgcaatcggtggcgtggtacgcgggcagcgggaattgcgattgaggatacgggggaggaggtgttgccggatgcaggatcggatccctgctcctcctggccaatgttcaatgtttgtggtttgtcgcgtcgcgttggcggcgtctcgtccaaagtatcgcccattttcaaacgatttagattagaacgctctacgtatatcggtggatctaatttatgactcgaaatgcattttacgaaaccgtgggatttaatttgccttgtcgacttatgccagttgaatatgtatttgaattaaattttatatgcattttcactattgaaattcacttaaactcacaatgttctcttgcaatggatttttatgatgtctttctgtttaaaattacgtttaaatgaaaatgaaatagggtaagtgaaatcaggcaaaacaatagaaagtgactgatattacgcatacgcagcgttgtgcactcgacgtgcattccaaataactcaattaaagtggtattacacaaaagaatataaaatgaaagtttacttaacaaagaaatgtttcatatttattttaatttaaatatatgtattgcctgcatagattggtgtggtttggaaaaaacacagaatcggttttcgttatgaattcttatctgacaataatggatatttctgatgacaatgctgttgattttcagttggcccactttatattttatgccatttcactgtggaaaaaaaagcagaacggctgcatttttttttacttttttttccagtgtacaaagctcccgctctaattgctctttttttcccgatgctactgtcaattatttggctcactcgacgtctgtctgtcccctcaatttgccccgccactccacttgttttgactgacattgtttggcgttatttgattcggattttatcgcctttcgcatggctctttggttggtcagtttgtcatgggatttttttttgcatatttgtcataacgctcgtccatttatcaaaaatccatcattgccatatggcttcggttctctctttatgcttgctccccattttattgtagtttatgcttccaaaaaccatttgtttttacacaacaccgatgacaacgtttaaattcttttaaatcgttatggtgcttcatgtgtggtctatt

SEQ ID NO: 36680 - DNA, 525 bp, DROSOPHILA
atgggcgatactttggacgagacgccgccaacgcgacgcgacaaaccacaaacattgaacattggccaggaggagcagggatccgatcctgcatccggcaacacctcctcccccgtatcctcaatcgcaattcccgctgcccgcgtaccacgccaccgattgcgtcacgcggatcgggatcagaaacgggatcactcgagcgacggtctggtttcgagtggcgaactccgagacgaattcatgggcatcgatgcccagccgcgtcgcgaaagtctcaatagctgcgaggtgggcagtccggggaccatgtcctccagtctcggcaaggcgggacggctcaacagttccaggtacccgtccggcggcgctggtgccatcggcctgagtgtcatgggcaacctggtgggcaccaccacgcgcaagtgcgtcctcacgctggacgggtactcctatgtcataggtaagtggctgctggtcggatttaatgcaattcaaagctcctcttttattaagtacgtacaatga

SEQ ID NO: 36681 - protein, 174 aa, DROSOPHILA
MGDTLDETPPTRRDKPQTLNIGQEEQGSDPASGNTSSPVSSIAIPAARVPRHRLRHADRDQKRDHSSDGLVSSGELRDEFMGIDAQPRRESLNSCEVGSPGTMSSSLGKAGRLNSSRYPSGGAGAIGLSVMGNLVGTTTRKCVLTLDGYSYVIGKWLLVGFNAIQSSSFIKYVQ

SEQ ID NO: 36682 - DNA, 2579 bp, DROSOPHILA
tgcatatagccgacgatttcacgcagatttccaggacatcacacccacgcacacacacacacacacaaacatttaggcagagagcgagcgaaatcctcttcagtcagaaaaatctgtttacgaatttgcctcctgggacttggccggattcaaagttgtgtgccgtatcaaagttatctttcggcatatcactgggtaaagaggaaaagtggcgctcaaggatggaccagtaagacacagttaacacctaggcacgtgagtttccaatttcggcaacaattgctatgtcaacacacgtctttccgggtaaggaatcgcatttaattgaataagaaatggcattcgttcaatcaatatttgccatcagatattgttcttcaaatcgctgtacaaacttaacttcagcgcgagccttaaattatttatgtatatttgataaaatggaatcttaaatagcatctatgttccgtgtctctacgaatctgctgaatataaatttgtaaaatatatcaactcttttaacgattttagtgttccattcactttcccacagaaaatgataagcagcttattaaattgcaatcaatctttcttcagaacatgacacacaagacgaagacgcgtcatcgtcggttcacattgaattacccattttgctgtgacggctgtggcagatcgatagggaaagcgaaaacaaaatcgaaccagggtgaaaaaaaaacacctggccaatgtcaatcggtgaccttgccacccaatgtcagatggacggtggaggtggcgtgtggcgggtgtgggccatataaaataaaggtggaaatgccgaaataacgcattttctatgcatgcatctacagacacttgttgaccttgtaattgcttttgttattcccctttgatgcacacgggaaaattgaaagatttcattttcatttcctatgaaactttgctaccttcgtctgcaatgttgtgtactacaggggtcttaatttatttacaactacttattgggcactaagatgactggcactggcaaattgtgttgcatatatcacaaagtatgtatttcacaggaaacgcgagcaaatactatctcaaagcgaacgacagtatgcaacactacatttttagtctgaaagcgcagtggaaaaaggatctttgctttcatatcttttttatgtatttggaatccaatcccttctttaatgtactaagtaattaacttaccgattgtgtaggtggcaccatccaccgtgaatgtggccgctttgcatttgttgaagaaacgcgatgcgaagtccagagctgattttttcaagctcgacgatacccggcggatgggtgagtccggacaggaactgggtggatgccgctccgaagacacctgatggtgcaacacctgctggcttgccactccgctggccacggtgttgtccgaggtcagtcgtgccgttagcactgcgggcactgcagctggaacagccggactgctaccgggaacaggagctctgctcatcacaggtgtggccgtcccgggggccaaacggcgtggagcattcgttagattcaaattggacattttgcacactcgcctgtccctcgtttccttttcgctagatggatttttatttctgtcgcaggtcacttgataacactcattttgtttggcactgaacaaaggtcagcgtttcaattgggcacctgctcatccgaaaaaatagttataggtcagacctctggtcctgaccaagccaatttgttgcaattaacgtttggaaattgaaaggcaaacagaaattagttcgcctgtggcacggattaaatggcaatatctggttcgtttgtaaattgaaaatgggtgccacggaaatcaattggcttttcagttatatcgtttatcaacaagtaaaaaatattatagttttagtttagaaatacgattattaattttagtttttagttgacttcttcagaccaagtaagccagcaaaatttctctggtcacatattcatgaaagttttaactctataaaatctgtgttcttctgccattcaaagaagtttatttcttaaattactacttttgtttggaaagtttaaatgggaacttcggacaatttccattttcacagcacgaagtatgcgtggagttgccgcaggcatgccagcctgcgtagagtagagtgcctgaagtagagtgcttcgtgcgacgtcacgaaatcgatgtattactgctcagcgagacacactgcaagggggcagagacgcctaagctattcggatttgtagcctacactgccaatgatccgagtggtggcaacgccaaaggcggagcagctatcttaatcaaaaatagccttgcccactttccgctaacaccaatagccactgccaaggtgcaacttgcgccggcggttattgaaacggcacttggtcctataagctttggagcggtctactgcccaccgagatttgcatggactacggacgagtttaaggacattttggaagagttccagacgaagttcattgttgcaggcgattggaacgcgtcccactggctctggggtgcgggaagg

SEQ ID NO: 36683 - DNA, 381 bp, DROSOPHILA
atgtccaatttgaatctaacgaatgctccacgccgtttggcccccgggacggccacacctgtgatgagcagagctcctgttcccggtagcagtccggctgttccagctgcagtgcccgcagtgctaacggcacgactgacctcggacaacaccgtggccagcggagtggcaagccagcaggtgttgcaccatcaggtgtcttcggagcggcatccacccagttcctgtccggactcacccatccgccgggtatcgtcgagcttgaaaaaatcagctctggacttcgcatcgcgtttcttcaacaaatgcaaagcggccacattcacggtggatggtgccacctacacaatcgtgccagtcatcttagtgcccaataagtag

SEQ ID NO: 36684 - protein, 126 aa, DROSOPHILA
MSNLNLTNAPRRLAPGTATPVMSRAPVPGSSPAVPAAVPAVLTARLTSDNTVASGVASQQVLHHQVSSERHPPSSCPDSPIRRVSSSLKKSALDFASRFFNKCKAATFTVDGATYTIVPVILVPNK

SEQ ID NO: 36685 - DNA, 3321 bp, DROSOPHILA
ccagaaaactcatcgaaggtatccaggatcacaggaaactaatgaagtaagaataaagatttaagaaccgcatgtttgatagctcagagaactgataattaatcaaatgtaacttttccaggataatacgcctacttcgcagcactttacatcttagccaactgggccagttcctttctagtggaatcaacatttccataacactcatcaacatcctgttctttgcggaaaacaactttgcaatgctttattatgcggtgttctttgctgcaatgttaatagaactatttccaagttgttactatggaattctgatgacaatggagtttgataagctaccatatgccatcttctccagcaactggcttaaaatggataaaagatacaatcgatccttgataattctgatgcaactaacactggttccagtgaatataaaagcaggtggtattgttggcatcgatatgagtgcattttttgccacagttcggatggcatattccttttacactttagccttgtcatttcgagtataggaaaatagaagtatagctcaataatttattatttaagatagtagcatttttgataaacaattacttcattttcactaacccatgtgacatgaatccaaaatattagctcacctgctagacagcaactaacacatcagtaaatttataatttataacatgtgcatttattgttcacagacaacacccagatatctaaaaagaaatttaactcttttgcacaggtcctagattaataaaatatgattaaccaaagcaaaaatttgtatttacgctgtcggtcccaaattgttaacttcccacgcagttcttaccaaagaaaaggtgtgaattggtcatagcaaattatagggttatcaaactcgcagtaaattgatgggcgtaacgatgtgggactataatttagccatttagaacgactagtataaaagaggaaatgccgcaggaccttttcaattgtttcaaacatggacttaaaaccgcgagtcattcgaagtgaagatatctacagaacctattggttatattggcatcttttgggcctggaaagcaatttctttctgaatcgcttgttggatttggtgattacaattttcgtaaccatttggtatccaattcacctgattctgggactgtttatggaaagatctttgggggatgtctgcaagggtctaccaattacggcagcatgctttttcgccagctttaaatttatttgttttcgcttcaagctatctgaaattaaagaaatcgaaatattatttaaagagctggatcagcgagctttaagtcgagaggaatgcgagtttttcaatcaaaatacgagacgtgaggcgaatttcatttggaaaagtttcattgtggcctatggactgtcgaatatctcggctattgcatcagttcttttcggcggtggacataagctattatatcccgcctggtttccatacgatgtgcaggccacggaactaatattttggctaagtgtaacataccaaattgccggagtaagtttggccatacttcagaatttggccaatgattcctatccaccgatgacattttgcgtggttgccggtcatgtaagacttttggcgatgcgcttgagtagaattggccaaggtccagaggaaacaatatacttaaccggaaagcaattaatcgaaagcatcgaggatcaccgaaaactaatgaagtaatgtacatatatagaatggtttttagttattatcattaaatgaacgtgttgtaggaaaaccattctgtttgtcgggtgtcacggaaatcgattttccttaatttacatatgatattaaatacttccttgcaaacaattatcatattagtaatttagaatctttattatttatttccagaatagtggaattactgcgcagcaccatgaatatttcgcagctcggccagtttatttcaagtggtgttaatatttccataacactagtcaacattctcttctttgcggataataatttcgctataacctactacggagtgtacttcctatcgatggtgttggaattattcccgtgctgctattacggcaccctgatatccgtggagatgaaccagctgacctatgcgatttactcaagtaactggatgagtatgaatcggagctacagccgcatcctactgatcttcatgcaactcaccctggcggaagtgcagatcaaggccggtgggatgattggcatcggaatgaacgccttctttgccaccgtgcgattggcctactccttcttcactttggccatgtcgctgcgttaataagtgggcggctaaccaaccaggcatttggcccataaatttgcatattcgcttaattttaattaccactaatggcggccattaacgcgcggctcatgaaaattgcattggctgcgtttaaatgccatttagcgcggattatgcacctgaatttacactcgaacaagtaataaattatgttcaacatttaaataagtttttacgttggtttaaaattatgaaaatttgtgtccaataactaaagtttcttgtacacaatcgatttatttgcatacacttttttaattaaataatattgtaaaaagcagacggctccattatatatataaatgcaataaatctatatatatatatatgaatatatgagcatcttcttgttcatagtggtataatttctcgcagtgtttcctctcatgacatctgcataaaagctccagccttgctgggaaatgtgcattaggtgaacaatggtcattatcgacagtcttagtttttatcgtccattctggatctgcatgcgattgctggtaccgactttcttcaaggattcctcacgtcctgtccagctgtacgtggtgttgctgcacatcctggtcaccttgtggtttccactgcatctgctgctgcatcttctgctacttccatctaccgctgagttctttaagaacctgaccatgtctctgacttgtgtggcctgcagtctgaagcatgtggcccacttgtatcacttgccgcagattgtggaaatcgaatcactgatcgagcaattagacacatttattgccagcgaacaggagcatcgttactatcgggatcacgtacattgccatgctaggcgctttacaagatgtctctatattagctttggcatgatctatgcgcttttcctgttcggcgtcttcgttcaggttattagcggaaattgggaacttctctatccagcctatttcccattcgacttggagagcaatcgctttctcggcgcagtagccttgggcta

SEQ ID NO: 36686 - DNA, 1140 bp, DROSOPHILA
atggacttaaaaccgcgagtcattcgaagtgaagatatctacagaacctattggttatattggcatcttttgggcctggaaagcaatttctttctgaatcgcttgttggatttggtgattacaattttcgtaaccatttggtatccaattcacctgattctgggactgtttatggaaagatctttgggggatgtctgcaagggtctaccaattacggcagcatgctttttcgccagctttaaatttatttgttttcgcttcaagctatctgaaattaaagaaatcgaaatattatttaaagagctggatcagcgagctttaagtcgagaggaatgcgagtttttcaatcaaaatacgagacgtgaggcgaatttcatttggaaaagtttcattgtggcctatggactgtcgaatatctcggctattgcatcagttcttttcggcggtggacataagctattatatcccgcctggtttccatacgatgtgcaggccacggaactaatattttggctaagtgtaacataccaaattgccggagtaagtttggccatacttcagaatttggccaatgattcctatccaccgatgacattttgcgtggttgccggtcatgtaagacttttggcgatgcgcttgagtagaattggccaaggtccagaggaaacaatatacttaaccggaaagcaattaatcgaaagcatcgaggatcaccgaaaactaatgaaaatagtggaattactgcgcagcaccatgaatatttcgcagctcggccagtttatttcaagtggtgttaatatttccataacactagtcaacattctcttctttgcggataataatttcgctataacctactacggagtgtacttcctatcgatggtgttggaattattcccgtgctgctattacggcaccctgatatccgtggagatgaaccagctgacctatgcgatttactcaagtaactggatgagtatgaatcggagctacagccgcatcctactgatcttcatgcaactcaccctggcggaagtgcagatcaaggccggtgggatgattggcatcggaatgaacgccttctttgccaccgtgcgattggcctactccttcttcactttggccatgtcgctgcgttaa

SEQ ID NO: 36687 - protein, 379 aa, DROSOPHILA
MDLKPRVIRSEDIYRTYWLYWHLLGLESNFFLNRLLDLVITIFVTIWYPIHLILGLFMERSLGDVCKGLPITAACFFASFKFICFRFKLSEIKEIEILFKELDQRALSREECEFFNQNTRREANFIWKSFIVAYGLSNISAIASVLFGGGHKLLYPAWFPYDVQATELIFWLSVTYQIAGVSLAILQNLANDSYPPMTFCVVAGHVRLLAMRLSRIGQGPEETIYLTGKQLIESIEDHRKLMKIVELLRSTMNISQLGQFISSGVNISITLVNILFFADNNFAITYYGVYFLSMVLELFPCCYYGTLISVEMNQLTYAIYSSNWMSMNRSYSRILLIFMQLTLAEVQIKAGGMIGIGMNAFFATVRLAYSFFTLAMSLR

SEQ ID NO: 36688 - DNA, 2351 bp, DROSOPHILA
gtgcagagatcctggaatgcggggaggtttggctacaaaacgacgacaaggcaggcaacacacacacacacacacgcagaacactcgcagctcagatgttgcaaccgttcaagctgctgcaccttccacacacacacacacacacacgggccaactaagcgcaactgcaaaagccaaaaaaaaaaaatgaataacaaaaccgaaaaaactgacatcccaactttgagccgggccaaggaaaaagtgaaatctgctagaattgatcttgtggggagtcgaagtcatcgtcttggtcttcttttgcggttgcgctgcatcgctcgattcgaatgggcagccaaaaaactggtttgcccatctggcagggatattggccgaaaggcacagcagcttagcccaggaacagtgtcccggggtaacgaagctataaaatcactgcagtacaagccaagaacatgcgagtattaaaaaatccatttccaacaccatcaaatcctattttatgaatacttttcaagagcgtgtgtccatgataaaaccaaggtattgcagcaatgcatttattgcataataaatgtaaggaagcaaggattttaattaatactattgtagcacatattaattaaaactaatctgctgaacatgctagatcgtatgttacatggctcaataaaatggaaatgttaaacaagcaaatatgatcctaaaagtattttatcttctcagaaactattttgctggctttttaaatgttccatttctgtagttttgttactttagtaaaatatatcaagaaatatgctttaaatatacatatactttcggtggttactttcaagatcccttaagataagtatgttactaccaaatcgtttttcaaccactgtgcccagggctttgccgttctggccgtggtctcagttgcagactctcagccagagcctttcattcgctgtcagcatcaattgagccagctccacaccgcaaaagccgagccccgatggctcccaagatcgtcgagatctccgctcctccggccaaccattcagacccaagatatatgagccagtgctatgttgtgactgctgcccgctgtgcacctgtgcccagggatgtggacgtggatgtgaatgtggacgaggatgtggatgaggagatgagcctggctaaaaaccgagcagatgagcaggcgaaatggacttttaaatgttgccatttgttgcgtgaaaacgcaaccggtagccaaaaaacgttcagcattgcgatttcttgggctgcggagggtttcggaattgccacgtttcccgggattgcctctgatcttggactgtgggctccactcagctattaggaatcctcatcctcgtcgcatgcccgaaggcgatcattaacgccaacggtttctgcggcgctttgaacaacattttacaacttcgcccgaaatgagcagccagtcagcaaccgcagcaaccgctaagaaacctatacaaaaaggtcagctaccgtcagcccgagaacataatatatacaactactatgccatatataagaagagaaaaaaataaataaataaaaaaataacataaaataagtcgggggacaggcggagatattgtctgagctggggccattccaggaaacccgacaacttttttagaagtgcccaacaacacagaaaacagaacagaacaagtgacaagccacttgaatgggaacctttggccagtcagcctaataaaaatgttgtagctgctgttggttgggaactcttatatgttatccatgtggggcggggaaagatttaagcggaagcagagtcactattctggtttcttctcctcttgcccttttttttgtttttttgctcatttcccaaaatctctgacaggcggattagcttgaaaataatgatgtaagcgaatcaaagctccaaatcttgcatttgtcaactgggatatgaaagagatttccaacagcttagaggcgaagattcaatcgttttcaactcggaagttttaggctcagtttgcagatttactagagtttgcaacctattacaaataatttctaaagtaatcctagcacatataaaatattgaccgtatctcggcagttaaagtggcatctatgtcagctacttgggcttacacttgccacattctaatcttctcgcagtccagctgtaagtagaatctatgtcggatttgggcactgatggctctggctaagcgctcttcaggtgctcaagttacctgttgatgttgcagcagtaagtgtggctgctgctgctgtctgaccccctggcaattatcgctggctgacaggtggcaaattctcacggagcccggtac

SEQ ID NO: 36689 - DNA, 351 bp, DROSOPHILA
atggctcccaagatcgtcgagatctccgctcctccggccaaccattcagacccaagatatatgagccagtgctatgttgtgactgctgcccgctgtgcacctgtgcccagggatgtggacgtggatgtgaatgtggacgaggatgtggatgaggagatgagcctggctaaaaaccgagcagatgagcaggcgaaatggacttttaaatgttgccatttgttgcgtgaaaacgcaaccggtagccaaaaaacgttcagcattgcgatttcttgggctgcggagggtttcggaattgccacgtttcccgggattgcctctgatcttggactgtgggctccactcagctattag

SEQ ID NO: 36690 - protein, 116 aa, DROSOPHILA
MAPKIVEISAPPANHSDPRYMSQCYVVTAARCAPVPRDVDVDVNVDEDVDEEMSLAKNRADEQAKWTFKCCHLLRENATGSQKTFSIAISWAAEGFGIATFPGIASDLGLWAPLSY

SEQ ID NO: 36691 - DNA, 4248 bp, DROSOPHILA
agtgcggtgcaataaaaaagccgggttcttcaatgttttcagttttttttttattgtcttcaagtgcttgtgaagaatgccaattgcctttggacatgggacactattatcggcattgtggcacaagaaactcagatcaatgccgcaaggcaatcttctcttacatttttgctacattttatgagcactttcctatcactttcttagtcacagctacggataataagtcagttgaacttaatggtttaatcacacacaatattactacattaaccattgaacttgataacaatagagtcaatttaatgccaaattagcaatttaactagagggctagtgagattttgagtattacaactgctaatattaatcataaatcttaatatgatatatatatgagctgataagagggcacttaaaacttagggaaagcaccgatggtacacaataataggaaaagtgacttcaattcagtcgattgtaggaatcagctcattccaccccgcaaagattaaatctaatacatatattatcagcgttcttatcacactcatggaaattgcaactagtcgaggaaagaaaggaaatcagtatagttcggacctcgctgcttagtagatcgtgaaaatatgcggaaaagtattgttttcatcggtttaatagcgcttttccagagttgcttggctgaaacgccggaaacgtatctcctcaaaacacacaggtagaaaaactaagggacctatttaggatagattctgaaaaaactggttgaattactgtataataatataatatatataatatataattagtatatattatgagttacaagtgactaagctagctaagtatatcatctataagaaatgcgctaactacagaattcaaaaaacttctagcagttattttcagatacttttgcagtcaaatccaatgatgaaaatacttactaaacgtattatggcataattattacagtcttccctcggacctgaattttatgcccaccctgggcaatggccacgtgggatacacgatcttcggagatgcgatctttatgaatggagtctacaacggagccggcggaaacagcaagcgtgctcgcattcccaactggataaatatcagcacggaagcttgtgatcggttcggttgtgccactgacagcgatgtggtaaatggaaccagctacgagatgaatctacgagatggctacttccgggttgtcacaacatacagaggactagggatttcagtggaacagagaacctatccgcacaagtactacaatcgtgctttagtctatgaagtggtggctaatagacttgctggccgaaactcaaggattaactgtaaacttatttattattgaatataaactttaatgataacaacttttccatatttccagctccaaagttcctaaggctaacacaattcgctggtaacttcagtgatgccttcgactttgtggtggtcaacaatggcagctcagccagcggcaattaccgcacacttcgcggacaaacaaaggtggttgagaacgagcagttccaaccagatcctcaggagatctttgtcctcttcagtgaatccttggagcaaccccttgaactgcagtggcccacgtggcaggatcaattaagccatcgagttatcattgccatagacagagacgaaagtgtgacacgaaaggaactgcaggatgtgcttcagttgagctccgataatcttctccagaagcactcgcaatcgtggaacagtttttgggacgatgagttctccattgaaatcaagggtgatgctctggaactgtcgcagattgtaaatgctggcatattctatatagtaagttcccttccgtcactggaaaccaatcagaaaaacgaactattctatggattaagtcctactggcttggggcgtggcaatctggaggcggattaccaggggcacaacttctgggacacggagatctggatgctgccgatagtttcgctattcggcttggattatgcaaaagaggtgctgggctatcgcagcagaaaactggaggcagccaaatatcatgcaaatgccactggttataagggagctaggtgagttgttaaatatgtttaattcatataattagctaaaaaacaaactttatagatttccctgggagagtgcgtacactggcacagaggtcacaaatccctgttgtcccgaggtggcggaacaggagatacatatatcccccgatatatcctttgccctacaaaaatttttcgcccaatcaaacgatagcgaatggacctgtggcactgcatggcccataaccgccgatgtggccgatttcctcgttagccgagccacctgtgatgattccaccaaaacatgccacttgctaaacgtcatgggacccgatgaagatcatccgaatgttaacgataatgtgtacaccaatgctgtgtccaaaattgcactaaactttgccgaatggttggccaaacattgtggtaatgccagcaccgaacgtttggagaaatggcgcgaggtcagcgatggtttggtgattctacgcgatgagagcctaaactatcatcccgagtatgcgggctatgtccgcgacaccattatcaagcaggcagacaccattctacttggataccccttgaatttcgataaaaggtaagattcatgcataatatagatagtatccatttaataaccccactgcttcctgctaaagctccacacacattaatgatctacggttttacgcaaatgtaacccgtgaatctggtccagcaatgacgtggtccatgttcgcagccaactatctacgaaaccttcagctaactctggcaaatgagtatttcgaacgtggctacaagagctacgtacggccggagtttaaagtatggagtgaaacgcccattggttacgatggctcggcgaacttcctaaccggcattggtggtttccttcaagctctgatcttcggttacggtggcttggatttcgggcgtactgatgacgatcaatttttgatgtttttcggtatatctttgacgccgccaaatgttgaagaagtctttatcaactctattccatacgggcagcatgctaaatgtacacttcgatttaaaagcagacactctgaaatttcgtgttacgacaggattggtaagggctttaagatggcccaaggccagaagcgaaccatccttggcagatcctttaactgtaagtacacaatgtgacattggccataatcctgattacttacttttcttcctttcagtgacccgccaaaatgaagatcctcccattgagattagctttttaagataaatccaaagtgtatttgaataaatatgaagaaaattacatatttgagccggatgcatatgttgtggtattaaacttaagtatttagtacgcggattaggaagtgtctattgcatttggttgtgtatatcttgttaattaaattgctagtctttcctgcgcccttctctacttaaatttggctattgcggagccactgacacctggtacatttttgttgttgccactgagcaccacgtaagcggtcttcgtctccttttgcttctgctgcaacatggtcagtgtgcccaagggtgtgtctgtcgaactcatggttttcattagctggaagaaacaaagttacccatttatttatgcccaacatcttagattaatgaccaactcaccccatcctgctccattttcttgagacgcttctcaatcttattcttgccgggccccttgccatggaacttatgtgacaagtagcggaaagcctctttgaggttcaatatgcggccattgtcatcgatataatccaacttgacattgggcttgaaggtctccttgtccttaaagtctgtaatcggtccaaagtggaagcgatcgcgacggccaaccttctcgtcctcactaaaaaaataccatattaacataagtttgcttgtttaactaccacaacaacatacccagccgctttatcctcaatggaatagttcttggcctgcagatgggccatttttgtgttgctaggtctgttcttttcctccttttcaaggtaacccttggacagcgccaatcgcagagcattcgctacaccagctcccacatcgggctcctcgtctagaatggcacgatcttccaggtcttcacccagattatccaaatcggcgggctgcatgacttcatcgggattgaccgaattccaggtgc

SEQ ID NO: 36692 - DNA, 2073 bp, DROSOPHILA
atgcccaccctgggcaatggccacgtgggatacacgatcttcggagatgcgatctttatgaatggagtctacaacggagccggcggaaacagcaagcgtgctcgcattcccaactggataaatatcagcacggaagcttgtgatcggttcggttgtgccactgacagcgatgtggtaaatggaaccagctacgagatgaatctacgagatggctacttccgggttgtcacaacatacagaggactagggatttcagtggaacagagaacctatccgcacaagtactacaatcgtgctttagtctatgaagtggtggctaatagacttgctggccgaaactcaaggattaactctccaaagttcctaaggctaacacaattcgctggtaacttcagtgatgccttcgactttgtggtggtcaacaatggcagctcagccagcggcaattaccgcacacttcgcggacaaacaaaggtggttgagaacgagcagttccaaccagatcctcaggagatctttgtcctcttcagtgaatccttggagcaaccccttgaactgcagtggcccacgtggcaggatcaattaagccatcgagttatcattgccatagacagagacgaaagtgtgacacgaaaggaactgcaggatgtgcttcagttgagctccgataatcttctccagaagcactcgcaatcgtggaacagtttttgggacgatgagttctccattgaaatcaagggtgatgctctggaactgtcgcagattgtaaatgctggcatattctatatagtaagttcccttccgtcactggaaaccaatcagaaaaacgaactattctatggattaagtcctactggcttggggcgtggcaatctggaggcggattaccaggggcacaacttctgggacacggagatctggatgctgccgatagtttcgctattcggcttggattatgcaaaagaggtgctgggctatcgcagcagaaaactggaggcagccaaatatcatgcaaatgccactggttataagggagctagatttccctgggagagtgcgtacactggcacagaggtcacaaatccctgttgtcccgaggtggcggaacaggagatacatatatcccccgatatatcctttgccctacaaaaatttttcgcccaatcaaacgatagcgaatggacctgtggcactgcatggcccataaccgccgatgtggccgatttcctcgttagccgagccacctgtgatgattccaccaaaacatgccacttgctaaacgtcatgggacccgatgaagatcatccgaatgttaacgataatgtgtacaccaatgctgtgtccaaaattgcactaaactttgccgaatggttggccaaacattgtggtaatgccagcaccgaacgtttggagaaatggcgcgaggtcagcgatggtttggtgattctacgcgatgagagcctaaactatcatcccgagtatgcgggctatgtccgcgacaccattatcaagcaggcagacaccattctacttggataccccttgaatttcgataaaagctccacacacattaatgatctacggttttacgcaaatgtaacccgtgaatctggtccagcaatgacgtggtccatgttcgcagccaactatctacgaaaccttcagctaactctggcaaatgagtatttcgaacgtggctacaagagctacgtacggccggagtttaaagtatggagtgaaacgcccattggttacgatggctcggcgaacttcctaaccggcattggtggtttccttcaagctctgatcttcggttacggtggcttggatttcgggcgtactgatgacgatcaatttttgatgtttttcggtatatctttgacgccgccaaatgttgaagaagtctttatcaactctattccatacgggcagcatgctaaatgtacacttcgatttaaaagcagacactctgaaatttcgtgttacgacaggattggtaagggctttaagatggcccaaggccagaagcgaaccatccttggcagatcctttaactgtaagtacacaatgtga

SEQ ID NO: 36693 - protein, 690 aa, DROSOPHILA
MPTLGNGHVGYTIFGDAIFMNGVYNGAGGNSKRARIPNWINISTEACDRFGCATDSDVVNGTSYEMNLRDGYFRVVTTYRGLGISVEQRTYPHKYYNRALVYEVVANRLAGRNSRINSPKFLRLTQFAGNFSDAFDFVVVNNGSSASGNYRTLRGQTKVVENEQFQPDPQEIFVLFSESLEQPLELQWPTWQDQLSHRVIIAIDRDESVTRKELQDVLQLSSDNLLQKHSQSWNSFWDDEFSIEIKGDALELSQIVNAGIFYIVSSLPSLETNQKNELFYGLSPTGLGRGNLEADYQGHNFWDTEIWMLPIVSLFGLDYAKEVLGYRSRKLEAAKYHANATGYKGARFPWESAYTGTEVTNPCCPEVAEQEIHISPDISFALQKFFAQSNDSEWTCGTAWPITADVADFLVSRATCDDSTKTCHLLNVMGPDEDHPNVNDNVYTNAVSKIALNFAEWLAKHCGNASTERLEKWREVSDGLVILRDESLNYHPEYAGYVRDTIIKQADTILLGYPLNFDKSSTHINDLRFYANVTRESGPAMTWSMFAANYLRNLQLTLANEYFERGYKSYVRPEFKVWSETPIGYDGSANFLTGIGGFLQALIFGYGGLDFGRTDDDQFLMFFGISLTPPNVEEVFINSIPYGQHAKCTLRFKSRHSEISCYDRIGKGFKMAQGQKRTILGRSFNCKYTM

SEQ ID NO: 36694 - DNA, 3595 bp, DROSOPHILA
cacacatttacacatttttagttattttaagattagatatttttaaaacttattgttttagattcttagaaacctttagaacattataaaaattggttttaaaaaatgctttttaaaactttcaactttcaaaacttcaaaactttaaacctataaaaaagccaatgaactttacagaatatcaaacaccgtcatgggtgttgaattgaattgtttatttatgttttgacactcaaacatcagcgacttgcagggaaattggaagagttaaacaaataatagggcccgcttaataagctcttctcagttctgttcgaacatttgagcgtcagttgagaggagacgttggtttcggaatgtcggccacacgaacagatcggtcgcttttgcattaatttattagtcggtgcggagttaaatcaaatcataacgcatccattgtttagcttcctataggaaatacgcttgcttaacctccggcaaatttgtttgtgttctgaattaccaaaggccaacgaacattacactgccaattaaagtcgagtgcaaataaataggctgagaatttgcccacccactattgtttgaaatcttatcggcttcgaatcgcggtcaaatgttctttatacgcagtcattgcaattgtgctgaaacctaatccttcggttagcataacggctaattactgggaatcccaaagtaaatagaaatttagcttaatttacacatatctttctcgctaagctcccccgtgccaggttccaattttcctttataactggcgcccccataaacagcacatagcatagataagatctacctgtgccaagttatttggggtctgggtcgcagatcattgagtgtggagctctcgacgcgaacggttgatctggtctgatctctcggggtgtcgtgtttatattactgctctgattccggaacgccgattagcgtcagttgcaatcaccgcgaatcagcagggtaattcaatcagaacgatatggtgggaaaagttctacgccttgcactggtgctgctgctcctcgcctcctggacgaatgagggacgtgcacagaccgaatcctatgagaatcccaaagcgctcaaggtttggctgaccatcagtgcccgcaagcgcttcctggaggtatcgtggagcaatgcaccggctaacaagggtgaccaactgctcgtgacacgggaggatgcactcagcttccaaagccaactgctgcgcaaacacactccgctggcgggatttcccagcgaggagggtagtggctccggcgatgggtcgcccagctatgtgcccaatagtgggttcaccgcaagaccggcgactaaagcggccagcaaagaggaggagcaggagcagtactgggtggccaacggaggagccaccgaggttgtggctgccattgagcccaggcagggcctgagcacccagtggttcacaacgggattgccctttgattatgccctctcccggaatgcgacggttcagacggcctgctacggattttgggccagctacattgatgcgcagggcaatatcttggccaaaacctgcctcaaggtattcccccgctggatgaacgatctgaagtccaagataggagagatgcgtctgagagatcttttcataccaggcacccatgactccggctcctatcgtcccaacttcgatccgctgctccgcgaaagtctggtgaccaagtatgcgctcacacaggacgacgacatccggggacagttgatgcacggagtccgctacttggacatacgcgtgggttactaccgaaactcacccgatccgtttttcatctatcacgggattacaaaacaacgtccgctgcaggaagtcatcaatcaggttcgagactttgtctacgaaaccaatgagattatcatatttggactcaaggagttcccagtgggtaaggattacgttcgcgcttggatatatgaaggataacgcatatgatgtaatctactcattcacttccttttaggttttggaaaaggacttggtgtccatcgtctgctgatcagctacttgcgggatcagttaaaggacctgatagcccatccttcgctgacttggggtgcatccctgcgtgacatttgggcccgaaggcagaacgtcttcctagcctacgaccacgaggccatggtggaggagttccccgatgtcctgtttggttccgtggagcagcggtggggtaacaagcagacatgggaccaactggagacctatttgcgcaacgtcaatgacttcgatgtgtcgtaagtggagattctcactaatgattagataagatgtggaacatgtatcgtttcgtttcttattcccacagtcgcttctccagtcgcccggtgtccgatatggcggagctgaccccagagacgtgggacgtcattttggacaagaccggcggactgcgcaagatggccgataatgtgaattggcgcatctctcagttgtatcgaaatgaactgggcacgaatgcgaatatagtatcggcggatttcataaggggcactactctagtggaaactgccattgaatacaatgctcgtaagatttacatgtagatcttaactatatgttcattagaagatgaatccttctaaaacttcaaagtaacagaccgaatttgcaataatacatttatttgctaagcggttatgtttaaacatcaatatgctccttattgtactgctagctgtgtagcttccctaaacatgttacatattcgtagtttgttcccatataagcgcattcacttatttcctgattgttttaacaaaggaattcggattgttgcacctaaccatagacataaaaagtaaacttttgtgggaagtgggccaaaaaggcgggggttttgcaaaaacctgttaactgaggggatcgctaaaaaaaaaataaatacgtacatacgataaaaactaaattctaatcgacgccaattttggtgatgagcaatgctaaaatatcatacaaacggcacttaaaacggtttcaaatttaacaagttttcagtttcacgtttttcgaatatcaattacgagtgtttttttttaactaaatgcataaattctacggttgtggtacacacatatatgtaggcctagttaatagcctcattcgattcgataatggtggtattgaagatggcccggcaaatctccactacggaattggacaatcggccgtagcacttgggcttcttttttcgggcgatgaaggcgtagtagaacggaatgccagccagggttatgccgatgccaatgagcagattttgtggctcctccaaattgggcagcagtacgagtgtcacgcagcttaccatgaaggtgatgggcagcgcaagatggactttaatgggtcggggcaagtcgggcctgaaaggaatacacattacacattgggttcagaagaagtcagtgatatcactcacctcttatgccggagccacaacattccggctatgctggccaccactgagagccagagcaccgagctgaagtagttgatcaactggtacacgttatccgtgagcagcatgagcagcgacataagacactgtgg

SEQ ID NO: 36695 - DNA, 1449 bp, DROSOPHILA
atggtgggaaaagttctacgccttgcactggtgctgctgctcctcgcctcctggacgaatgagggacgtgcacagaccgaatcctatgagaatcccaaagcgctcaaggtttggctgaccatcagtgcccgcaagcgcttcctggaggtatcgtggagcaatgcaccggctaacaagggtgaccaactgctcgtgacacgggaggatgcactcagcttccaaagccaactgctgcgcaaacacactccgctggcgggatttcccagcgaggagggtagtggctccggcgatgggtcgcccagctatgtgcccaatagtgggttcaccgcaagaccggcgactaaagcggccagcaaagaggaggagcaggagcagtactgggtggccaacggaggagccaccgaggttgtggctgccattgagcccaggcagggcctgagcacccagtggttcacaacgggattgccctttgattatgccctctcccggaatgcgacggttcagacggcctgctacggattttgggccagctacattgatgcgcagggcaatatcttggccaaaacctgcctcaaggtattcccccgctggatgaacgatctgaagtccaagataggagagatgcgtctgagagatcttttcataccaggcacccatgactccggctcctatcgtcccaacttcgatccgctgctccgcgaaagtctggtgaccaagtatgcgctcacacaggacgacgacatccggggacagttgatgcacggagtccgctacttggacatacgcgtgggttactaccgaaactcacccgatccgtttttcatctatcacgggattacaaaacaacgtccgctgcaggaagtcatcaatcaggttcgagactttgtctacgaaaccaatgagattatcatatttggactcaaggagttcccagtgggttttggaaaaggacttggtgtccatcgtctgctgatcagctacttgcgggatcagttaaaggacctgatagcccatccttcgctgacttggggtgcatccctgcgtgacatttgggcccgaaggcagaacgtcttcctagcctacgaccacgaggccatggtggaggagttccccgatgtcctgtttggttccgtggagcagcggtggggtaacaagcagacatgggaccaactggagacctatttgcgcaacgtcaatgacttcgatgtgtctcgcttctccagtcgcccggtgtccgatatggcggagctgaccccagagacgtgggacgtcattttggacaagaccggcggactgcgcaagatggccgataatgtgaattggcgcatctctcagttgtatcgaaatgaactgggcacgaatgcgaatatagtatcggcggatttcataaggggcactactctagtggaaactgccattgaatacaatgctcgtaagatttacatgtag

SEQ ID NO: 36696 - protein, 482 aa, DROSOPHILA
MVGKVLRLALVLLLLASWTNEGRAQTESYENPKALKVWLTISARKRFLEVSWSNAPANKGDQLLVTREDALSFQSQLLRKHTPLAGFPSEEGSGSGDGSPSYVPNSGFTARPATKAASKEEEQEQYWVANGGATEVVAAIEPRQGLSTQWFTTGLPFDYALSRNATVQTACYGFWASYIDAQGNILAKTCLKVFPRWMNDLKSKIGEMRLRDLFIPGTHDSGSYRPNFDPLLRESLVTKYALTQDDDIRGQLMHGVRYLDIRVGYYRNSPDPFFIYHGITKQRPLQEVINQVRDFVYETNEIIIFGLKEFPVGFGKGLGVHRLLISYLRDQLKDLIAHPSLTWGASLRDIWARRQNVFLAYDHEAMVEEFPDVLFGSVEQRWGNKQTWDQLETYLRNVNDFDVSRFSSRPVSDMAELTPETWDVILDKTGGLRKMADNVNWRISQLYRNELGTNANIVSADFIRGTTLVETAIEYNARKIYM

SEQ ID NO: 36697 - DNA, 3133 bp, DROSOPHILA
cagaatgtcgcggagcggactgcagcttgactccaattactggatcctcttggcaacttgaaaaatatagatggttaatgccgtagatacatttaattccacaactaaccattgcgagaagagttttacacccgagtccgtgtagaaggtaaccatgccagagcacaggccaactgccacgcaggtccattcgatggctccatcggtgcttttgttctgagtcatcggcaagcaggtgaggctagtcacgatttggttgggatcctccagctcgccgcaccagccaagaacgtaggtgttgccattgccatggctgctccagcaggtgctgaggaatgccaacttttcaccctgcgccatggcaatcagttccccagttggtgaaatggcatggtttatcgcgtttaaccagttgtcatctgcacggatcggtttagctatgaatacttgctgcagagacttgtcttatcttaccatgtccgagtccaaagtattcttggactttcttaaaatcacggatttctccgcagtgttttacttcgcaagccatcgccttttgttttcatcacacagctgatttgcagtggagttgacagtgcaggtaaatttagctatagccagatgtatcgattatcgattatgtatcgatttcaatgcaacaggtaactccaataataacgaactaatgaaattcattaaagtaattttctttgttgtacgtaattttaaaacattataaactgagaggatgttattcatctaatctgcccaaactaataaatacttggcttatatgcatagatgttaaattataagttagaatacaaaataaatcaaataattttttgataatgatcaaaatggtaaactgtgcacttactttgtaccaagctgaaaatctctatagctttattttaatgcatactccaatagtaagtttattgtactgcaacatattgtagttcgatctaagatctaatatatgaatatagaaggtaaactaaatcaaatccgactccacaccgctgtcgataaagtccttaagcatcaggccgcaatgatcgggcaggagtcgcgtccagttgttgatgtagaggaggcagctcgggatggttacctccatgaggtcggtgcgatgagcctccacgatccttttggccacctgcttgggatcgagcaggcccaggatcgatgggaacttcaccttgggatgcttgcagaggccagtgttggtcatatagggaaagatggtggtggttcgaatctgtaaatggattcacacatggatcacataatctagcacattcacatggttattctaccagatccctgaaaggtccctgtcgtaattcggcatgcagtgcctccatcagaccgcgtacagcgaatttggtggcacaatagggcaccaggttggagatgcccaccaagccggcaatggaggacatgcaaatgatgtggccacgacacttctcctgcatgtgcggcaagaaggcctggatggtccagaactgcgagaacacgttcacgtcgaagacccgctggatttcctcggccgattgctgcagaatgggatgcgttggcattatgcccacattattaaccagcaccgatatgcatccaacatccgacttgatccgatccgccagtgccgtaacctcatcgcgcttggaaacatcgcagctgccaatgttgaacataatgttattatttatttaaacatttagtaagtatacttaatacctgtagctgtaaacctcgccgagattgagccgtttggccttctccaccgtctgcagattatttttgccatcgatatccacacaaaccactgtgctacccaatgaagcatagtgtagggccaactcccgaccaattccatgcccagttccggttatctgcgcaaatacaagttggtattaacttattatgttatttttgcacatgtaatgctcttaccaaaactatctccccgctgacatccttctgctttttgggcagcacaatctgcaccagcgacacaaacagctccaacagaattcgcacatagagctcgaaaaattgcaggacatccttgaggacgtcgaagatgcgcttcgaggcaggtgttgtgctgcaatatagaacatacatatatagtgcaccgatcgtagcgaaattcgcaacagctagaagcgtttgctggccactccgagttggcaaatattgaaacaaagtcgagtctcgacaaacccccaaatgatttaatttatctatttgtatgcgcccgctgcatgtgcaatgttcaagcgctcggctcggactttgccaagaccccataatatagtacaacataagatattggagaatgctggtggggctcaaggcgcctcgaaatattgacactgggtcttggccccctttttcgggtactcccgttgttggccaagggaatcatagtcaaggctgcctgggttggaaaaagcatttacatatattgatagatttaaccagagctactaaacaaatgaaatagtaaatattataaattataacatatttagagctgtaaataaatattaatttcaacatatcaactatattgcttaaactgcaccaactgattgtgacatttcatccgtgccatatgtgtggacaaaccaccgataaggattaacacttactggataatttcccgttctatcatggtgagggtttcttatcgggtatatgggttgggttccctggcttcccaaatccggtgccctttgacagctcaatcgggcagaaccaagtgcggtgcaatggctataatgaaagataatggtcttgagtcacggatcgtttgactgactgactggactggactgagtttggacggtctcttccgcatttgcggatttccttttcacaatttttggcttttgagtttggcgaggaggagttgttgttgttggttttttttatttaagtttcttcctcggatttacaaccggctggccaagagcgagcggcgtgggcgagcgaggaggtgctggagccaccggcgacagtgcaacatttccactttcgttttcgatttgcctgccactaaatggaaaattacgtgcactccaatgtggcacacagaaaagagacaaacccatacgaaaaa

SEQ ID NO: 36698 - DNA, 900 bp, DROSOPHILA
atgtatgttctatattgcagcacaacacctgcctcgaagcgcatcttcgacgtcctcaaggatgtcctgcaatttttcgagctctatgtgcgaattctgttggagctgtttgtgtcgctggtgcagattgtgctgcccaaaaagcagaaggatgtcagcggggagatagttttgataaccggaactgggcatggaattggtcgggagttggccctacactatgcttcattgggtagcacagtggtttgtgtggatatcgatggcaaaaataatctgcagacggtggagaaggccaaacggctcaatctcggcgaggtttacagctacagctgcgatgtttccaagcgcgatgaggttacggcactggcggatcggatcaagtcggatgttggatgcatatcggtgctggttaataatgtgggcataatgccaacgcatcccattctgcagcaatcggccgaggaaatccagcgggtcttcgacgagaagtgtcgtggccacatcatttgcatgtcctccattgccggcttggtgggcatctccaacctggtgccctattgtgccaccaaattcgctgtacgcggtctgatggaggcactgcatgccgaattacgacagggacctttcagggatctgattcgaaccaccaccatctttccctatatgaccaacactggcctctgcaagcatcccaaggtgaagttcccatcgatcctgggcctgctcgatcccaagcaggtggccaaaaggatcgtggaggctcatcgcaccgacctcatggaggtaaccatcccgagctgcctcctctacatcaacaactggacgcgactcctgcccgatcattgcggcctgatgcttaaggactttatcgacagcggtgtggagtcggatttgatttag

SEQ ID NO: 36699 - protein, 299 aa, DROSOPHILA
MYVLYCSTTPASKRIFDVLKDVLQFFELYVRILLELFVSLVQIVLPKKQKDVSGEIVLITGTGHGIGRELALHYASLGSTVVCVDIDGKNNLQTVEKAKRLNLGEVYSYSCDVSKRDEVTALADRIKSDVGCISVLVNNVGIMPTHPILQQSAEEIQRVFDEKCRGHIICMSSIAGLVGISNLVPYCATKFAVRGLMEALHAELRQGPFRDLIRTTTIFPYMTNTGLCKHPKVKFPSILGLLDPKQVAKRIVEAHRTDLMEVTIPSCLLYINNWTRLLPDHCGLMLKDFIDSGVESDLI

SEQ ID NO: 36700 - DNA, 2813 bp, DROSOPHILA
gaagcattaacactctatatctgcttactaaggctcttaaaatgaatataagcttttttttagtttattgtgtaatctatatatctttagaatttttacctctagcaaagcaatctattctattttccacgatttatcgcctatactctttagttgggcaaaatgcacgccgtttgcatgctgcctcatttcgaaagggtatttaattggccacgcatgtggctgcgctgcattcgacggcggcctgaaagccggcttcagttgccgttggtgagccaagcggcaaacaacgcccaattggcagcggaaaggaaaacggaaaccggaagcaagaagaagacagagaaccgagtagggtagcgtcaaaatgtgagtgtctccttgcctgcatttcgttgttttccccaccgcctgtgtgtctgtatgtgaatgtgtgagtgcggtgagctcgtgatttgtttacctgtcaaaataataaatataacttttgttttcgtggggcataaaatacggccagttgttgctgttgctgttggcattggtagcggattcgaggaacaaaccggcgaaggactctcgacgcctgtctgccgcttcctttcctttcctcgtccgtttcttggccaagtgcagtgtcaaaagtcaagcgaaggataatgtgcctgtccgacaagaaaaacgccagtcaattttgtgtaacctatatccaaaaccgaaactaaacttggcccacttaaaacgaaagagatctgagatggatctgaaaatgtgtttctctgtaaaaaaacatagtgtattttatgcaaaagttttgagtttgaaaatgaaactttcttgaattatgattgtgagtataaggtttgtggagtttaaaaacatcgcctgaaagtatgctatcatagtaacccaccttgcatccctttggcttaagtccaataacttattattattatatccgtctcaacttttgtaaggcctgcttctataaaactcaatcaggatgttcctgaatcatcgccttcatggatctatcttcgctaggatcctcttgctgcgccgcagcctcatgaatcagtatcaaaaaagtagtcctgtccagactatcggaacatgccgcaagtcaagcctttgggaacaggagcgcgagcaatcgaatcgtcttggagaggattaccgcatctaccagcagaacgtcgacctagatgccttcttcggcgaagagcagaggtacgagaaggtctcggatgtctgtctgctgaatgaccacttcatcttggttaaaatggcgctgccagatccttcaccgcctccttccaagtccaagatttcgcgttgcttcaaatgtaaccgtggcagtcgagtttcccccattccggaagaaacggatgagaactcttctacgccgcaatccagctgcctgcaactctggtcgacacgaaatcaggacgcgatggaaatcttcgattccagtaccaggttaactaataccaatacgccaggccggagtccacagccagcttccgtgatagttgagcagccgcatcctacgctgcagctggaagcgatccaatcattggcctccggacagctgcaggtgccgctcacaagtcgaggtccactccactggttcctctggccctttcgccggcgcttggacacgaggagcaagtccaagtcacagcaggttgccgttcataaaacatacttcgtacgttggagcaaaccgccggatacactatggcatggattcggcgtggacacggtggtggataagaagtcagaacttcgtcgttgccggtcggcagttttttgagcggctaactactttgtatatatttcatacgcttagtatcttaagggtccattacttgaagaaaactaagggtttcaataaagatttttaaatacctaatttatattcaggtacttcccacatgtatagaacttattcgaaatgttagtaatataaaaatctataaatattagttatatacaatgtctagaaaatattggaatatttttcatttaccaaaatttcaatcatgaagtttttctttaaacgtttatggatagtttggctgtaatttacatactactttcattcatgctactatatcctcaagccctcatgggcacatgttaaactccaatttccgtatgcaaaattagtggctggcgcggcaacttcagcttgccacattgtgtgtggacccgcgactctaggaaacttggcggaactgcaaaacaatacaaagaagtcaagaaacaaaatacgaaccacgcaaattgccgggccaatgcagataaagccaggaggacgaggaataaaagtggacttaaacttatttttcaatggaatttgcacgcgtccatgaagcccgaaagtctgaggcatctagtgagggggggggggggttggttggttggttggttgtttgggccataggcagacttcgggctgttgcttcattagctttggggcctgaaaaatgtcgggcaatgtcgttcgttactcccgccacagccgctaggtggcgctgccgcaggagcccacaactaattacgagggcagctcgccaagacccaggccataaaaacaagttcatgataaaatgcccaactacgggcgtgggggggggaggggggaggggtgtgtgtggcaagactgcaagcaccctgcgccaccatatacataataataaaataaaattaaaaccgtcacgccaggcgtcagtgcaagtccccccacagtaccgggaccaacaatcgcggcacaaaacaaagccatcgaaaccccaagcgtaccgcgtcca

SEQ ID NO: 36701 - DNA, 813 bp, DROSOPHILA
atgttcctgaatcatcgccttcatggatctatcttcgctaggatcctcttgctgcgccgcagcctcatgaatcagtatcaaaaaagtagtcctgtccagactatcggaacatgccgcaagtcaagcctttgggaacaggagcgcgagcaatcgaatcgtcttggagaggattaccgcatctaccagcagaacgtcgacctagatgccttcttcggcgaagagcagaggtacgagaaggtctcggatgtctgtctgctgaatgaccacttcatcttggttaaaatggcgctgccagatccttcaccgcctccttccaagtccaagatttcgcgttgcttcaaatgtaaccgtggcagtcgagtttcccccattccggaagaaacggatgagaactcttctacgccgcaatccagctgcctgcaactctggtcgacacgaaatcaggacgcgatggaaatcttcgattccagtaccaggttaactaataccaatacgccaggccggagtccacagccagcttccgtgatagttgagcagccgcatcctacgctgcagctggaagcgatccaatcattggcctccggacagctgcaggtgccgctcacaagtcgaggtccactccactggttcctctggccctttcgccggcgcttggacacgaggagcaagtccaagtcacagcaggttgccgttcataaaacatacttcgtacgttggagcaaaccgccggatacactatggcatggattcggcgtggacacggtggtggataagaagtcagaacttcgtcgttgccggtcggcagttttttga

SEQ ID NO: 36702 - protein, 270 aa, DROSOPHILA
MFLNHRLHGSIFARILLLRRSLMNQYQKSSPVQTIGTCRKSSLWEQEREQSNRLGEDYRIYQQNVDLDAFFGEEQRYEKVSDVCLLNDHFILVKMALPDPSPPPSKSKISRCFKCNRGSRVSPIPEETDENSSTPQSSCLQLWSTRNQDAMEIFDSSTRLTNTNTPGRSPQPASVIVEQPHPTLQLEAIQSLASGQLQVPLTSRGPLHWFLWPFRRRLDTRSKSKSQQVAVHKTYFVRWSKPPDTLWHGFGVDTVVDKKSELRRCRSAVF

SEQ ID NO: 36703 - DNA, 2813 bp, DROSOPHILA
tcttcgataggaaatcaattccgatcgtcgcctggtacgtgttgtcgaagctgtcgtacatgaagcgcgtaatcagcgaggtcttgcccacactctgctcgccgaggaagacgagcttgaacttccgcagcggattgccaaaatctccggatgacatcttcctcaacgtacgtgtctactttttcttaattacgggtttgctgaactctcttctcgctccgctccgctctcaccaatctccacccctcctcactgtttataatggggctgggccagcggttttcggggccctttcgcactgcgatttctcgggatgcaccgctttcaagttgccgcactctattacacacgctctaaatgctttccgtctggctaaagactcaattgcggctcgaatggcttggtaaatcgctaggttgagtcgtggaaaaattacggtctctgcttcttcttctttaacttctgagtcagttgctgtgtgaccagagtggcaatcaaaagcaatttctctgccacgctatcgataaacgcatatttgtactaaatcgatgttttatgatttaaaaaaaaatcgattgatattcgttaccgttattaaataattttaactaaaatttacctgcttaaaatgtttaaatactgatgaagtacaaggtaattgcttaactttttatttcatattaaaaagtgaatactaagtgtaagaaatactaacaggtgataacgcgattttcaaatataaagctctctaaagtgatttgcttgtttttagataaacgagcgtaggtatttgcccatcctatcggtggaacttgacgtacttctgtcaaagagtcactgttcgggcgtcgcttaatctcaaattataataagtggttatctgaagaacacacggtccttaattgaaagccttatctgctggcgctggcaaaattttggaatggcgaattaatttaaacgtgccgcgataaaggtcgatgtaaacagttccgcgaaaactatgttagcgaacggacagcaaacaaagtcgttggccagtgggcttcttctcctactgggcatatgccgaatatccggagtggctatcggcgcacccgaggggcgtgtcgtgggtggatctccggcagcggtgaatagtgctccctatgcggtgtccatgcagtacggtggcacccattactgtgccgccagcattctgaatgccaactggctagtcaccgctgcccactgcctgaccaatagtaaccaggtgctgggcagcaccttggtggccggaagcatcgcggtggacggaactgcaagcactacgcagacgcggagcatcacgtacttcgtgatcaatgacttgtacaccggcggaactgtgccctatgacatcggaatgatctacacgcccaccgccttcgtttggagcgccgccgttgccccagtgacgctaccatcctcgggagtggtgcccactggcaccgccaatctgtacggatggggcagcactagcaccacgaataccgcctcctatccgtcgaccctgcaggtggccaccaatgtgcctatcatttcgctgagctcctgcgaaagcgccctgggcaccaagggcagcgatgtccactcgaccaatctgtgcactggtcctctaactggcggcgttagcatttgcacctcggattcgggcggaccactggtccagggcaatgtccttattggcatcgtgtcctggggcaagttaccttgtggtcaggccaactcaccgtcggtttacgtgcaggtctcgtcgtttatatcgtggatatcggctaaccagcaggtgtcctaaatagtcgagtttttccctattttttcaataaaagcaatcaaatgtgtgtccctagtggcggtcacttaaatgtgggactttccttcgcatcacagctactatatcaaacaacgagctgttttttaaagtttatcttatctcgtaaagagagaggaacacggtgagcaaccaacgaacagatttatatgcttcacatattttcgggctgtaaataacaatttcttacattgcacaataacagaataacgaaccgaatcattgtgaaatatgtgagttaagtaaataatgttgagactatggtttcaaaatctaaacatttcttaccagaactaacctttttaacaatggtcttatagatattatatttataatattttccttatcaatggacggggatcccctcgaaaatacagaatgacaaacttgagatattgccctcaacacccttttgcatctattctcattgttgactgagtctatcataacaagagagaaatatatatatataaaatcgtataatcttaagttataataggctcttatctgaaagacaagggctctgattgaaagttcttatcatattctcggttggctcgcatgaaattttttatcacgaattaatttaaaaagccgtcgatagtgccaatgtaaacagttctgtgaaaaccatgattgcgaatggacaacaaaccatgtggcgccatcgccacctggccactatcctcctgctggcggtgtgcgtttcccaaggatctggattagccttggaccaacccgaaggacgcgttgtgggtggaaaagcggcggcggccaatagtgctccgtatatagtgtccatgcagtacggaggaactcactattgcgccgctaacatcattaattccaactggctggtaacggctgctcactgcctggccaataggaatcaagtacttggaagcaccctggtggctggaagcattgcggtggccggaacagcgagcacaacacagaagaggca

SEQ ID NO: 36704 - DNA, 813 bp, DROSOPHILA
atgttagcgaacggacagcaaacaaagtcgttggccagtgggcttcttctcctactgggcatatgccgaatatccggagtggctatcggcgcacccgaggggcgtgtcgtgggtggatctccggcagcggtgaatagtgctccctatgcggtgtccatgcagtacggtggcacccattactgtgccgccagcattctgaatgccaactggctagtcaccgctgcccactgcctgaccaatagtaaccaggtgctgggcagcaccttggtggccggaagcatcgcggtggacggaactgcaagcactacgcagacgcggagcatcacgtacttcgtgatcaatgacttgtacaccggcggaactgtgccctatgacatcggaatgatctacacgcccaccgccttcgtttggagcgccgccgttgccccagtgacgctaccatcctcgggagtggtgcccactggcaccgccaatctgtacggatggggcagcactagcaccacgaataccgcctcctatccgtcgaccctgcaggtggccaccaatgtgcctatcatttcgctgagctcctgcgaaagcgccctgggcaccaagggcagcgatgtccactcgaccaatctgtgcactggtcctctaactggcggcgttagcatttgcacctcggattcgggcggaccactggtccagggcaatgtccttattggcatcgtgtcctggggcaagttaccttgtggtcaggccaactcaccgtcggtttacgtgcaggtctcgtcgtttatatcgtggatatcggctaaccagcaggtgtcctaa

SEQ ID NO: 36705 - protein, 270 aa, DROSOPHILA
MLANGQQTKSLASGLLLLLGICRISGVAIGAPEGRVVGGSPAAVNSAPYAVSMQYGGTHYCAASILNANWLVTAAHCLTNSNQVLGSTLVAGSIAVDGTASTTQTRSITYFVINDLYTGGTVPYDIGMIYTPTAFVWSAAVAPVTLPSSGVVPTGTANLYGWGSTSTTNTASYPSTLQVATNVPIISLSSCESALGTKGSDVHSTNLCTGPLTGGVSICTSDSGGPLVQGNVLIGIVSWGKLPCGQANSPSVYVQVSSFISWISANQQVS

SEQ ID NO: 36706 - DNA, 2822 bp, DROSOPHILA
gatggggcagcactagcaccacgaataccgcctcctatccgtcgaccctgcaggtggccaccaatgtgcctatcatttcgctgagctcctgcgaaagcgccctgggcaccaagggcagcgatgtccactcgaccaatctgtgcactggtcctctaactggcggcgttagcatttgcacctcggattcgggcggaccactggtccagggcaatgtccttattggcatcgtgtcctggggcaagttaccttgtggtcaggccaactcaccgtcggtttacgtgcaggtctcgtcgtttatatcgtggatatcggctaaccagcaggtgtcctaaatagtcgagtttttccctattttttcaataaaagcaatcaaatgtgtgtccctagtggcggtcacttaaatgtgggactttccttcgcatcacagctactatatcaaacaacgagctgttttttaaagtttatcttatctcgtaaagagagaggaacacggtgagcaaccaacgaacagatttatatgcttcacatattttcgggctgtaaataacaatttcttacattgcacaataacagaataacgaaccgaatcattgtgaaatatgtgagttaagtaaataatgttgagactatggtttcaaaatctaaacatttcttaccagaactaacctttttaacaatggtcttatagatattatatttataatattttccttatcaatggacggggatcccctcgaaaatacagaatgacaaacttgagatattgccctcaacacccttttgcatctattctcattgttgactgagtctatcataacaagagagaaatatatatatataaaatcgtataatcttaagttataataggctcttatctgaaagacaagggctctgattgaaagttcttatcatattctcggttggctcgcatgaaattttttatcacgaattaatttaaaaagccgtcgatagtgccaatgtaaacagttctgtgaaaaccatgattgcgaatggacaacaaaccatgtggcgccatcgccacctggccactatcctcctgctggcggtgtgcgtttcccaaggatctggattagccttggaccaacccgaaggacgcgttgtgggtggaaaagcggcggcggccaatagtgctccgtatatagtgtccatgcagtacggaggaactcactattgcgccgctaacatcattaattccaactggctggtaacggctgctcactgcctggccaataggaatcaagtacttggaagcaccctggtggctggaagcattgcggtggccggaacagcgagcacaacacagaagaggcaaatcacccactatgtgatcaatgatctttataccggcggaactgtgccctatgacatcggattgatttacacgcccaccgccttcacttggaccgctgcagtggctccggtgaagctgccatcgtccggcgtgaggccaactggaaaggctgacctctttggctggggcagtactagcaaaacgaatagcccctcatatccgaaaaccctccaggaggcgaagaacatacccatcataagcctcgactcctgcgctgcggcacttggctctaagggtcaggatgtgcacaccacgaacctgtgcacaggtcctctcaccggcggcaccagcttttgcacctcggactccggtggtccgctggtccagggaaacgttctaatcggcatcgtgtcttggggaaaacttccatgtggtcagcccaactctccgtcggtgtatgtccaggtctcctcgttcataacatggatagcagccaaccaaaagaaatgaattctggagtataagatagtatctgaataaagaaatacttatgagattgcagtatcacgtgcttattataaatgacaacttttagagtctttaaaatcatgcattaattgattgtaatgtatctttgaaagaacttaaaagcatttatatacattttgttatatgtcgaattatcttatctaataaataaatagagctagtttaagaagatggtaaccaatgtatatatatattttataacaaagtaaatcagataagactataaatgttttagatatccaacttatatgtgaacccaattttaactagataaagctttccaagaagtagcaaaaataaagatataaaaataagctttatcttttcttttgttataaaaaactgaatataaaccaaaaaagggtaatgtcaacaagatgttatctttaccaagaaatatccggattaactttccatttttctattgcacaactattctgagcactatactccccagggaacttagcacttggaatgagttttgcttttgaatccgtctcacttttggtgtcagcacgtccagatttcatttcatcccagacactcctcttcaatcgctgtttttatcaatcatattgatcggaatgttcttattgggaaactaattgctcggtaagttgctggacacgatcgcaatcagtttattgacacgaccagtacataattgaatggacatatcaatttcccatcacaatcacaccagcaaagcttattaagtgcctccaaaagagcttcgcaagcaaggcggccaagagcgcggaacgtggcccaaagaacgatggccagaacacgcccgcagctaatcaggctctaatggcgataaatatttcattctatattattctgtttccattcccccaaccaaacacgcctccaagtcccagtcaagctgcctggccaaggagtcaagacaaagcgacgactcaacgggaatggacaggggagtccaccagaacagacc

SEQ ID NO: 36707 - DNA, 822 bp, DROSOPHILA
atgattgcgaatggacaacaaaccatgtggcgccatcgccacctggccactatcctcctgctggcggtgtgcgtttcccaaggatctggattagccttggaccaacccgaaggacgcgttgtgggtggaaaagcggcggcggccaatagtgctccgtatatagtgtccatgcagtacggaggaactcactattgcgccgctaacatcattaattccaactggctggtaacggctgctcactgcctggccaataggaatcaagtacttggaagcaccctggtggctggaagcattgcggtggccggaacagcgagcacaacacagaagaggcaaatcacccactatgtgatcaatgatctttataccggcggaactgtgccctatgacatcggattgatttacacgcccaccgccttcacttggaccgctgcagtggctccggtgaagctgccatcgtccggcgtgaggccaactggaaaggctgacctctttggctggggcagtactagcaaaacgaatagcccctcatatccgaaaaccctccaggaggcgaagaacatacccatcataagcctcgactcctgcgctgcggcacttggctctaagggtcaggatgtgcacaccacgaacctgtgcacaggtcctctcaccggcggcaccagcttttgcacctcggactccggtggtccgctggtccagggaaacgttctaatcggcatcgtgtcttggggaaaacttccatgtggtcagcccaactctccgtcggtgtatgtccaggtctcctcgttcataacatggatagcagccaaccaaaagaaatga

SEQ ID NO: 36708 - protein, 273 aa, DROSOPHILA
MIANGQQTMWRHRHLATILLLAVCVSQGSGLALDQPEGRVVGGKAAAANSAPYIVSMQYGGTHYCAANIINSNWLVTAAHCLANRNQVLGSTLVAGSIAVAGTASTTQKRQITHYVINDLYTGGTVPYDIGLIYTPTAFTWTAAVAPVKLPSSGVRPTGKADLFGWGSTSKTNSPSYPKTLQEAKNIPIISLDSCAAALGSKGQDVHTTNLCTGPLTGGTSFCTSDSGGPLVQGNVLIGIVSWGKLPCGQPNSPSVYVQVSSFITWIAANQKK

SEQ ID NO: 36709 - DNA, 6532 bp, DROSOPHILA
gttcagctgcttttcgctgaaagtttatggcattgaggcgaaagattgaactaagcaagggcttaacatagagggaaattcatttgttgttttaatactgttaaggtaaagcagttctattaatcatcgtaaagaggcttagttgtttaggatgattatttcatttctgcctatgtttgataccagataataccctttgaatttgtctttcatacaaatataaattagactgtaataactcaagttactacccgcgtgccttcttacttaatctcaatcttcacaatgccgcgcacatcgtgtagtacgcatgtcgatttggctcggtggaaaagcttattcaaatgaagttgtttgaaccggcaacctgttgcatagtttcgctaacattattcaacaacgtagcaccactcactaatgaccagcacttacccacatctccgtctttctccatatctttgcagctgtgaggcgaacaaattttccttttttgccgcccgtctgtggatttatatatatatacacatatatatggttcattaaaagtgtggcagaactttggcactggcgacaagtaacgagcgacgacgacctgtggcaatgctccagcaaattgtgcgggtaatttccagctcgttttaatttgctccaagtcgcagccaaatggtcatgcgcaccgttggccgtcgctgtcattcgaaagttgccgctgcgtgacacacatttgcggagcattagaagcattcgactccacatctggcagacacgttggagctctgccctgccgcatcagctgggatactaatatacacacctatatatttatatatatacgtgggtatacccaagaggtaacacaacaaccagggggtaccaaactctgctcggacctggcccaagtccaaagtcgcctctgttgcattattcatgctcttcggcggcatctacgtccacttctacgcaacggaaccgggaacgggaacaaaattcacgaacgaagatgacgctgcgcttagtcagcatattatcggcggcattactactcctatggcccgcacagctggatgcatttatcacaccgaacacaggtgagttcggggccagcggataatgtctgtgaaatgtgtggcattgggtgagatggttgcatctctgcagcggaaaagagttaatatagtggaaaatggtatgaatccattagtcgtgctatagaaagcttagtgcaaagcccaaaatcaaactatttcaaaaagaagtttagcgacttacagctattaatttactatttatacttatttcatatttgttgcaataaatcattaggctgccatcacaatggcacttggtttgcggacaaatcggtggtgcccagcatggagaagtgtctgaattgccagtgtaaccgaaagacactagtgtgtcgcctgaaagtgtgtcccgaaatgccaatgccaccgccccgaggctgtgtggtcgtccaaaagaagagctcctgctgtccgtatctttcctgcgcaagattggatgcattctacaagatacccaccaagcgtcgcatcatcgcgtatctggatcactacgaaagggagtccatcgatcgggtggtcaacgataatatgctgcagaggcgttcagatgattccgatacggatttgtttggtatacaacacaattgacaattgataaaaataaagattctaaagttcattttgtattttgtatacagtttgtgtgaaaaatggaactgtctacaagtcgggatctgccatgtcatcttcaaatttgtgcagctactgctattgcataggtatgattaaaaattaaataatatattttttatataaataatttccttttttacccaataggtggcaccgagaagtgtgtgaagccaaaatgcatgctgcccgttgagggctgtaagcccatctttgtggactccacctgttgtcccgtaagatacgattgcagtagcaaaacgtcgggaaaatcctctcaggaggtgcgctacaggaagacctcgaacaagcacttcctgcgcatgtcacagcgcctgcagcgcaatcgaggctgcactgtaggtgcccagttctacgcagagggtcagaagatgcgatcggatgcggacaagccatgcgacatatgcttctgtatccggggaaccaggcgttgtgcacccaagaagtgctcgccggcactgaagaactgcattccagtggtgccgaagggtcagtgctgtccatcgagttacgactgtggcagtcagcgggattatcgtagatcccacaactccagacagttcaatctgtataatatgctgtttggcaaggaggaaccggagcaacaggggacagctttaattccgcagaattccatggccgagaggtatccacacgatcgtcatccgacgagagctactctgggcaatcccctggaggtcagtagtgaaaagagcattatggacacacttcgcgaaggccttgagttcatagatggtaataacaacaaaatgttggccaataatttggatcttgtgggcataagaaccacccaggcaccgcctttgatgagaactgaatccagtgaggaggtgagcagtacaacggcactaagttttctggatttgttactgggtcccaatacggaaacaacgagtcacgaagaaataagacaaccggaatcgacgacggccaaaaacacactctcctggatggatatactcttgggtccggatgaagaggaactgggccccaaaacagaagcctatttggagactagtactactctgaatcaaccggatgagttcaatccttcaactaacagcattaaacgcattgccgaggactttgatgagcaattggacaatggcgaaatggctgtgggtgaactgccggcggaggcccaacaaattggtatcgcaaatgctggaatttggccaacaccagccacagaagtaatgcctcctccgaaagaggaaccaagtctattcaatgtcctgatagatggcttgtctggcatactcgaagaaccactcaatcaaacagcaagctccacaagtaccacaactaccactgagaaacccactaatctgcctgcaccacccatgtttcgaccactgccaagtggcaagcccgttcacacgcgaatcaattccaagctggcgaatctcacagtgacgccgcccatgttggtggtgactagcaaatatggtcaaccggtgacccatcggacggcaaataagagggtcaatgcaaccactagttctacaatagccaaaagcaccgataaaccaagtacgagcaccacccagcaaaccaaagtagatagcacgattaaaaccacagcaacgcctagtacgacggtgaaacccaagccgaggaccactagaaaaactattactacttcaaaaccaactactccaaaacctacaactccgaaaactacaacttcgaaacctacaactccaaaaattacaactccaaaacctacaacgccaaaaccttcaacaacaaagaccacaactccaaagtcatcttctgcaaaacccgcactcccaccgaaatccacaactcaaagacccacaactccgataccttccactccggcacccacaactacaacaaccagcaccaccagcaccacaacaaaacccacattacgcaccaccagcaagtcaaaatttaagccaaaacccaaaccctatgttactagtactccaaaaccgttggtgatcgaaacaaatccgagtatcttggaggctgagccactggacatcaatggtgaacccacactgcctcccagtcttcccaacctaaagattataccattccttccaaccgatgctgtggatacggttcccaaggagcagtatcccaccaacttctatcagcagaaagtggcttccgataagatggatgtggttggctatgataccatggatgacacggtggctctatactcacaatcccagccggatcaggctgcctacaagtacaagttcaacgtggaagtgccagcggtggaatctgctccagaaccagtggtccatgtgggtgggaaatacgaaggaagtgcggcctacgtcaactttgacttcgaaagtcctgtggtgccacctccgcacaatggattctcaccacccaccgaaacggagggcggatttatgcccaaggaaccgctggttatcgatggtgaaatccttcaggagcacgtcacctcgagtggcatcggcggcccagttgataacttccatgtgacacagcacattatcgacatcacaacctcgggcgcacaggaaaatgatactgcttcaataggtgagttgaagtttttagaactttaacaagcttgtatattcttgcaccgcactgaatttgagagatttatctaaaaatgtccacttggttttgcccttttacagaaatcactacacccgaccccttcaaagatgtcatacacacagaaccgtcgcccaatctcgatgaactaatcgttgacaaggcgaacaaaaagccgattgaagagcatatcgagaccgtcacttacagtgttagcaactcaacagcctcctccatatcgtcatccacaagcggcacaaccagcacaaccagcacatccacgtcgacgacaacggaaaaggaagcccccttgatagataaatatgaaatcaataaattggataagctcttggatgagctgctcggtatggagttgtccgaagaggatgcagcaagcaggacagtgcctgcatttaagcaactgcctacggcaacgccaacgatagcaaaatcaacaacagcagcaacagcaactgcagcagatgcgagtgcaacagcagcaacagcaactgcagcaattgcatcaagcacggctgcaacatcgacctctggtcggccaacagtgacgacacgtgctccggccaaaaagggaaacggcaaaacgaaaaacaaacagaccagcggcaatagacgcaaagtccagagtggcacgcgacgccagagtacaccggcaaccactcgatccccgccagcagcgacatcaacggcatcaactgcgtcaacaaccgcggggcttgccacaacaacggggagcactctgcatccatttttaaactcaccgttcgacaaattacccttcatggataccagctatgaggtaagaccgcacagattgcaaccgcagcaacagcagcagcagcaagcaccgcagcaacatgagcagccaccgcagcagcaattccaccattaccagcatgcaacgcgaccgccgacagcagccccatcagcagcgtcatcatccccggaggatgtgcaccaggattcaggttctggttcggttgagcggactggtggaggcggactggtgggtggacttccgggtggcgatgatccgcttggtcagttgaaattggctggctgcaacatatacggacgcatgtatcgggtgggtcggattattgtggagctatccagccagtgcctggaatgcaaatgcaccgaggtgggcgtcaagtgcggcccattagactgttaatttagatatccccccccccctacgattgtaatccccccaggaagtctgtagcggttaagtttcagtttgtagcagtagcttttagttcgtattgtactacagggtagtttaggccttctcaagaccctaagttgtattatagaaaaaaatgattaatatatttaaaacttagcatggcatttataacatacaataattaaggctataattaaataagaagtacacgaaatatatttaataaaactaacaaataaattatcaaaatctaaagtctttgttttgaattattacactttattatttattttgatgaaaagtcaaacaacaaccaacaaattggtttataaatattgatcgcatttcaaccttgtgacaaataacaaattgctagtttggggaaatgtttctacgaattgtgttgaatttaattgcacatcaagatcattatggaatccatgagtttaaattaaacattcctgtctgcgtcagcattaattggccaaagccaatcgatgagtaattaataaattctatacagacttattcagttagcaagtataggccaattaaatgtgtggcgagtgaagagcacaaaaaacaagccataaaacatggcccaccctttctttatgaggtgtaaatttaatgtttattcataacaccgaaattaaacattaaccacgacgatagaataataattttcaatggattttgcgaccaaataaaagacagtccacacaggaaatatttatttagggactgttggattgtcagaatattaaatagtctaagaagttgttgaactttttgcaggtttaataatcagacattaattgcgtttaatgattgatctttatcggctataagataaaagtctttcatgactgccttcaatttgttttaaaacgtatttttcactatgatataaatataatatatatttgaatggaactatcttatttgagactaaaagtaaatggccttttgattggctggctgc

SEQ ID NO: 36710 - DNA, 4065 bp, DROSOPHILA
atgacgctgcgcttagtcagcatattatcggcggcattactactcctatggcccgcacagctggatgcatttatcacaccgaacacaggctgccatcacaatggcacttggtttgcggacaaatcggtggtgcccagcatggagaagtgtctgaattgccagtgtaaccgaaagacactagtgtgtcgcctgaaagtgtgtcccgaaatgccaatgccaccgccccgaggctgtgtggtcgtccaaaagaagagctcctgctgtccgtatctttcctgcgcaagattggatgcattctacaagatacccaccaagcgtcgcatcatcgcgtatctggatcactacgaaagggagtccatcgatcgggtggtcaacgataatatgctgcagaggcgttcagatgattccgatacggatttgtttgtttgtgtgaaaaatggaactgtctacaagtcgggatctgccatgtcatcttcaaatttgtgcagctactgctattgcataggtggcaccgagaagtgtgtgaagccaaaatgcatgctgcccgttgagggctgtaagcccatctttgtggactccacctgttgtcccgtaagatacgattgcagtagcaaaacgtcgggaaaatcctctcaggaggtgcgctacaggaagacctcgaacaagcacttcctgcgcatgtcacagcgcctgcagcgcaatcgaggctgcactgtaggtgcccagttctacgcagagggtcagaagatgcgatcggatgcggacaagccatgcgacatatgcttctgtatccggggaaccaggcgttgtgcacccaagaagtgctcgccggcactgaagaactgcattccagtggtgccgaagggtcagtgctgtccatcgagttacgactgtggcagtcagcgggattatcgtagatcccacaactccagacagttcaatctgtataatatgctgtttggcaaggaggaaccggagcaacaggggacagctttaattccgcagaattccatggccgagaggtatccacacgatcgtcatccgacgagagctactctgggcaatcccctggaggtcagtagtgaaaagagcattatggacacacttcgcgaaggccttgagttcatagatggtaataacaacaaaatgttggccaataatttggatcttgtgggcataagaaccacccaggcaccgcctttgatgagaactgaatccagtgaggaggtgagcagtacaacggcactaagttttctggatttgttactgggtcccaatacggaaacaacgagtcacgaagaaataagacaaccggaatcgacgacggccaaaaacacactctcctggatggatatactcttgggtccggatgaagaggaactgggccccaaaacagaagcctatttggagactagtactactctgaatcaaccggatgagttcaatccttcaactaacagcattaaacgcattgccgaggactttgatgagcaattggacaatggcgaaatggctgtgggtgaactgccggcggaggcccaacaaattggtatcgcaaatgctggaatttggccaacaccagccacagaagtaatgcctcctccgaaagaggaaccaagtctattcaatgtcctgatagatggcttgtctggcatactcgaagaaccactcaatcaaacagcaagctccacaagtaccacaactaccactgagaaacccactaatctgcctgcaccacccatgtttcgaccactgccaagtggcaagcccgttcacacgcgaatcaattccaagctggcgaatctcacagtgacgccgcccatgttggtggtgactagcaaatatggtcaaccggtgacccatcggacggcaaataagagggtcaatgcaaccactagttctacaatagccaaaagcaccgataaaccaagtacgagcaccacccagcaaaccaaagtagatagcacgattaaaaccacagcaacgcctagtacgacggtgaaacccaagccgaggaccactagaaaaactattactacttcaaaaccaactactccaaaacctacaactccgaaaactacaacttcgaaacctacaactccaaaaattacaactccaaaacctacaacgccaaaaccttcaacaacaaagaccacaactccaaagtcatcttctgcaaaacccgcactcccaccgaaatccacaactcaaagacccacaactccgataccttccactccggcacccacaactacaacaaccagcaccaccagcaccacaacaaaacccacattacgcaccaccagcaagtcaaaatttaagccaaaacccaaaccctatgttactagtactccaaaaccgttggtgatcgaaacaaatccgagtatcttggaggctgagccactggacatcaatggtgaacccacactgcctcccagtcttcccaacctaaagattataccattccttccaaccgatgctgtggatacggttcccaaggagcagtatcccaccaacttctatcagcagaaagtggcttccgataagatggatgtggttggctatgataccatggatgacacggtggctctatactcacaatcccagccggatcaggctgcctacaagtacaagttcaacgtggaagtgccagcggtggaatctgctccagaaccagtggtccatgtgggtgggaaatacgaaggaagtgcggcctacgtcaactttgacttcgaaagtcctgtggtgccacctccgcacaatggattctcaccacccaccgaaacggagggcggatttatgcccaaggaaccgctggttatcgatggtgaaatccttcaggagcacgtcacctcgagtggcatcggcggcccagttgataacttccatgtgacacagcacattatcgacatcacaacctcgggcgcacaggaaaatgatactgcttcaatagaaatcactacacccgaccccttcaaagatgtcatacacacagaaccgtcgcccaatctcgatgaactaatcgttgacaaggcgaacaaaaagccgattgaagagcatatcgagaccgtcacttacagtgttagcaactcaacagcctcctccatatcgtcatccacaagcggcacaaccagcacaaccagcacatccacgtcgacgacaacggaaaaggaagcccccttgatagataaatatgaaatcaataaattggataagctcttggatgagctgctcggtatggagttgtccgaagaggatgcagcaagcaggacagtgcctgcatttaagcaactgcctacggcaacgccaacgatagcaaaatcaacaacagcagcaacagcaactgcagcagatgcgagtgcaacagcagcaacagcaactgcagcaattgcatcaagcacggctgcaacatcgacctctggtcggccaacagtgacgacacgtgctccggccaaaaagggaaacggcaaaacgaaaaacaaacagaccagcggcaatagacgcaaagtccagagtggcacgcgacgccagagtacaccggcaaccactcgatccccgccagcagcgacatcaacggcatcaactgcgtcaacaaccgcggggcttgccacaacaacggggagcactctgcatccatttttaaactcaccgttcgacaaattacccttcatggataccagctatgaggtaagaccgcacagattgcaaccgcagcaacagcagcagcagcaagcaccgcagcaacatgagcagccaccgcagcagcaattccaccattaccagcatgcaacgcgaccgccgacagcagccccatcagcagcgtcatcatccccggaggatgtgcaccaggattcaggttctggttcggttgagcggactggtggaggcggactggtgggtggacttccgggtggcgatgatccgcttggtcagttgaaattggctggctgcaacatatacggacgcatgtatcgggtgggtcggattattgtggagctatccagccagtgcctggaatgcaaatgcaccgaggtgggcgtcaagtgcggcccattagactgttaa

SEQ ID NO: 36711 - protein, 1354 aa, DROSOPHILA
MTLRLVSILSAALLLLWPAQLDAFITPNTGCHHNGTWFADKSVVPSMEKCLNCQCNRKTLVCRLKVCPEMPMPPPRGCVVVQKKSSCCPYLSCARLDAFYKIPTKRRIIAYLDHYERESIDRVVNDNMLQRRSDDSDTDLFVCVKNGTVYKSGSAMSSSNLCSYCYCIGGTEKCVKPKCMLPVEGCKPIFVDSTCCPVRYDCSSKTSGKSSQEVRYRKTSNKHFLRMSQRLQRNRGCTVGAQFYAEGQKMRSDADKPCDICFCIRGTRRCAPKKCSPALKNCIPVVPKGQCCPSSYDCGSQRDYRRSHNSRQFNLYNMLFGKEEPEQQGTALIPQNSMAERYPHDRHPTRATLGNPLEVSSEKSIMDTLREGLEFIDGNNNKMLANNLDLVGIRTTQAPPLMRTESSEEVSSTTALSFLDLLLGPNTETTSHEEIRQPESTTAKNTLSWMDILLGPDEEELGPKTEAYLETSTTLNQPDEFNPSTNSIKRIAEDFDEQLDNGEMAVGELPAEAQQIGIANAGIWPTPATEVMPPPKEEPSLFNVLIDGLSGILEEPLNQTASSTSTTTTTEKPTNLPAPPMFRPLPSGKPVHTRINSKLANLTVTPPMLVVTSKYGQPVTHRTANKRVNATTSSTIAKSTDKPSTSTTQQTKVDSTIKTTATPSTTVKPKPRTTRKTITTSKPTTPKPTTPKTTTSKPTTPKITTPKPTTPKPSTTKTTTPKSSSAKPALPPKSTTQRPTTPIPSTPAPTTTTTSTTSTTTKPTLRTTSKSKFKPKPKPYVTSTPKPLVIETNPSILEAEPLDINGEPTLPPSLPNLKIIPFLPTDAVDTVPKEQYPTNFYQQKVASDKMDVVGYDTMDDTVALYSQSQPDQAAYKYKFNVEVPAVESAPEPVVHVGGKYEGSAAYVNFDFESPVVPPPHNGFSPPTETEGGFMPKEPLVIDGEILQEHVTSSGIGGPVDNFHVTQHIIDITTSGAQENDTASIEITTPDPFKDVIHTEPSPNLDELIVDKANKKPIEEHIETVTYSVSNSTASSISSSTSGTTSTTSTSTSTTTEKEAPLIDKYEINKLDKLLDELLGMELSEEDAASRTVPAFKQLPTATPTIAKSTTAATATAADASATAATATAAIASSTAATSTSGRPTVTTRAPAKKGNGKTKNKQTSGNRRKVQSGTRRQSTPATTRSPPAATSTASTASTTAGLATTTGSTLHPFLNSPFDKLPFMDTSYEVRPHRLQPQQQQQQQAPQQHEQPPQQQFHHYQHATRPPTAAPSAASSSPEDVHQDSGSGSVERTGGGGLVGGLPGGDDPLGQLKLAGCNIYGRMYRVGRIIVELSSQCLECKCTEVGVKCGPLDC

SEQ ID NO: 36712 - DNA, 4828 bp, DROSOPHILA
catatcttttatggacatcgagtcgaatgagtaatttttttaaaaaccaaatttttgttaaatacataaacttataaaatataaaacatttataataaatgaataaatagatataaacagttctttaaaataatttgatagtaagtataccgtagttttttgtttctggctaactagtcgtataagtgatattcttgaacgaaaaagtttagtttcagctttgtaggcatatatattaatggtatttcggctaataataaaccaaaataatttattaattacatgtagcttccgttgcgtgcccataattggccatctctaagacatgtagaaccgatgattttgcggtctattgggcgtgcatgagcataagtaagatgcacaggatgtttgtccgtcgctctacacgaaagtcctttcctgccgtcgccggatccccttggtcaaaaatatatgtgtgagtgcgtgtgcatgaatgttggttggtgcgtgcctccgatgcaaactcaattatttactaagtgggccaaaaggcatccagcaggcgggaaaatcaccttacactcacccagtgccgtcttgttttagttgtaactgttgtaagtccctttccaacccgcgctgtatgcccaaccaactctggggaaatttgcattttatcatcttatggttttggcccgctttcctttacctttctgcgtcccttgtcgccagttattgctgccagtaagggctttgcttttaattggttttcttaggcgagaaacgtcttagctagttggcaactcgaagggggaaatcttattgccggtgttgtcttacatagttgttaatttactgctaggcggcactaacttataattgtttaattagcaagtaaaataaggggaaaatatgtggaaattattagatttcaaggactcaacacaaagacgatattatcatgggtgtttgagtatcctgggaatttgcatatggcacttcaatattaaataaataaatgaaacggaaggccgtggaagtaatttaatttgtaaactatttagttaaggataacctatattttttgtaattctttctgtactagttaaaaccttattttgcaaagttattttgtattatttagttttataaattaaatctactattgaaaccaataattttcagtgtgaactagtaatattaataatcaatacattagcggatcaaacgctaaagcacttaaaaaaattatgtcttcaaacttttcctcttttattaagttaaaaaatggtatagaacttatttttaaatctaccaagaagtgaatttcttgaatttattaaaaacatttcgtcagtgagttctttatatattaacttcccagccttttatttatggctcactcatttctcagggtgcacagttcacatttaataagctaaaagcattttaggcttcccctccgaagatatttatcttaaccatatgcgcattattttcccccgccgctgcgtataagcgttttcattatgccaacaatcgagtgagtacatagggaaaatggaaacccttttggaacaccaatcgaccgacaaactagtggcagttcacagagaaaagttatatggaaaagttatcaaacggagtagcgagtaaattccagcaatatgattcaaattatgaattggttttcaatggtaaaaattaagaaaatgctcgtaattaccgtgcattctaatcacataattctttaaaaattaggtcataggcctcattccactgaatcgccagcaatcggaaactaacttcatactcgactacgccatgatgtgcattgtgcccatcttctatgtggcttgctatcttctcataaatcttagccacattattggcctctgtttactggactcttgcaatagtgtttgcaagctgagcagccatctctttatgcatttgggcgcatttctatatctgaccatcaccctgctgtcactttatcgccgaaaggagtttttccagcagtttgatgcgagacttaatgacattgatgcagttatccagaaatgccagcgggtggcggaaatggacaaggtgaaggttactgcggtgaaacacagtgtggcctatcacttcacctggcttttcctattctgcgttttcacctttgccctttactatgacgtcagatctttgtacttgtgagtatgccgttcaaatatactaaagattaaagaactaaattgttgccgaactacaataattattacttaaattgcaatatttttgccatatcctaatcattggtagttgaattttaaagcccaaattgtctcgttctaggaccttcggcaatctcgccttcattccgttcatggtgtccagtttcccatatttggccggcagcatcattcagggtgagttcatctatcacgtgtcggtcatctcgcagcgcttcgagcagattaacatgctgctggagaagattaaccaggaggcgcgccatcgccacgcaccccttaccgtgttcgatatcgagagcgagggcaaaaaggagcggaagaccgttacaccgattacggtcatggacggcaggacgacgacaggatttggcaatgagaacaagttcgccggcgaaatgaagcgccaggaggggcaacaaaagaacgacgatgacgatttggacaccagcaacgacgaggacgaggatgactttgattatgacaatgccaccatcgcggaaaatactgggtaaggggaaaaagcgaattggcggccatggttttggccaacaaaaaatggtttgattaatggttatgtttgttgtttagctaccttaatatatgcattttcatttatgcatttttgaatttatttgtcagcaggcgaatcaaaatagtgtcaacataaaataatgaattaagttatatataaagcactaatgagcttcaaaagtggtaatagaagtgtgcaattaagaatttcattgcctaagccaaagtcaacctcgaaatgtttattatctatatttttatgacttttttataacttatttatttactaaatttaattactttgcgaagcaaaaacatgttcaaacttttcggttttcccatggtttctgcacacaaaaaaggtttgattaatttatggctttttaatatgtatttttttgccaacacattattaaaaggaaaaatattttaaaaaaaatgtaataacttcattgtaatttagaaacacatcggaagccaatttaccagatctcttcaagctgcatgataaaatcctggcgctcagcgtgattacaaacggcgagtttggaccacagtgtgtaccctatatggcggcctgctttgtggtgagcatctttggcattttcctggagaccaaggtcaacttcattgtgggcggcaagagtcgactgctggactatatgacctatttgtacgtgatttggagcttcaccaccatgatggtggcctacatagtgcttcgactatgctgcaatgccaacaatcattccaaacaatcggcgatgattgtccatgagattatgcaaaagaaaccggcatttatgttgagcaacgatctgttctacaacaaaatgaagtcattcacactgcagtttcttcactgggagggtttctttcaattcaacggcgtgggattgtttgctctggactacacattcattttctcggtaagtttcagagtgcttactttagtttttttttaataattaagagcgtccattttcagactgtaagtgcagccacatcctatttaattgtcctgctgcagtttgacatgactgcaattttgcgcaacgaggggctaatgtcataaaagttcccgtcgaactcgattaaattgaattttttgaagccctttcatgcgaataagaaaaaagaacttgaaaaagtcgaccacaaaacacacttgcgataaaaaagcttatttcttaaatcataaatgtttttattgtgtataaaagaaaaaaaaagcattttaagcaattatctttaacactcattttaacaagcgctcaatgaaatcattattgatgtttaccaagcgtaaatcttatttccaatataattaaatggacaatttgcaacacgtttttggcgcttatcagtcaattgctggctcataaatcactcatccaaggacattttccgagagtaaccaaagcgagatgcggaaaatccgcaggaggcgaacgatggctccagtcagcacccgcgtggtaatcacatcagccaaaactccgtgaagcttgcaaaagggcaggagtagaggacagctacacagggtttctaatgcaatttctatcaaatgtcaattgaaacccgatttgccagtcatcagtcagggcctctattccacgcccagtccacagtttgtggccagcgaacggaagtcgcgggattcgtggaaaagtgaaaacgggaacgaggaaggatgctcgacggcagaaaaagaaggacatgaagcaatttccgctttcaatcacgtttagtgcaccggaaatgtgtgcagaaatatgtttcttctcccattttcctatgcaaaattttccaaccggaatgaggttagattgtaaattacatttgggtgcggttcaatctattttcacggaaaagaggggcaatcgagcaccattgagtgtcaagggaaactcaattaattgcacattatgtgcgaggagtatgcgttcgattgattttttgtcacactttctgtctctttttcttacacacgctgcgtgtttcacattacacactttatcagtgcactgaaagctatttcgtggtttaagaaaaataaaattacctaaaatata

SEQ ID NO: 36713 - DNA, 1419 bp, DROSOPHILA
atgaaacggaaggccgtggaagtcataggcctcattccactgaatcgccagcaatcggaaactaacttcatactcgactacgccatgatgtgcattgtgcccatcttctatgtggcttgctatcttctcataaatcttagccacattattggcctctgtttactggactcttgcaatagtgtttgcaagctgagcagccatctctttatgcatttgggcgcatttctatatctgaccatcaccctgctgtcactttatcgccgaaaggagtttttccagcagtttgatgcgagacttaatgacattgatgcagttatccagaaatgccagcgggtggcggaaatggacaaggtgaaggttactgcggtgaaacacagtgtggcctatcacttcacctggcttttcctattctgcgttttcacctttgccctttactatgacgtcagatctttgtacttgaccttcggcaatctcgccttcattccgttcatggtgtccagtttcccatatttggccggcagcatcattcagggtgagttcatctatcacgtgtcggtcatctcgcagcgcttcgagcagattaacatgctgctggagaagattaaccaggaggcgcgccatcgccacgcaccccttaccgtgttcgatatcgagagcgagggcaaaaaggagcggaagaccgttacaccgattacggtcatggacggcaggacgacgacaggatttggcaatgagaacaagttcgccggcgaaatgaagcgccaggaggggcaacaaaagaacgacgatgacgatttggacaccagcaacgacgaggacgaggatgactttgattatgacaatgccaccatcgcggaaaatactggaaacacatcggaagccaatttaccagatctcttcaagctgcatgataaaatcctggcgctcagcgtgattacaaacggcgagtttggaccacagtgtgtaccctatatggcggcctgctttgtggtgagcatctttggcattttcctggagaccaaggtcaacttcattgtgggcggcaagagtcgactgctggactatatgacctatttgtacgtgatttggagcttcaccaccatgatggtggcctacatagtgcttcgactatgctgcaatgccaacaatcattccaaacaatcggcgatgattgtccatgagattatgcaaaagaaaccggcatttatgttgagcaacgatctgttctacaacaaaatgaagtcattcacactgcagtttcttcactgggagggtttctttcaattcaacggcgtgggattgtttgctctggactacacattcattttctcgactgtaagtgcagccacatcctatttaattgtcctgctgcagtttgacatgactgcaattttgcgcaacgaggggctaatgtcataa

SEQ ID NO: 36714 - protein, 472 aa, DROSOPHILA
MKRKAVEVIGLIPLNRQQSETNFILDYAMMCIVPIFYVACYLLINLSHIIGLCLLDSCNSVCKLSSHLFMHLGAFLYLTITLLSLYRRKEFFQQFDARLNDIDAVIQKCQRVAEMDKVKVTAVKHSVAYHFTWLFLFCVFTFALYYDVRSLYLTFGNLAFIPFMVSSFPYLAGSIIQGEFIYHVSVISQRFEQINMLLEKINQEARHRHAPLTVFDIESEGKKERKTVTPITVMDGRTTTGFGNENKFAGEMKRQEGQQKNDDDDLDTSNDEDEDDFDYDNATIAENTGNTSEANLPDLFKLHDKILALSVITNGEFGPQCVPYMAACFVVSIFGIFLETKVNFIVGGKSRLLDYMTYLYVIWSFTTMMVAYIVLRLCCNANNHSKQSAMIVHEIMQKKPAFMLSNDLFYNKMKSFTLQFLHWEGFFQFNGVGLFALDYTFIFSTVSAATSYLIVLLQFDMTAILRNEGLMS

SEQ ID NO: 36715 - DNA, 2459 bp, DROSOPHILA
atcttgaggagacataagcaagcttctgctttttggcttataaataactaataatatttgtttgctttcttaagccatgctcatttattcgtcgtacgtttactaccacatgcaaacaatattgagccgacacataaataaattgataaaatatttatttatggcccggaaggtgtaaactaatcgaaaagaaactcgaaacagtcagaaactaaagtatgcgatgacagcaaagtaagtgcatgaacagatagccatttgcttaccttaaacgcctacaatactgttctgaatgaaacgaactcgtaaataaatactgaaagcataaataaaataggtgggagtgggtggaaaacacttgcagaaccgacccatttccacgtcagcacagtgaaagcgagcgaaatgtaaatatcaaataaaacgcgtagcaaaaaaaaaagggaaatgctacacatttgcgtttgagctgaactgaaaggcatggaaagtaagttttggacttgatttccagaccacttctgtctgctcatgttgtcataataatggcttttccagcccccgaaaagagtgtaacacacccacgtcttacttgccattttatttgcagtgctttcaaactcggaaaaatggcacccatttgtaagaaagtgtgtaataaggacctggctgaaaaacatatacgtgcgccataaagtccttagcgattgaaatgccttttcccattttttgactattaaagttatgagggagtcttttaagtttaacatcaatatgttgccaatgacatgttgtaagcagtttgttgttacacgagtttaagtatctaactattgtaaaatttttttttgtataacaacaatacagatctgatattccttatatttaaaaacgtttacagtttatgctacgggttcaattcgcgtttaatagccactattgtctggcagtaatccacgttctgtgtcctcccattgcagttgcaaatgcgaaaacaacaatgaaatgctggcacaatgtggtgaggcgcagaaggaagaagccgacggcagcggcggcggcgaaaggatcaaaggggtcgcatggaggcgtggcaagtcctcgagatgaagatgccatctgccagcggcagcaacaagtggatacctacacttggctaacaacacaagctgtccctctgctgtggctgcacttgttgctccttgtcgcatttgcaaaacatgcggctgcagccacaacaattgccacaaatcccgaggccaccacaacaacggtgagcaactacacggtgacgaccacggcactatcatcatccacgacaaccacttcatcgggatcagctccagctttatcatctgcggcggataagttcgccggcaactgggccaacttggaggattcgttccggaatatcgtgcggattggtgatgggaacacggtgacacgggtaagtcattaaaattcactgaatttgcttacccgaaaacacattgatgaagaacagactccacttaatccaaaattataagactaaagtggattatttcacgtatttatatatactttatatacaattaatttgtgtggtttacagaatacttgaaatagatagaaaagggtctttatttctttaaaattgagatcttctcgattactttccgacatttgggcatatagaaagatatattcctcgttgtcagccactccatgttgcctagtgctaaccccaattaagctgcacttacataggaatgcaattgaaataatgcgaataagtgttgctcaagagcgggaatgagtggctttaaatgtggagctgagttcaaggtgcgttccgcagcttggggcactcggctgaatttaattgaattgagaatgcagacggaagcccacttgagcccctcaacccccttccactacaaaattaataaagtggctatttagtgtgcacttaatgatgctcaatgcggacgataagagctgtcaaatgcagtttgctaggcaaaatattatatgttcttggtgaaattacacaggaaaacaaaatagtatttacacagcatagcgaattttaagtgcttggtaataaacagacaaaaaccatttaatttcttttttttttaaataccacaattaacccaagttgatttcggcaacaattttggcgtattttcttgtggtttttgtgcacttaatgagcgcagttaattaggttaaatgcttagcagttgagaaaagcgaattttgatgtaaatacttggcgagaaaaaatccttagaaaaaacttgagtgtaactaagcttccgcacttgggctccatttcttttggccaaaactttattgtcttggtttgtcaagccaaacacaaaacacttgtttaacaatggaagcttcaagtgaaaattctcagaaaagttttcaattcaatttctttcacttttctttagcaatttaaagtc

SEQ ID NO: 36716 - DNA, 459 bp, DROSOPHILA
atgaaatgctggcacaatgtggtgaggcgcagaaggaagaagccgacggcagcggcggcggcgaaaggatcaaaggggtcgcatggaggcgtggcaagtcctcgagatgaagatgccatctgccagcggcagcaacaagtggatacctacacttggctaacaacacaagctgtccctctgctgtggctgcacttgttgctccttgtcgcatttgcaaaacatgcggctgcagccacaacaattgccacaaatcccgaggccaccacaacaacggtgagcaactacacggtgacgaccacggcactatcatcatccacgacaaccacttcatcgggatcagctccagctttatcatctgcggcggataagttcgccggcaactgggccaacttggaggattcgttccggaatatcgtgcggattggtgatgggaacacggtgacacgggtaagtcattaa

SEQ ID NO: 36717 - protein, 152 aa, DROSOPHILA
MKCWHNVVRRRRKKPTAAAAAKGSKGSHGGVASPRDEDAICQRQQQVDTYTWLTTQAVPLLWLHLLLLVAFAKHAAAATTIATNPEATTTTVSNYTVTTTALSSSTTTTSSGSAPALSSAADKFAGNWANLEDSFRNIVRIGDGNTVTRVSH

SEQ ID NO: 36718 - DNA, 10793 bp, DROSOPHILA
aaacttggaatgataggaacaagctataagcgcttaatatctgatgaaaaccaaaggtttgaatgtcagtattgtttgagctatttttcggattcgtttctgaaatcctgccaacactagaagcgaagagcggacgagtgttgcaaaaatattagcttttgacagtcaccgcccacacactttcacacactcgctggtggtgggagcgagagggtagcagagggaaagagaaggcctctgatgtcctgccgcgcatattaatcattgctgttgggttgacacttccgccaaggccgaaagaacaactgcaacaacggctgctgattttaatgactgtttcaaggtcgcaacaacaataacagatgtgacacgttaagcacttaaagtttcccagaatgtcactcaaattgggtaaacagccccaaagtctcgtagcgcgattaacacatttaattgtacatgtataattcatgtggactgcatatcatcatttaattaaaagctgcgttttaattaacaaaacaaaaggcattgttgttattacatgtgtaataaccaaatagtattttcaaaatggaaactgagaagcttgaatcgagacaagctctgcaaaatatttatagaatatatttcaaatgattttttattaagctgagaaaaatattgtatgcttcataattatgcttcagtggttaaaaatatcggttggtttcgattaataattgtgcatgcgaacataagaattattgcaataaccgcccaacaatgttgaaattgcaaaaatatttatgtaaatcacggcgaacgcaatcaaacgaaacacgtcgctggctgggaaaatcaacaatggaaatgcatttcccttttgggaaatcgaaacgatggctggccgaaatggaaagccgcagacctcgcaacataaataattaaagtttgggcaatttgggctccgtaatcagcaattactggcagtcaagtgacacgaccaattgcaagtacgatgtgtaattactttctgcgtactttcatttcatttcctccaccaattattgaaataacattttggccatgctaacgattgctgccgcttttcattaacaggactgtcggatgctttagccaaaggcctgctaaccgatgactttataactggagcccgcattttggccctgaatctaacgaatggagcggtccagtcctacgtctggtgggtcaagggaacagcggcggaaatccagcggtacgacgaggacggactgcagattggcaaaaagcccgctggcagttatccctggtaggtggaaaaatcatcagagttggcgactagattgttaattgaaagctaacggaaagttgctaaattactattaagtttcacttgcatttcatttctattaaaggatcgtagaaaaatgtagttcaggttttaaaataaagaattttaaaaggaaataagcatgacattaaatcaacccatcgttcgcaaaataatatatttgaaattaatttatgataaaattaaaattgccataaattgtgtagaaagttaataagtagagaaatagaaatattcgtcactaatttgtataactaaaaaccaaagtggcaacgctacaacattctttaccacgcattcatttggcatctcctccgtaggttcgacgatgaaacatcctcacccaccttgcgttcgcccaaattcgcgcccagtccgcccaacaactactacaagggctggtggacatatccctacttctcgtgctcgcagagccgctggctggtgtcctacagcattgccattccgccgattgggcgccatgggttaaggggcttcatcagcatcgacattgatgtgtccacgctgcgggttaaccaatgcgaggcggagccctatccatttggcagtcgccggcagaaaatgcagcaactgcagacgcacaatcgtttgggggcacgaagatccttgtttttgggcagccgaatgggggccatcgatgagagcaccatcaacgatttgcaggcattccacagctcccacaagtgtcatcgcacctcaatggtggtgagtaaaaagtgttacatattgaaaagtgttctttattatggattaggaataaattagcttacgtataggttatgtaatttttttgccatacaatgtgatctagttagcattgacattacatttgtctttgacattcaattgccactccccgggtaaataaatttatttttttttttttttttttttttttgaacctacaatacatataagttgtttattatccttagaacatatacattccacgaaatcctgagtcgcttcggtggacaactgaactacggaagcagccgattgtagagcacttataaggatcaactttggtgaaactttgaaagtcatttagttggcagaaaatgggaaagtctactggatcgtcgtttaagcccgtcaagcgtctcaatagaaaaattaaagaacctgtttctccaaaactatctgccaaccaaaatgttactcccaccaggcggattaaacgaatcaatactccggtggctgtcgatccaagtccaagtccatcggtggtggcgcgtcgagctcgtaccagtgcggcattaaagagttttattaacaaatacaggagagaacatcctggaaagctgcgcgctgaggtcgtctccatttggcgcaaaatgagcgtcgaagaaaagcaagcctttcaaagaatcggcacaattcaagaaactccaacacacgtgcattttgaggaggaggaagttcctgtacccatttccaatgatgttatagatatagttgaagttagcccaccgataccggagagaaacccctcgatttttagatattttttaaatgcgattaatagggccttgcatatgttttactaaatactgattgctttccaaattgcatttgtaagaagtcacaaaagttactaattcaagatgaataagtaaatattgtacgaaataaatgtttggccgcttgctctgattttaatcaaattgatttcaatttaaaggtttatataataagggtgtaaagtgctttggtgcttctacatttgatccaattcgtaacgattccacctgaggctgactaatccgagtccatttgtttgcctccttgcagtgtgattaccgtcagccaagtgcggagactcctaccgtaactggtggcaaattgctgaccacgctgaccggaagcagcagctggactcgtggatcgtaccagtgcctctgccgcgggggattctactcgctgcggcatccggacggattcaacggcaccatcatggagattgcctggcaggagcagcaggacaacataagcaattactattccgaggtttttaagtgtttgccctgcgcccccggctgcgacacgtgcacgggtccggagccatgtttggccaactaccactggccattcaggtgggtatccgcatccgatttggtttgccagtgatggcaggagtgatacctatgcgtgctttctccgttggcaaaaaaaaaaaaatgaaaggctgaaaatgtgcaataaatattgtttttaaatgacttcatttttattgaagtgaaagttaaatttcaaattctcttttatgcagtgcaacttttttttcatttaattggttttattaaaagtgctattgctgcttagagtctcaattagtcaaataaaagatggcaaaagcaaaacttgcttttgaattttccaaagcaaatatttattttaaaaaatcatggtttaactgaagaaagtacagaccaccaaaggaatcagactccactcactgctgtttgtttgctatctttcaagtgaatgtcttttctttggctcctttagaatatccctgttgaccatatccattggctgtgcctgcggcaccttcgttctcgccggctatctctttcggcatcgtcgcgtgaaggtcttcaaggtggccagccccatctttctgatgatcacgctcatcggctgcgccatcatgtatctggaggtgagtacttgtccccatttgggcacaacactcttaacccattaagggggccagaaaggggtcagaaacatacaaaggccatttgaaaacaatgttgctaatgcgacaaaaggcccaaagtggtcggcacgcgctcattcataattaacccacatatgtacccgttttggcccttatcccattcccatttcacagacggcaaagggatctggaaacaagcgaacacataaaaagttccacttatgggtttttaaatgcggcttttaagcacttacgcgtcgaaagggtattgcagatttttcaaattatttcgtgacttatatagtaaagtaaagaagttaaatatcttggcaaagctaaatagagagtatacattgtccaatttacttgaactaaagctaaatcctgtatattgttacaagtgtataaggtatacaacattcactagacaaaaacgtgtagctttctattccccgttcactggctggcaattatgttgtccacattagtaaaccaacaatgctaaacaccccggtggacacataaaaccacctaccaccccacccataaaagcaacacacaatggcaatacatgacttttggaacaagaaaacaaaatgggttaagagggtggaatgcaagacggaactaaatgaacaaatatgtgtcgattttctaatcaaaatgaacacataaattccttaaattatgagtaaaaaatcgcttaagaggcaagatgagcacacaaaagataatgattgtgaggaagaagacgaggaggaattacaggcggcaattagggaaatggtcaagattcccgatattgatataatacccagaaagagtagcgaaagtgtaagggaaaaagagtcgactggaaatgtacttaagaaaaatcatgatgaacgtggatcgcaaacgggtgatggaaaagatacaacttcaaaaacgaggcaaaagaagttagaaagcgatgatagttgggcagcacttcttcggaaaaggtttgcttggacaaaggacaataaaacggatgcagttaatcaaaatatacctaatactaaagggtcctcaaaggattttacagaaaataaaggaagtggaaacaaacattctacagttacctctaacgaaaagctgatacgatcggaatattatgagaattctcaaacaaaatctgatgcaatcaaatcactttcaaataatcagttgagtgaagaatcgccggagtttctgaacaaattaagacgaatcgaagaggcatcgaagcctaaaacttggaagaggccaacgccagtagttttgaaatcaaatcaaaattattccgccaacaaaaacagtgaaaatgcgttggatgcgaagccacaaactgctacgaatactgaagaaacgcatgggtgtataaatattttaaaggttcccttccaaagcaatttatattatgttccagaaaagccatcacgccaggataagggttctggaacatcggactttcaaccaggagctccggaaacaccaattgttgaaaactccgccgtggactccgatcgaaaagccgttgaaattatgccagaaaatgtaaaaaattcggaagagaaaaaaattgacaattccgattcgacgaaaactgtcacaattacaggacattcgcatataaccgccaaatgggatggccactgtcatttcaaggagagggaaactggtgttgacaaggccgccaggcgagttttaataatcgcctgcattctgtgcaccatcttcctgatactcgaagtcatcggaggcattttgtccaatagcctggcgattgccacagatgccgcacatttgctgacggatctggcctcgtttctcatttcgatttctgcacttcatttggctggcagaccctcatcggagcgtctgaactacggatggcatcgggctgaggtcattggggccatggtatccatattcttcatctgggtagtcacaggtgaacggtaattattcgtcctggtagatgaaaaacttgccagtcttatcaatcgctcagctgattactattactctttgcttttaataatattaaatttagaatcagccagtaagaacgattttgaaaatgttggcaaaacaagttatctactttaaattgaaatcattcagtgattctgaaaagtaaactagaattccataccaggcatcctcgtgtacatggccataatgcgatgggttaaccaagatttcgaactggatgccaagataatgctgatcacatcggcactggctatactatttaatgtgatcatggccatgcagttgcaacacggccattcgcactctctgccaggagtccacaaaatgtcaaaggacgcaggatcggtgctaggaagtaagatgatcttattgttgggaaaatccgtttccatgcagtatgcggcaaaggggcatgagaacatcaatgtccgagctgctatcatccacgtggttggtgatatcatccagagttttggcgttttcgttgccgccctgataatattcttttggccggaatgggccttcatggattcggtttgcacatttgtcttttcagtgctggttcttgtcgttacgttcaaaatcttaagggacgtcctcatggttctgatggaggccacgcccgattttatggattacgaggaggtgaaacagacatttttgtccatttcgggtgtggagcatgtgcataacctgaggatatgggctctgtccatcaataaggtggctttatccgctcatttggccatttccaaggatgccgatccccagctgattctcgaggaggccaccactctgattcacaagcgcttcaaattcttcgagacaaccatacaaattgaggagtattcgccaggcatggagaactgcgggcaatgtttgagcccttcggataaaagtggaaaacggaaatcctcggatccggaaaagggcgaaggaaaagctggccgcaaaagaggatctgatgtgggaaaaattaagaatcactcgggatctgaatgaatctaataacttgatcatgttacatttacatgccctttttaaatgaattataaggtgtattttttaaatccatatatttgattgtttttttttagatggtagctatctttccctatctggataccacttggtgtattgccactaaatggacgcggcatatgggtttttgcatcacctacacttcgctgcttatgaaaacctggcggtaggactattttacaataatatttaattttaaactttaaaatacttactttcatttaaagggtttctttaacgtatcgtgtcaagtcggcccacaaaataaaactgaatgatcagcagcttttgcagtggatggtgcccattctgttggttatgttgatctacttgggcacatggacgatttcggcaacgcccacagcagaagtggttagtaaactttataagtacaataagttaagaatcctcatcctagatatttcatatataaattatccagatcttagatcagagtcagttgaagttcaagcagtgctcgtacaactggtgggatcacagtttggccatcggagaagtgttcttcctggcctggggcatccgggtttgctacaatgtgcgaaatgcggagagtctgtacaacgaggcccggctcatctcctacgccatctacaacatagccctcgtcaatatcgccatggtggtgttccagtaagtattgtagtaatattctagtaattgttccaagaatatattaagcattattaaggatactgaacagagtaatagtacataaatatatctaaatatatatcactggagctaaaaagttttaatagtttccaaatatatataatgcatcttttaagcgaatctatagaatctatcttaatatgatgatacatttctctagacaaaatttttaacaaatccaaatatccaaagtaatattatttatgaatagagaaaaaatggcatgagctcgctcaagcattttcatatatttatttagacatcctgaaggatgccccacctgaacaagctcccacttgcagcaaattgaattataacagttgacacatgttgggtaatccagctgggagaagctggggaacgcatcccgtccattaggggaaatgtaaagctgcccgtcttacgcggcccggttttaattaaattccttttgctttgtgcgcgctcgtgctcgcgcgtaatcctttttgttggcctcacaaggacccgcatccttctctccattttcacggacttccatccggctgtcgctttgtttacacagacattccggagcattccggctggtccactgaagttccctcgatgaagccctaataattaatgccatttgttggaatactttccacgcacctgtagccattacaattgtgttaggttactattgtgtatctaaacctaattggctggcatacaaaagtagacagtacttaatttgtgatagattatttacttactaccaaaatttccttgcagtgtaatgctctttccgaacgccggacccgattataagtatatgctgggatttgtgcgcacccagctttccacgaccaccaccattgccctcgtcttcggtccaaagattttgcgtgtctttaagggccaaggcgacaagtgggatcagaaggccaaggtgcggagcataacagcatcattctcgctaaatggagtgggtctggtcccggaggagtcgcctgatctttaccaggagaacgaagaactcaaggtaagggcacagaggcattatgatttaggcagctccaccatatggcaatcttctccaggaacaagtccagaaactggcccaccaaatcgagttcatgaagactgtgcacatgcagatgaacaacaggcatctgaagccaaagcccggcggatattttaccataacttcaacctcgtttcaagcgccatatagcaaaaacacggtttccacagcgcagacgcaaacgggcaaggatgagaacaggtgagccatatcctatgaaaagaatatcatttattataacctattaataatttattatctattaattacatttagcacgccaacgaaattaaaatcgcccaaaggcaaagtctgacgaggtcaacgaagtgttaaagattgctcaatagaaatcgatggggggcagggcagaaccaccctggtggaggatgccattgaatttaatttccacctagcggatacggagaaggggttgattgtccaggaagacgagcggccaggatcagatgaggaggaggcggccttgatcgcacagtttcgccgcctctttgcgcccattttggatgatagcttgaatctgtactaccaactcaacgatttggatgacacggagcacgtgaggatccatcaaacggtagcccagatgaatgatctgaccagcagcgaagaggagacaatggttacccaggtgaacagtccatcgccaccgccggtgggtgtggaacttttgcttccaatctccagcgacagttcgacggccagcagttctctgtacgccatccacactccgtctccggctcatcccagtggtgtgctcctgatgccccagaatttggagtcaccgttgctgtccggcagtgatgccatcacaatcaccgagcaggtagagctgcataatccgccacaccatctgcagctactcgaggatgagaacaacacatcctgttcgctgtcatcgaatctgacggatagcaagaccctggatggtcgcaccccaatcgtcgtctgatggcttccatctccaatcccgttctgcttaacttgtgattatgtttacacagtcttagagctacaacaaacagttagcgaaaaataagccgcttaatgtttaatatagtcttaaataatgtttgtgtgtatgtgtctgtcaaagttgtttaaatattaaaggcgtttatgcggtaagtcaaatcatttcgaacatcatttcattgcttaaactatttcaaatgaagcttccaatatttatagaaacccagaaattttagcaaatatcccaccaaatacatttttcaaatttcttagaacttttacttattttctcaaatgaaacaatgatatatacatttctaaaatatcttttcacaaaactattttatttgtcgaacgcctgtcttaattcacaattcgaacattgcctcttttcacttttaagaacgtttcatccttaaacttaaactttccagccgcataaacgcaaacttcatgtgtaaccttttattttcgctttttagtcatatccacccaaatcattatcccatcatccatgatctccatcgtttttgaaacagcagaaaagtatcaacattgagcaaatttttctcacttcgttcggatcgacagaaggatgttgtatagaagaaagtaggcagccagttggtctgatgggtctcatagagtccatcggagcccctagggacttggcattaataaatctcatttagcactcatgcacctagcgaaataaattgcattttccttgttctcgttgcacccattcataggacaaatattatttgcttcgtagctaaatttacatgattttcatggtcataatcttaaaacaaaaaaaaaaacctacaaataggcttagcacaggagtcgattttagtgtacaagatgaaaatatatactgatattataaatgaataaattgacattttagcgtactagtttaagctgaaaaagtgttaacagacgagcgcaattcttcttcgtaaagttgggca

SEQ ID NO: 36719 - DNA, 5034 bp, DROSOPHILA
atgtgtaattactttctgcgactgtcggatgctttagccaaaggcctgctaaccgatgactttataactggagcccgcattttggccctgaatctaacgaatggagcggtccagtcctacgtctggtgggtcaagggaacagcggcggaaatccagcggtacgacgaggacggactgcagattggcaaaaagcccgctggcagttatccctggttcgacgatgaaacatcctcacccaccttgcgttcgcccaaattcgcgcccagtccgcccaacaactactacaagggctggtggacatatccctacttctcgtgctcgcagagccgctggctggtgtcctacagcattgccattccgccgattgggcgccatgggttaaggggcttcatcagcatcgacattgatgtgtccacgctgcgggttaaccaatgcgaggcggagccctatccatttggcagtcgccggcagaaaatgcagcaactgcagacgcacaatcgtttgggggcacgaagatccttgtttttgggcagccgaatgggggccatcgatgagagcaccatcaacgatttgcaggcattccacagctcccacaagtgtcatcgcacctcaatggtgcccgtcaagcgtctcaatagaaaaattaaagaacctgtttctccaaaactatctgccaaccaaaatgttactcccaccaggcggattaaacgaatcaatactccggtggctgtcgatccaagtccaagtccatcggtggtggcgcgtcgagctcgtaccagtgcggcattaaagagttttattaacaaatacaggagagaacatcctggaaagctgcgcgctgaggtcgtctccatttggcgcaaaatgagcgtcgaagaaaagcaagcctttcaaagaatcggcacaattcaagaaactccaacacacgtgcattttgaggaggaggaagttcctgtacccatttccaatgatgttatagatatagttgaatgtgattaccgtcagccaagtgcggagactcctaccgtaactggtggcaaattgctgaccacgctgaccggaagcagcagctggactcgtggatcgtaccagtgcctctgccgcgggggattctactcgctgcggcatccggacggattcaacggcaccatcatggagattgcctggcaggagcagcaggacaacataagcaattactattccgaggtttttaagtgtttgccctgcgcccccggctgcgacacgtgcacgggtccggagccatgtttggccaactaccactggccattcagaatatccctgttgaccatatccattggctgtgcctgcggcaccttcgttctcgccggctatctctttcggcatcgtcgcgtgaaggtcttcaaggtggccagccccatctttctgatgatcacgctcatcggctgcgccatcatgtatctggagaggcaagatgagcacacaaaagataatgattgtgaggaagaagacgaggaggaattacaggcggcaattagggaaatggtcaagattcccgatattgatataatacccagaaagagtagcgaaagtgtaagggaaaaagagtcgactggaaatgtacttaagaaaaatcatgatgaacgtggatcgcaaacgggtgatggaaaagatacaacttcaaaaacgaggcaaaagaagttagaaagcgatgatagttgggcagcacttcttcggaaaaggtttgcttggacaaaggacaataaaacggatgcagttaatcaaaatatacctaatactaaagggtcctcaaaggattttacagaaaataaaggaagtggaaacaaacattctacagttacctctaacgaaaagctgatacgatcggaatattatgagaattctcaaacaaaatctgatgcaatcaaatcactttcaaataatcagttgagtgaagaatcgccggagtttctgaacaaattaagacgaatcgaagaggcatcgaagcctaaaacttggaagaggccaacgccagtagttttgaaatcaaatcaaaattattccgccaacaaaaacagtgaaaatgcgttggatgcgaagccacaaactgctacgaatactgaagaaacgcatgggtgtataaatattttaaaggttcccttccaaagcaatttatattatgttccagaaaagccatcacgccaggataagggttctggaacatcggactttcaaccaggagctccggaaacaccaattgttgaaaactccgccgtggactccgatcgaaaagccgttgaaattatgccagaaaatgtaaaaaattcggaagagaaaaaaattgacaattccgattcgacgaaaactgtcacaattacaggacattcgcatataaccgccaaatgggatggccactgtcatttcaaggagagggaaactggtgttgacaaggccgccaggcgagttttaataatcgcctgcattctgtgcaccatcttcctgatactcgaagtcatcggaggcattttgtccaatagcctggcgattgccacagatgccgcacatttgctgacggatctggcctcgtttctcatttcgatttctgcacttcatttggctggcagaccctcatcggagcgtctgaactacggatggcatcgggctgaggtcattggggccatggtatccatattcttcatctgggtagtcacaggcatcctcgtgtacatggccataatgcgatgggttaaccaagatttcgaactggatgccaagataatgctgatcacatcggcactggctatactatttaatgtgatcatggccatgcagttgcaacacggccattcgcactctctgccaggagtccacaaaatgtcaaaggacgcaggatcggtgctaggaagtaagatgatcttattgttgggaaaatccgtttccatgcagtatgcggcaaaggggcatgagaacatcaatgtccgagctgctatcatccacgtggttggtgatatcatccagagttttggcgttttcgttgccgccctgataatattcttttggccggaatgggccttcatggattcggtttgcacatttgtcttttcagtgctggttcttgtcgttacgttcaaaatcttaagggacgtcctcatggttctgatggaggccacgcccgattttatggattacgaggaggtgaaacagacatttttgtccatttcgggtgtggagcatgtgcataacctgaggatatgggctctgtccatcaataaggtggctttatccgctcatttggccatttccaaggatgccgatccccagctgattctcgaggaggccaccactctgattcacaagcgcttcaaattcttcgagacaaccatacaaattgaggagtattcgccaggcatggagaactgcgggcaatgtttgagcccttcggataaaagtggaaaacggaaatcctcggatccggaaaagggcgaaggaaaagctggccgcaaaagaggatctgatatggtagctatctttccctatctggataccacttggtgtattgccactaaatggacgcggcatatgggtttttgcatcacctacacttcgctgcttatgaaaacctggcgggtttctttaacgtatcgtgtcaagtcggcccacaaaataaaactgaatgatcagcagcttttgcagtggatggtgcccattctgttggttatgttgatctacttgggcacatggacgatttcggcaacgcccacagcagaagtgatcttagatcagagtcagttgaagttcaagcagtgctcgtacaactggtgggatcacagtttggccatcggagaagtgttcttcctggcctggggcatccgggtttgctacaatgtgcgaaatgcggagagtctgtacaacgaggcccggctcatctcctacgccatctacaacatagccctcgtcaatatcgccatggtggtgttccatgtaatgctctttccgaacgccggacccgattataagtatatgctgggatttgtgcgcacccagctttccacgaccaccaccattgccctcgtcttcggtccaaagattttgcgtgtctttaagggccaaggcgacaagtgggatcagaaggccaaggtgcggagcataacagcatcattctcgctaaatggagtgggtctggtcccggaggagtcgcctgatctttaccaggagaacgaagaactcaaggaacaagtccagaaactggcccaccaaatcgagttcatgaagactgtgcacatgcagatgaacaacaggcatctgaagccaaagcccggcggatattttaccataacttcaacctcgtttcaagcgccatatagcaaaaacacggtttccacagcgcagacgcaaacgggcaaggatgagaacagtgttaaagattgctcaatagaaatcgatggggggcagggcagaaccaccctggtggaggatgccattgaatttaatttccacctagcggatacggagaaggggttgattgtccaggaagacgagcggccaggatcagatgaggaggaggcggccttgatcgcacagtttcgccgcctctttgcgcccattttggatgatagcttgaatctgtactaccaactcaacgatttggatgacacggagcacgtgaggatccatcaaacggtagcccagatgaatgatctgaccagcagcgaagaggagacaatggttacccaggtgaacagtccatcgccaccgccggtgggtgtggaacttttgcttccaatctccagcgacagttcgacggccagcagttctctgtacgccatccacactccgtctccggctcatcccagtggtgtgctcctgatgccccagaatttggagtcaccgttgctgtccggcagtgatgccatcacaatcaccgagcaggtagagctgcataatccgccacaccatctgcagctactcgaggatgagaacaacacatcctgttcgctgtcatcgaatctgacggatagcaagaccctggatggtcgcaccccaatcgtcgtctga

SEQ ID NO: 36720 - protein, 1677 aa, DROSOPHILA
MCNYFLRLSDALAKGLLTDDFITGARILALNLTNGAVQSYVWWVKGTAAEIQRYDEDGLQIGKKPAGSYPWFDDETSSPTLRSPKFAPSPPNNYYKGWWTYPYFSCSQSRWLVSYSIAIPPIGRHGLRGFISIDIDVSTLRVNQCEAEPYPFGSRRQKMQQLQTHNRLGARRSLFLGSRMGAIDESTINDLQAFHSSHKCHRTSMVPVKRLNRKIKEPVSPKLSANQNVTPTRRIKRINTPVAVDPSPSPSVVARRARTSAALKSFINKYRREHPGKLRAEVVSIWRKMSVEEKQAFQRIGTIQETPTHVHFEEEEVPVPISNDVIDIVECDYRQPSAETPTVTGGKLLTTLTGSSSWTRGSYQCLCRGGFYSLRHPDGFNGTIMEIAWQEQQDNISNYYSEVFKCLPCAPGCDTCTGPEPCLANYHWPFRISLLTISIGCACGTFVLAGYLFRHRRVKVFKVASPIFLMITLIGCAIMYLERQDEHTKDNDCEEEDEEELQAAIREMVKIPDIDIIPRKSSESVREKESTGNVLKKNHDERGSQTGDGKDTTSKTRQKKLESDDSWAALLRKRFAWTKDNKTDAVNQNIPNTKGSSKDFTENKGSGNKHSTVTSNEKLIRSEYYENSQTKSDAIKSLSNNQLSEESPEFLNKLRRIEEASKPKTWKRPTPVVLKSNQNYSANKNSENALDAKPQTATNTEETHGCINILKVPFQSNLYYVPEKPSRQDKGSGTSDFQPGAPETPIVENSAVDSDRKAVEIMPENVKNSEEKKIDNSDSTKTVTITGHSHITAKWDGHCHFKERETGVDKAARRVLIIACILCTIFLILEVIGGILSNSLAIATDAAHLLTDLASFLISISALHLAGRPSSERLNYGWHRAEVIGAMVSIFFIWVVTGILVYMAIMRWVNQDFELDAKIMLITSALAILFNVIMAMQLQHGHSHSLPGVHKMSKDAGSVLGSKMILLLGKSVSMQYAAKGHENINVRAAIIHVVGDIIQSFGVFVAALIIFFWPEWAFMDSVCTFVFSVLVLVVTFKILRDVLMVLMEATPDFMDYEEVKQTFLSISGVEHVHNLRIWALSINKVALSAHLAISKDADPQLILEEATTLIHKRFKFFETTIQIEEYSPGMENCGQCLSPSDKSGKRKSSDPEKGEGKAGRKRGSDMVAIFPYLDTTWCIATKWTRHMGFCITYTSLLMKTWRVSLTYRVKSAHKIKLNDQQLLQWMVPILLVMLIYLGTWTISATPTAEVILDQSQLKFKQCSYNWWDHSLAIGEVFFLAWGIRVCYNVRNAESLYNEARLISYAIYNIALVNIAMVVFHVMLFPNAGPDYKYMLGFVRTQLSTTTTIALVFGPKILRVFKGQGDKWDQKAKVRSITASFSLNGVGLVPEESPDLYQENEELKEQVQKLAHQIEFMKTVHMQMNNRHLKPKPGGYFTITSTSFQAPYSKNTVSTAQTQTGKDENSVKDCSIEIDGGQGRTTLVEDAIEFNFHLADTEKGLIVQEDERPGSDEEEAALIAQFRRLFAPILDDSLNLYYQLNDLDDTEHVRIHQTVAQMNDLTSSEEETMVTQVNSPSPPPVGVELLLPISSDSSTASSSLYAIHTPSPAHPSGVLLMPQNLESPLLSGSDAITITEQVELHNPPHHLQLLEDENNTSCSLSSNLTDSKTLDGRTPIVV

SEQ ID NO: 36721 - DNA, 2540 bp, DROSOPHILA
tacatttttcaaatttcttagaacttttacttattttctcaaatgaaacaatgatatatacatttctaaaatatcttttcacaaaactattttatttgtcgaacgcctgtcttaattcacaattcgaacattgcctcttttcacttttaagaacgtttcatccttaaacttaaactttccagccgcataaacgcaaacttcatgtgtaaccttttattttcgctttttagtcatatccacccaaatcattatcccatcatccatgatctccatcgtttttgaaacagcagaaaagtatcaacattgagcaaatttttctcacttcgttcggatcgacagaaggatgttgtatagaagaaagtaggcagccagttggtctgatgggtctcatagagtccatcggagcccctagggacttggcattaataaatctcatttagcactcatgcacctagcgaaataaattgcattttccttgttctcgttgcacccattcataggacaaatattatttgcttcgtagctaaatttacatgattttcatggtcataatcttaaaacaaaaaaaaaaacctacaaataggcttagcacaggagtcgattttagtgtacaagatgaaaatatatactgatattataaatgaataaattgacattttagcgtactagtttaagctgaaaaagtgttaacagacgagcgcaattcttcttcgtaaagttgggcaatacgtataatgaaaggtatttaaaaacataaaataaacatacacatataatataactgaatccgaaacattcaacttttattgagtaagttaaagttaaattattatattgtaatggaaacaatatggcaaaatcaaaaacatcaagaataaatgttatacaaatgaagcaagtgtgttactttattttccttaaactacaagcacgcccggtcattttcattccgatttggatatactttctaagtttatacaaatccccaaaatttcacattatgagacagcagctgctggacgaggagttcgagaatctgcgtcgcgtagcgctggccatatgcgagaatctcgggagaccaaaagatcgggagatatgtcgaagcactctagaagatctggccaagttccgccagggatcgtcgattaggattaaggagaatgtgcataagttcctgatgttctatctaaaagttctgagatggtcgtacaagaatcagccaacggatctatatcgcaaatgggttaattacatttttcagttaagtagcgatcatttagtaaatgtttcaatttttcagtatggacaaaactttggcaaggacccaaagtctgccccatcggccggcaattccgaggatgaacagcgtgtttggttggaggagggcaagtccttttacgccatgaaaacatttgaagatggctccacagttgtttactcagcggtggttaaggatgcgagagctggttggtcggaaaatggtctgaaaactctgatggaaacgcaagtgggctgcgctttgaatcgaaatgaaaattgaattgtttaatactcttaatatagtatatattttcatattctgtgtgtacaatttactggtttttcgatatggtagtggttattcggatatggcaggtaaatactagtaataaatatgtcaaacgtaagcattttcggaatggtcattttttaaaaatcaaatgtagtaaaatcattttgaaaacatgttcattaagttaactatataaaaagtacaagcgacataggaaatttacaattgtttaacgttacttttcatttaaatattttagctagttttggtctgtaaatttacctgcctcttgtttggatattgtagataactaatgtacctatacgattaaaatgttttcaacttttcgacttaattataggcaggaaaaaggtggacggaatgtgtttttgatatcaaaagtcaatcctagcttagatatcatgtggagtggcgaaaaggcacttattgcgtgtttcgtttgtggtgaggataagcctggttttcctattaacttctaaatattctggaggcaacgccaatcaacaggagtcccaacagaagctgcagggatccgtgcatttgaactaagctggaaccattgcagctgtcgctggagcagtagcactcctcccagtacactccgttttcgtagactccccagttacagacgccaaccactccggtatcggaaacggatgcacatcgtcggatcacctggcgccaacgaccgtcccctggaaaatataatgtaattattaatttgtacacacatatttgccaagagagataatccattggacacctattgctgcaataggcaataatcacagtcaaggtaaaatggtaaccacacaaatggactgatcacaagatccttgggaaaatacgatacttgtggagttagggcgtacgctactcctacttacagatgaatcctctcggtccctgctgcaccaccttcatgcagaaggatcctggcatgtggctctcgtcgctgttgcactca

SEQ ID NO: 36722 - DNA, 483 bp, DROSOPHILA
atgagacagcagctgctggacgaggagttcgagaatctgcgtcgcgtagcgctggccatatgcgagaatctcgggagaccaaaagatcgggagatatgtcgaagcactctagaagatctggccaagttccgccagggatcgtcgattaggattaaggagaatgtgcataagttcctgatgttctatctaaaagttctgagatggtcgtacaagaatcagccaacggatctatatcgcaaatggtatggacaaaactttggcaaggacccaaagtctgccccatcggccggcaattccgaggatgaacagcgtgtttggttggaggagggcaagtccttttacgccatgaaaacatttgaagatggctccacagttgtttactcagcggtggttaaggatgcgagagctggttggtcggaaaatggtctgaaaactctgatggaaacgcaagtgggctgcgctttgaatcgaaatgaaaattga

SEQ ID NO: 36723 - protein, 160 aa, DROSOPHILA
MRQQLLDEEFENLRRVALAICENLGRPKDREICRSTLEDLAKFRQGSSIRIKENVHKFLMFYLKVLRWSYKNQPTDLYRKWYGQNFGKDPKSAPSAGNSEDEQRVWLEEGKSFYAMKTFEDGSTVVYSAVVKDARAGWSENGLKTLMETQVGCALNRNEN

SEQ ID NO: 36724 - DNA, 2534 bp, DROSOPHILA
gaaaatacgatacttgtggagttagggcgtacgctactcctacttacagatgaatcctctcggtccctgctgcaccaccttcatgcagaaggatcctggcatgtggctctcgtcgctgttgcactcaatggaaatgtgctcggtgcggttgaatctcttgtaggcgccacagctgtcgtgtcccttgcgatcctggtcggaggagcactggtagcatcgaatggcccagctgcctgtatgaagtcaacaattagttaaaattcctcaaaaacaattgccaaagccacacccaaaagccgagattaaaaggtggcttattgggattcgtacgacttgggattcctgtgacctaccacatatggccagggtgagcagcaggaacgtacaacggagcaggacattcattttttacttaaaactgttttgtgcgctttgtttaacttaaataaaatagaattaaaacaagaaaataaataacgcgagttactgtgtgaccatatggtagatcgctataaaataccaaactatgaaaataccaatattatgtttgccatctagatattttatttcaaatattatttcttaaaaaatataaaaatataagcacgaatgttccaaaaagaaacgtatttaatacatttgttattctctaattaagcctatggctctcgttaccgaatttgtattatgttctctatgcccaatagttgtatctatttaagtgtatggcctataaaatttaagcgaggaactactgagctagaaataaaattcttgttctgcaacatttatttttctgagaggttatttttaaaatttgcaacggtgttttcaagcatgaacaatattgccacatggttttggtttttatcctggtttgtgtctaggataatgcatattttggagattactcgaacgctgctcacacggtcacactgctatttacacgcccaaaaaaattgaatccaattgaaacgcgaagaaaaacataaatataacgatgaaaacactggagaaatatatcctattcgccatcgtgctctgctgcctgctgcaattgggtaagttcgtgatgccaaaactgcgcctgcgcaaccgacagcaaaaagcaaacaaacccgcataactactttttccaggccaggcgatcaaatgttgggactgtcgcagcgataacgatcccaaatgcggggatccttttgacaacagcacgctggccatcaccgattgccaacaggcgccggagctggagcatctgaagggcgtgcgaccgacaatgtgtcgcaagatccggcagaaggtgcacggtgaatggcgctactttcgcagctgcgcctacatgggcgagccgggcatcgagggcgacgaacgcttctgcctgatgcgcactggcagctacaacatcttcatggagttctgcacgtgcaacagcaaggacggctgcaactcggcgggcatccataggctaggactgatgggcgtcctaactggcacactgctctcggtgattgtggctcatcttctgcggcaataggtggatccacctgcttcagctgtagccaatgccacgccccatttgccacaaggctgatcagatagtataaactgtattagcatgcttgcttgtgtgttcaacgtagatataaaaactgaagaattctataattgtaaccgagatatttagcaaatatttttaaaatttgtaaattaccttaattagcagtaacttacctgacgcgcgaacagtcttgtggtgaatgagcgatgtgtaatcaagtgccttttctgtaacggactcgtattgtaacttaagcctggaatactatttccgtccaaaaaatatcttacgcctatgacattccatctcgtaaactgaatcttgtaatactttctattttctacatttattttgtaatgtttttgcgaaagatcgcctagttttagtcgacttacaagtttttattgtaatgcgatgtcaaatagaacatttttgaataattaaaaaaaaaaacggttatacactagtcgaccattgttattgtttattcagactgcagatgagaataactcatatatatattatatatttatatatatattcacatccagaatctctctgcagacctcttatgctgttttaattagtaagccttcttgaaacgattctatttggaaaagttgggcaatggggcggctccatgtccttagctgcaaactcatttgatgaggaatctcccggaagcacattttgagtctcacactgattgttacgatttccttggacatattcgccagattttaagtcatcttcgtacataatacgtttgttggctggaccagccgactcctccaacggtacgaaatcaaattgcaatctgcgttttacggcacagttcttctggagattttccgaaccttgacgaccaggagtagtaattaagtaatggttttccatctgaaaaagccagcagttaatttaaattcaaacgaaaaacgtatatattgccttaaataagctgcattctaatccgaaa

SEQ ID NO: 36725 - DNA, 456 bp, DROSOPHILA
atgaaaacactggagaaatatatcctattcgccatcgtgctctgctgcctgctgcaattgggccaggcgatcaaatgttgggactgtcgcagcgataacgatcccaaatgcggggatccttttgacaacagcacgctggccatcaccgattgccaacaggcgccggagctggagcatctgaagggcgtgcgaccgacaatgtgtcgcaagatccggcagaaggtgcacggtgaatggcgctactttcgcagctgcgcctacatgggcgagccgggcatcgagggcgacgaacgcttctgcctgatgcgcactggcagctacaacatcttcatggagttctgcacgtgcaacagcaaggacggctgcaactcggcgggcatccataggctaggactgatgggcgtcctaactggcacactgctctcggtgattgtggctcatcttctgcggcaatag

SEQ ID NO: 36726 - protein, 151 aa, DROSOPHILA
MKTLEKYILFAIVLCCLLQLGQAIKCWDCRSDNDPKCGDPFDNSTLAITDCQQAPELEHLKGVRPTMCRKIRQKVHGEWRYFRSCAYMGEPGIEGDERFCLMRTGSYNIFMEFCTCNSKDGCNSAGIHRLGLMGVLTGTLLSVIVAHLLRQ

SEQ ID NO: 36727 - DNA, 4744 bp, DROSOPHILA
ggtgggcgtcaagtgcggcccattagactgttaatttagatatccccccccccctacgattgtaatccccccaggaagtctgtagcggttaagtttcagtttgtagcagtagcttttagttcgtattgtactacagggtagtttaggccttctcaagaccctaagttgtattatagaaaaaaatgattaatatatttaaaacttagcatggcatttataacatacaataattaaggctataattaaataagaagtacacgaaatatatttaataaaactaacaaataaattatcaaaatctaaagtctttgttttgaattattacactttattatttattttgatgaaaagtcaaacaacaaccaacaaattggtttataaatattgatcgcatttcaaccttgtgacaaataacaaattgctagtttggggaaatgtttctacgaattgtgttgaatttaattgcacatcaagatcattatggaatccatgagtttaaattaaacattcctgtctgcgtcagcattaattggccaaagccaatcgatgagtaattaataaattctatacagacttattcagttagcaagtataggccaattaaatgtgtggcgagtgaagagcacaaaaaacaagccataaaacatggcccaccctttctttatgaggtgtaaatttaatgtttattcataacaccgaaattaaacattaaccacgacgatagaataataattttcaatggattttgcgaccaaataaaagacagtccacacaggaaatatttatttagggactgttggattgtcagaatattaaatagtctaagaagttgttgaactttttgcaggtttaataatcagacattaattgcgtttaatgattgatctttatcggctataagataaaagtctttcatgactgccttcaatttgttttaaaacgtatttttcactatgatataaatataatatatatttgaatggaactatcttatttgagactaaaagtaaatggccttttgattggctggctgcaggcgtcgatagacgatgaaaccgcacagaattccggccacgccccctccaatatgcgcctccagactggtgcgcggattgcgattgtgattgtggcaaaagtggtaagttgtaaagcccacatcgctgagtaacaatatcagcagggaggcgatgcgggcaaagcggtgcgacaattgcgaaaagttctgttcgacaaagtagggatcgtgtaaacattaaatcaaaattaaattgcggtttccagctgactgaccagaaccaggtgcggcacatgacttcccagcatggcgtagaccccagcggaggcacccatcagatggagatggggctgcagccaggcattggccagcgaaccagcgacgccacccaccatatagaccacggccagacgccagtgaccctgctccacttccaggcagatacctataaagcactggcagagacattaaccttcttagtaacacaatgcaacaacaggtggctagcgacaggatgtgactatcgaattactgccaactactaagtgctttatggcatttaaacgagcagtttaggaaatattaaagtcgttgcttcacaaagtgaatctctatagctactttaactttgttgattcgaactattgtttagagttcattaggtcaaagttgggtactcacctgaaagcaaatgttgagagacagatgccagtaatcggaatggagcagcatataggtcagtaggcgccagtactcgacgttccattccggtttgaagatcagtactttttgcatacactcactagctatccagtgcaaagatatctggtaatgagcaaagaagattacattgcaccatactgcatggaacttgaaaaaatttagagcaacatatatttagggtagttatctgacactttatgtaataacatactttggtagaatatttggaatttgaatatagcttattcacaagcaaaattagaattttatgtacaagtgtagtaaagtaatgcaattcatgataacttcttcttgttaagaattaaactcaggcaagtggcagttttcgattgaaatcgtgagaagtaagttgtcttcgccataacgaagcaatcccaactttgctgaacagtgtcatggtaactggctgtcactttcgctcaatcgatcgacacttggccaactgcaaagtgcgagtgttgagttgagatgccgcacaatgcgcgccgcatgagttgacagcagccgcagaaacacggcggtgacaccaaatcggtgcaacatgcatcccgatcccaccaaatatgacaaatgccagagctccaagttgcagcactcgatcaatccgatgactaaaatggcaatattgctaaatcggacgactaagcgacgcgttcgattgtgtaatcattatcgatttctgggttgggccaaacaataaaacctttcaaatcaccgatctgcattactaagtgtgcagagtgtgtaatgaaggtatgcagtcaggtattaattaatgagtttcaaattaaataggccacacttgtgggactttgtttcgaagacaatttcccaggggccaattggcaattaagcggttgagcacttgatagaagaaaaaacaaatgaccaacttaaaatggctaatttgtcttataatatgttgcccaaacacaacttttattcacgttaaataactaaaaatcgaaaagtaattgtatcaaaggacaaatttatcagtgatgtctaaataaaacctcttaaaacacattcattttgtctgtttgttgtgcattttgattgaatggattggtgtaatatatcacttattttccgcttagttaaaaccgcaataaatccgcatacgtaaactattgaaaaaattttccagtgaatgaaaattcatatgaattgaaaagcaattatttacgaagcactcacacaatggcaccatacacggataaacaaaacaaaagcaaacgaaatgttttgtttaaaacaaatcaagtaaaaagattcttattaagatgcgggagtataaacaaacacattgtagatcacttatgttagctttttttttagctaaacatgagtaagaaattaagagcttatcagttcaaagttcataatattttgttgaatataaaattctttaaactctgtttttatatttgtgattaatattttaaaattcgtttcacattaaggaattcataactcaattaatttaacattgataagcaccgccgtagtcatcacatatagtttcacctttgacacattcacaggtaatttattagcctacgtaatttcttatctgacggagggcttttcatctatacacatcgtatatagatgattttctgaattgaacacacgcatcacaaaatcactcatacgccacgttgacgggcagacaaaaaaggaaaacacaaaataatagagaatcgaacaagtggagcaactgcataaaatcgaacctgcacaaaactcatcagcaaaataaaccagggcacccgccacaatcgcttcctcctcacatggcccacgtcaatggttcgtgtcaggtcatcaatgaatttcttgtgcgattccgcactgaatgcgacactcgccggattgccatccgaatccgtggaattctccggcagcagcaggagcctgacatccttgacgcaattgttattactttcactggcaccattgctctccacttgggcagacataatgcgattcgaagtcggcggcgacaaccgatgcacggaacgttgaacgcgcgactaggccgagtgggtgattgttctttcaaatgccccacgatccattccgatccgatcgaatcacgccggttgcctacaacatcattgcgagcattgtgctaatacagtgattttgggactttcagaagcatgcttttaggcggcctacggtttttgtctcgactgcatcttattttaagaaaaatcttgagatcacttcaagatattattttctttattacgaaattggtagttattatgtataatatgttttgaaacttttttatagaacgatttacagggaataagtttgaataaattgtatgacagatagctggtgccgcgaggcgctacaaaatattggacgtcaccagtgcagcaggacgaggttcaggaccaggatacggcagtgacagtggagcttcatttagcgaccacatgttggtagggtaggtaggtagttagtgttgttggcgcgtaatctcattgattacattttgttacatttaggataatattataaataattattgtacattattagtcattgtgtcattgtgatgttaatttcttacattttacacttacaataacaattacaactgaaatataatttaaataccaccatttcctacatagaattttctcttattttaaaaacatttccttggcatttgacattttggtgcgggcgatgttgcacgcaggttgcagcaacaattccgaggagcaaacacaaacacagaaatgtggtgagaagcactcgctctcttggcagtagcgattaagctttcagagagagcttttttttactcatttcaaagtttatgctttaacaaaaaagagacaatttgtagcagtcttctcattctcggttttttttcggtttttcttctcctaaagatttatcttgatgatttcaacagctgttttacattatcagaatgaaaatattgcgatcgcatac

SEQ ID NO: 36728 - DNA, 792 bp, DROSOPHILA
atgtctgcccaagtggagagcaatggtgccagtgaaagtaataacaattgcgtcaaggatgtcaggctcctgctgctgccggagaattccacggattcggatggcaatccggcgagtgtcgcattcagtgcggaatcgcacaagaaattcattgatgacctgacacgaaccattgacgtgggccatgtgaggaggaagcgattgtggcgggtgccctggtttattttgctgatgagttttgtgcagatatctttgcactggatagctagtgagtgtatgcaaaaagtactgatcttcaaaccggaatggaacgtcgagtactggcgcctactgacctatatgctgctccattccgattactggcatctgtctctcaacatttgctttcagtgctttataggtatctgcctggaagtggagcagggtcactggcgtctggccgtggtctatatggtgggtggcgtcgctggttcgctggccaatgcctggctgcagccccatctccatctgatgggtgcctccgctggggtctacgccatgctgggaagtcatgtgccgcacctggttctgaacttttcgcaattgtcgcaccgctttgcccgcatcgcctccctgctgatattgttactcagcgatgtgggctttacaacttaccacttttgccacaatcacaatcgcaatccgcgcaccagtctggaggcgcatattggagggggcgtggccggaattctgtgcggtttcatcgtctatcgacgcctgcagccagccaatcaaaaggccatttacttttag

SEQ ID NO: 36729 - protein, 263 aa, DROSOPHILA
MSAQVESNGASESNNNCVKDVRLLLLPENSTDSDGNPASVAFSAESHKKFIDDLTRTIDVGHVRRKRLWRVPWFILLMSFVQISLHWIASECMQKVLIFKPEWNVEYWRLLTYMLLHSDYWHLSLNICFQCFIGICLEVEQGHWRLAVVYMVGGVAGSLANAWLQPHLHLMGASAGVYAMLGSHVPHLVLNFSQLSHRFARIASLLILLLSDVGFTTYHFCHNHNRNPRTSLEAHIGGGVAGILCGFIVYRRLQPANQKAIYF

SEQ ID NO: 36730 - DNA, 5140 bp, DROSOPHILA
aggcttccgaaaggatataggacactatcaccagcatcgaacgctgcccagacgctaccactctcctacaattcacaaaccagtctgagccttcttcggctgctcacaattgctctggtgattggatcgcaagttcaagttctatgtaagtgtagcccttaagtttcccttaactttgtttgcaaaacagcatttaaataaccccgaagcctttgttatgactccttttcccatgttttgtgctctttacttatcaaggtagcatcagttaggggaagttcaattattcttaatggaccgggttttcttagaaacttacaacggatatttaaacatcaaactttctaattcggacaatttggtagaaaactgggtatataatacacttttcattcatttgcggctagtaaaatctgaaatattttgtcatgggaagcaaatattgaaaatatgtgtgttaagttaaatggaaaaaagaaaataagaaactataccataaagtcttgggcatccaacgaataaaactttgtaaaaagttgtggcttaaaaataatactacagatttacgtctataactacagagtacgaatttaatattattcagtatatagttaggacctttatttctaccaaccctactatatttttacctatttaacaacgtaaccaaggttgtaattagtcctaagcccatgaatatagcatatttgaataaagccaatggggtaatttaaaaatggttagatatttctgaggagctgagctcttgtttaaatatattttttcttgcattcttcaccttttcaattcagacacgacatccgtcgaaacaaaatccccctccgcaagtgaacaatccagaaacggcgagaatcgttcattactttttgatgactataataaaactaaatcgacattatcaactgctgattacctgtcagccacaagggcaaccctttacgcgttttcatcgcaggatcaggacgaggaccattcccaaatgccaatcgaggcgtctaacgctccgcacagccccattcccacgaaaatgagtcggggtaaaatacccatggagacaccgggcagcatggagtttagcagcaatagccttccaatcaaaaatgtagggacaactgatcagctgacgactgtgaccatgcccaccacagcattcgcatccctaaaagtcgacagaagtaccatgaaacagccaattgattccacacgcacgaggaatcattggacagcaagtggtaagtgggatagctttggtattatgcagaacagcatatagcaattgtacaaaagtacgtgtatgaaagtttttagcaaagttttcatcgtaaatattgcatttttggcaacagccatttgatcgaaacaaaattaataaatgtctaaacatggattgccataacacgtcagactcgttatgaaatttcaaatcgactggcattcaagtttaaaaattaaattttttgacttttttttggtaattttgataaattttccgaaatttttttctaaatccggcaaacagtattatgttttggcatggctaaaaacctgcataacacagttgtttcattagctgtataataaatttaagccgaatacggattaaaataaatcacggaaatatcgaattcttgcataaagtattttccagattttcgctacactttttctgatcaaaacattgaaaataataataataatatggaatgtcataacttctaatttaattttaaatttttaaaaatgcgtaattttttggattttttaccttaaaaaacgaggaaattaaaagataaatatttttaaattggtgattataaataatgattgttaccgttggaaaaaggtggtttaaaatataaaatgaggcatcttcaaagaaaacgaacggatgtacataaatacatacatatgtatatatgacattcttcaaaatgaatgcggcaacccctacgtgtactacgtgcatacatacatatgtatgtatgtagtatatatgtatattcttaatttcgatttaatttttcggaaacttttttaaatcttggcaggattcgcacgtgtcacagaacgaccacgtagcaagcaccaccacgagcaccactggggacccttttttgaggagcccatcaactcggcaacctcgggtgacaacctcgtttccgccgtacatttgtttacggaagcggtgctcaattgccgtgtcggtatgctcaaggataaaactgtaagtgaacgccattttgatatgtacgcagattcatatgtacataccttcgtacgtacatacccatacatacatatacatgcatacatgcacgtaaataaatatctattgttctgcacagttaattgatttcacaaatgatgaaacaaccgaaataattggaaataaattagctctcactacctatgtgttcacggattttatttactttatttactgttttactttataagacaaaacaaaaagcaagtttttaagccattaaaccccttttttgaataaatataatttagttactattcaatttgattgcctttcttaatatgtttacatcaaacatacaatgtatgtatgtatgcatatggcaacaaaaaacacccaccgccaccaccattgcattgaaactcatttgtgtatgagtacttttttacggatgtgtgtgtgtgcaatatcggtaaaccaataaacgcacaaaaatttgcccatttaaccataaatattatatttattacatactcattacacaggcctgcaagtactcacttattatcattttacctaattgttggcacttttaggagcaacgaaatgtacaaaaactgatttaatttaattgtttcgcggcagccattttctttaccgatgctcgcaaaatatgacaatgaaatgagagagaataagaagaagccgatgagagagcctattttcttttcagctattctcataattcgatcctcccgtttgtttttgttaaaccgatagtcgtgagagagcgctttgagagagataaatgtgtaacgtgttttaccgtttcgactattttcttttacttatcatatgtacgaacatacatatgtacatatatgcccaatcttgcggttactttaaataagattttgaatttccaacttccaggtcatgtgggtcaggcgaacggcagagaaggtatcgctcctgaccgttggcaacgtgacctacagtggagacccgagaattcgggtgaagttccagtacccgaacaattggcgattacttatcaatcccacgcagactgaagatgccggagtttacatgtgccaggtttccacccatcccccccgggtattcaccacaaatctcactgtcttgggtatggataccaccaattctaaccttataacgaatcctacatggcaagttttccgctttcagaaccccccctgaggataatcgatgagcacgagagggacgtgggggatcgttattataagtctggaagcaccgtcgatctacaatgccaaatatcgcgtagctttttccaaaaagaacgtcagaccattctaaaatcaaccgattctgcaaacgatgctgtacagaaactaatcaatgagacgactagtgagcttaatctaattggcaacgtaaatcagacgcaacacaagttctctggccaggatctggagaaatacttcaccaagtttataacctgggcaaaggacgaagaaccactgcaaggaatgaccaataggcgcttaaggtagattacaaacgatgcaagtcggaattcctatatactgtgtcctgtgtattgcagcgtttccgatgtttggctaaccagtcgtatctccattggagatgccaaactatccgatagtggcaactattcctgttcccttggcagactgttcaccgtaattgtccaagttcaagtgctcacaggtaattaattagtgattgaagtttcgtgaaaatcatttccctgatatgttatatatatctttacaggcgaactacccgcagctgttcagcacaatattggttcaagaaccgaaatctattcccttgcgatgttgggtcatctccttgtactcattttcctcttcacttgcctgaaaaccgaaaatcgacatttctgaggctttaatctgagaagggactgcggaaaaccccatagccattcgattttcacaaacaattaaccaataatattaggtataaacgagattggctggttctaaacaacggttttagttttaaagttgagaatcagaaggtgatttcattacatatttttgttatagtgcctacggtgtataagactttaaatttgtttggacaaatattcttaaaaatttgtttagaattgaattaattaggcaaaaagatgacataataacaattccagattcctaagagccaaaaacccaatggtttaaaaaaaaaagtttctcgaactttttttctagttaatttagtgatgatgttgaaatatcgcacacatgttatatgatgcctcttaaagagttaagaaactggcggggatagcaaaatatttcgtttaattttctgtgacttttaaaagttcatagaatatgtgcattaattaagtttgagcaactaagcaggcaaatcaaatgtatcatacgttattattatgttataccactaattcacaggataacaagttttttcaagaaaacaacgatctgattaaaactttatgcggtatactactttttcatcacctattattttgctgtttgtaattacggaattgggtggttctgcattttattagagatgtttcaattaatatccaataccatttactatattttgggatctgttttaaaaactaacttataacagtttcataattgctttattttataaaaacaaaattggttttgttaaattcaaaggtcgtaggcgatacacacatagaggttcgtaaaaatgttggatagaaatttccactttgaccttaattatacttaaaaaaaaaattaaatgattgcatatgtagctggcattatttacaataactattcaacaggaaaataggcgaagatgcgttctcggtgttttcacagctaatttgtccaatcgtcgatgaacttcaatttctcagaacgc

SEQ ID NO: 36731 - DNA, 1206 bp, DROSOPHILA
atgccaatcgaggcgtctaacgctccgcacagccccattcccacgaaaatgagtcggggtaaaatacccatggagacaccgggcagcatggagtttagcagcaatagccttccaatcaaaaatgtagggacaactgatcagctgacgactgtgaccatgcccaccacagcattcgcatccctaaaagtcgacagaagtaccatgaaacagccaattgattccacacgcacgaggaatcattggacagcaagtgaacgaccacgtagcaagcaccaccacgagcaccactggggacccttttttgaggagcccatcaactcggcaacctcgggtgacaacctcgtttccgccgtacatttgtttacggaagcggtgctcaattgccgtgtcggtatgctcaaggataaaactgtcatgtgggtcaggcgaacggcagagaaggtatcgctcctgaccgttggcaacgtgacctacagtggagacccgagaattcgggtgaagttccagtacccgaacaattggcgattacttatcaatcccacgcagactgaagatgccggagtttacatgtgccaggtttccacccatcccccccgggtattcaccacaaatctcactgtcttggaaccccccctgaggataatcgatgagcacgagagggacgtgggggatcgttattataagtctggaagcaccgtcgatctacaatgccaaatatcgcgtagctttttccaaaaagaacgtcagaccattctaaaatcaaccgattctgcaaacgatgctgtacagaaactaatcaatgagacgactagtgagcttaatctaattggcaacgtaaatcagacgcaacacaagttctctggccaggatctggagaaatacttcaccaagtttataacctgggcaaaggacgaagaaccactgcaaggaatgaccaataggcgcttaagcgtttccgatgtttggctaaccagtcgtatctccattggagatgccaaactatccgatagtggcaactattcctgttcccttggcagactgttcaccgtaattgtccaagttcaagtgctcacaggcgaactacccgcagctgttcagcacaatattggttcaagaaccgaaatctattcccttgcgatgttgggtcatctccttgtactcattttcctcttcacttgcctgaaaaccgaaaatcgacatttctga

SEQ ID NO: 36732 - protein, 401 aa, DROSOPHILA
MPIEASNAPHSPIPTKMSRGKIPMETPGSMEFSSNSLPIKNVGTTDQLTTVTMPTTAFASLKVDRSTMKQPIDSTRTRNHWTASERPRSKHHHEHHWGPFFEEPINSATSGDNLVSAVHLFTEAVLNCRVGMLKDKTVMWVRRTAEKVSLLTVGNVTYSGDPRIRVKFQYPNNWRLLINPTQTEDAGVYMCQVSTHPPRVFTTNLTVLEPPLRIIDEHERDVGDRYYKSGSTVDLQCQISRSFFQKERQTILKSTDSANDAVQKLINETTSELNLIGNVNQTQHKFSGQDLEKYFTKFITWAKDEEPLQGMTNRRLSVSDVWLTSRISIGDAKLSDSGNYSCSLGRLFTVIVQVQVLTGELPAAVQHNIGSRTEIYSLAMLGHLLVLIFLFTCLKTENRHF

SEQ ID NO: 36733 - DNA, 2828 bp, DROSOPHILA
ttcagtgcgggacccaagaactgcattggccagaagtttgccgttctggaaatgaaggtcctgatcagcaaggtcctcaggttctatgaactgctgccccttggagaggagctcaaacccatgttgaacttcatcctgcgctcagcttcgggcattaatgttggtctaaggcccaggaaggcattgcgttgaggtttcggtttaaggtaaatgggatgttcgtgatacttagtaatagtaagcattattatctaatcgttaagtacttataacactgttgatttattggtaaataaccgtagcgtctattaaataattgatattgacatattttccaaacacaaccgtattttattgatgatccatgtatatgattattagcttaattactctagggtgaaacctgttaatagttcttaaataaatcacttactcatccgcctttcattacaaccccttaatcgcaatgcgactcgccgagccattgtttcaatatttgcgatgtttataaaattaggcccccaaacaaaaggtatttgaacagcggatgagcgtggcgcgccataaagaatcccgagtttatcaacgtaaaatactgtatttacctaaggccaatattaaccagctacttagaaagcgttcacaccgcggaaagttattcgcggccattgtgaagtgctctccagcgtcatataaaatatgaatgagagctgtaaatggaaaaagaactggaattcacggaagcagtaaattctccgagatcccaattcaatcattccagcagcctgctgtttatctatggtttataattgaccaaaagataatgcgccaaggcaatagaaaagttttgcaaaacagataagagcatcgcgaaaggaaatcacataacattcttatcaacgcgcctgtcagccgcatcgggtttgcatataaaagaccactacgccggaggcagtgcgtcaaaagagcttctgtctccggtgaatggtgtatatctgcaatgtgtcccgagatgtcgtccgtgaaaatcctggcctcgctggccatgatcggtttattggttttgtctcctgcggagggtatcagccgaccattgcctccatacgtgggtctgcccacccaggatggcctcacgcgtctgttccttaattcacgggtcacgcagacagatcccttcgcctcggtggcatgtttcggtggctacatcggtgaatccaacctgatcgcggagctgtacagtgccaactacaccaaatgctacaatgcggcggcggactccaggaagggtatcgatgccgacttcctggccactcgccggactatccgactttcatccgaaagagtttgcagcgagctcagggcttgcaacgagctcaacacaaccctcgaatcctttcaatgtcatgccaatgtggtaagtggacccattaaactatgaaacaaacttgcttctactgtaaattcccgatcattttagggctccaacaacactgtctccacatacagcatctcgggtaacgcctcggagtcggccagcgtgctggaggaacgctaccgagtggtagatctgcgccatgggcagtgctgccagagggcggagcggcactacgtggagtccactgccaggaactacaactacctgcaggcctgtctggatggtcgcgctaagccgaagcccatgcccaagcccacatccacgacctccacatcgaccaccaccaccaccactaccacgaccaccgaggcacccaccgaaccaccaaccaccaccgaggcacctttaaacgtcgaagatcagttcaagcagcttttgaatttgttaaactaatgcctaccaaattgtacaactttctgaaggagaagcttagtaattaaagacagggcagtcgccaagcaaacaatccttgggcaaacatttgcccaactcgaaattcaaccctctggcaaataaattaaccctgcaaaaaggggttgaaggattgagtttcgcaaatggcaaagaagaaggaattagcaaaatatttagactaggaagaggaatatcctggcaatttgcttgtgtcagtggaagggctttaaaattgttgacctttaactaaataatttttaagtgcaagctattgctgtgcagtttcgtagaaactcatgaaacgcacctcgctcgcctataaatgagcataagtttagagcatgattgatgagatccgaaagaaagattttcaaaaccagccccaggctcttccgatttcgacacctcaaggcggaaacgctttgattaatgatatcgtataaagaaattatctaaggcaataatgagccaaatgcgaaataattcgacaagatcttgagataggaagagatagacaaaggcgaaattattatgccatttatggcaatgaaaatcaaagtggaggagcacaccgagttggccaaaactggagaatggccataagccattgaagctggccgctctttggtgccaatcccccattcccaatccccagtccgcgatctcctgcccctttttaccaatcaaaagaacacgtttggcttttatggctttcgggtttttgtttttttttcgttttgtgcttctttcccttttaagtcgatggccaagtcggcttttctttactgtgactgcctccgccttctagggcttgagtagcagaatgaaagaaaagaacgagattcaggggaaaacaaagacatggccatagacgaaacacctgttgggcccagagcaagtggctcatttattagcacaattggcgtggcattcgacgctagactttttatgaaccggccagcagaatcgcgtagcagta

SEQ ID NO: 36734 - DNA, 765 bp, DROSOPHILA
atgtgtcccgagatgtcgtccgtgaaaatcctggcctcgctggccatgatcggtttattggttttgtctcctgcggagggtatcagccgaccattgcctccatacgtgggtctgcccacccaggatggcctcacgcgtctgttccttaattcacgggtcacgcagacagatcccttcgcctcggtggcatgtttcggtggctacatcggtgaatccaacctgatcgcggagctgtacagtgccaactacaccaaatgctacaatgcggcggcggactccaggaagggtatcgatgccgacttcctggccactcgccggactatccgactttcatccgaaagagtttgcagcgagctcagggcttgcaacgagctcaacacaaccctcgaatcctttcaatgtcatgccaatgtgggctccaacaacactgtctccacatacagcatctcgggtaacgcctcggagtcggccagcgtgctggaggaacgctaccgagtggtagatctgcgccatgggcagtgctgccagagggcggagcggcactacgtggagtccactgccaggaactacaactacctgcaggcctgtctggatggtcgcgctaagccgaagcccatgcccaagcccacatccacgacctccacatcgaccaccaccaccaccactaccacgaccaccgaggcacccaccgaaccaccaaccaccaccgaggcacctttaaacgtcgaagatcagttcaagcagcttttgaatttgttaaactaa

SEQ ID NO: 36735 - protein, 254 aa, DROSOPHILA
MCPEMSSVKILASLAMIGLLVLSPAEGISRPLPPYVGLPTQDGLTRLFLNSRVTQTDPFASVACFGGYIGESNLIAELYSANYTKCYNAAADSRKGIDADFLATRRTIRLSSERVCSELRACNELNTTLESFQCHANVGSNNTVSTYSISGNASESASVLEERYRVVDLRHGQCCQRAERHYVESTARNYNYLQACLDGRAKPKPMPKPTSTTSTSTTTTTTTTTTEAPTEPPTTTEAPLNVEDQFKQLLNLLN

SEQ ID NO: 36736 - DNA, 3039 bp, DROSOPHILA
gcaacaaggaatatctaaatgaaactgtatctcaaaagaaccagttggttatgcaagtgctcaaggtggggaatcaggatccacttgatcagcttgtcaggcatctggaatccaataagcccatgaatcactataccgatttattagctggactacgtctgcacgtttttgccgaggagaattggcaaaaatttatggacttttgtccattagattccattgaatttgccgataccgccactgaaggtcagctgcagcagctgcaaattaaatttcatgttcttcaaaacgtgattcgcctgcaatcgagccacctccagctgacagttcacatccaaaagtcccgggatgaactgcagctgctccttgcgatgctgaatatcacacacataagactgaggctccagtttattgggtcattaagtaagagatcaccattccaggagcaggcgataaaatgtatgttcgaggaggcccacagactgataaataaactcaatgacgacttcacggaaaaccatgccctaggatccacagcaaggacattcgttgaacaaatgggcaaccatattcagcacttgcacgagatgctaggtatacctgtgatatctaatccccagaagcaacttcatcgatgcagtgtgtcctttgtggaggtaagaattcactagaattcattttaagacaagactacagtatccgtacagatctccctcagcttggagcgacgctactgcagcctctgcaaccgccaaatcctattcgagctggacaatctgcaagaactctacgagtcggggagacatctgacatgtcccgtttgccatggaagctttgccacggaaatgtttaatgcataaacgttaaatttattctcaatcttaattacgaagtgttttgtgtgtccgcctctaagagcaaagcaagtgaatccatggagacacctcactcggcttccagatgccgacacacatggtcagaaaaggtgtgtgtgtcattgttagtactcggaaacatagataatgggagtggtctcgattagcagaatgtcctgctccacctggcgaagatcggactccagcttgcttttgcgctgccgcttggcgatgctgtcgataaggagcgacatcgactgatactgcttggtcatctcggtcaggctcagtcgcagtccctcgaggatctcatttcgctcggcctgctccatcacccgcatacccggcattggcggcggaccacttgattggacggatgccctggtgaaacccttgataccgcggcacagctccagcaaacgtgcctgttccttggcacacaccgcattcatgtcggccaacatcctcttggttttcttgaggtaaacaggcaccttgccgaaatccttgcggcagataaactgcggtaccaatccggaattgagtagatcgtgacgagctcccacgggagtgtctacataacgaggtggcgggggacagggaaccgtttgtccggcacatatcttgttgcgtttgatgaagttaggtaccattgccggctttttgccgccactgcccggtggtggtagtgggggcattggcggcatcttgggacacttgtgggtgttctctcgccgccatttgatgccctggctcttgcgcaaataggcgcacggtgggtcaatcggagtgtgagcacagcccatggtgcggtgggctgatttcttggcctctgtcaggacgcgggttccatcgttctggaggataatcgatagcttcttgtcctcctcgttaaagcgttcgcgaagtctcttggcatacttggctgccctctccacaacagctgcaaaattgcttaaagttaggtgggaggtaacgatttttagtacgaatccctacgatttttgtagacaaaaattgattccttaggtccttgggccttcacaaagtcctgctcgcactcgagaatattctcatcgtgatgggtgatataaaccagggacattgtaatacaaatatgtaaggatgaaggtagggaactcgaaagcgtgctagtttactgactattcgtttaataataacagtctgtttggtggagactcctgcgttgccaagtacctctgcgttgacttggattgatttaactcgaaacaaaggttgctataggatttccagaataaacagaaggcaacatcgtttcctggtgatattgtaatattcagatattttctagcaatcggaattcgatatttgttctggatcttttaggagaacacacaaaattggtattattgtatatatattttttaaagcacaaaatcaagctacagcttgtgtcgcacacgagttacattattaaattgtaaataatttgttaccatataaaattcgtgtatataaatatttcgcttgcgtatataaaataattgtttgcattgtaaaattagcactaagatcgtttgtcatggttacattttgattccgaagcttaacaataaacatggaagtgttggaagcacgatttaaatacgaatacgacatagattcagatacgggttacagattacagattcaaaacagcacacagaaatgctggtgccgtcttacaagctagatatgtggtttaatgaataatgaatttgacgatgttaacgaatgtaaaagccactcgaaatttgcactgtttttggatggggtcagctctcctcagctgaccaccaataggcactacgaaaatctcggatcagcaacatggtccttcctttgctattgcacgttgacaagtagatgtactggagatatgatttcatttagctgaaccagcagtttcacttgttgccgctgctctcgcgctcctctcgaatcctcttaaatgcctccgtcttgacaaagtccacggatctatagaccacgctgctaggcactggcgctcgagctccgccagcttcgacgcctgcgaatcgcattccactagctccatttccgccttgtgagtacagattccccacactcatgctggatcgatttagcaatggcggtttgttggtcacatccagatcaaagt

SEQ ID NO: 36737 - DNA, 983 bp, DROSOPHILA
gtcagtaaactagcacgctttcgagttccctaccttcatccttacatatttgtattacaatgtccctggtttatatcacccatcacgatgagaatattctcgagtgcgagcaggactttgtgaaggcccaaggacctaaggaatcaatttttgtctacaaaaatcctgttgtggagagggcagccaagtatgccaagagacttcgcgaacgctttaacgaggaggacaagaagctatcgattatcctccagaacgatggaacccgcgtcctgacagaggccaagaaatcagcccaccgcaccatgggctgtgctcacactccgattgacccaccgtgcgcctatttgcgcaagagccagggcatcaaatggcggcgagagaacacccacaagtgtcccaagatgccgccaatgcccccactaccaccaccgggcagtggcggcaaaaagccggcaatggtacctaacttcatcaaacgcaacaagatatgtgccggacaaacggttccctgtcccccgccacctcgttatgtagacactcccgtgggagctcgtcacgatctactcaattccggattggtaccgcagtttatctgccgcaaggatttcggcaaggtgcctgtttacctcaagaaaaccaagaggatgttggccgacatgaatgcggtgtgtgccaaggaacaggcacgtttgctggagctgtgccgcggtatcaagggtttcaccagggcatccgtccaatcaagtggtccgccgccaatgccgggtatgcgggtgatggagcaggccgagcgaaatgagatcctcgagggactgcgactgagcctgaccgagatgaccaagcagtatcagtcgatgtcgctccttatcgacagcatcgccaagcggcagcgcaaaagcaagctggagtccgatcttcgccaggtggagcaggacattctgctaatcgagaccactcccattatctatgtttccgagtactaa

SEQ ID NO: 36738 - protein, 307 aa, DROSOPHILA
MSLVYITHHDENILECEQDFVKAQGPKESIFVYKNPVVERAAKYAKRLRERFNEEDKKLSIILQNDGTRVLTEAKKSAHRTMGCAHTPIDPPCAYLRKSQGIKWRRENTHKCPKMPPMPPLPPPGSGGKKPAMVPNFIKRNKICAGQTVPCPPPPRYVDTPVGARHDLLNSGLVPQFICRKDFGKVPVYLKKTKRMLADMNAVCAKEQARLLELCRGIKGFTRASVQSSGPPPMPGMRVMEQAERNEILEGLRLSLTEMTKQYQSMSLLIDSIAKRQRKSKLESDLRQVEQDILLIETTPIIYVSEY

SEQ ID NO: 36739 - DNA, 2755 bp, DROSOPHILA
cgccgtgcaaaaacttgtacaagttcacatgatcctggtccacctttagctcagcagtgcaggctccatcgccaccgtctacgatcttgacctttaatggaatataaggatgagataatgatattggtaaggagactctatggtgatctaaccttctgtaggtgactttcaaagcccgttgacttgttgataatctcggtgatgtgtttagcgaattcgagtcccttcttgcgagttcccatattatttattgatgttgctttacagacgatccgctagcttctatataactacaaaatgaattagtttgtccgatcggaacgattagaaatatactagatttagttttgtagatagataagtagtcgtaacgtgcacttatatctcaagtgtcagatagtaattgttttacaatagaacaatccaactttattgtatgtatgacgtgtgtaagtttggatgggactaaatccattaaaaaataaatcacagtagtatattaacaaatggattgctttgattttttcaatatttgatttcattatcttcgagtgcagttttccgcttttcgatgaaaagtaaacaattagcaagtatcaaaaaataaggtaaacataatatagcacgatattatgaaatagttagtatttagttaacggatcctacctaactatccccgtactgcccgaaatttacataaaaatctgaaaatctaacgtaacacctaacaaaacaatttcaaaacaaacaacagctgttttgcgataagcagaatcgccaatcgataagttaaaagggcaaatcgatatgcaaagtcctacctatttaaaaattatccgttgggatttctatagtctttcatctattttagttttaaatatctttattttgtaaattaagaaataactaacttaagaaataataaataattaaactagtacgtcttaagcagaggttcgaaagattttatttcgttttctgacgatctacaaaaattgttttaaaaatccagtttttccttgtcgaactgaatgtacttgacctgtccgcccttggcgatgatctttccatcggacttacgcctcagaatgcagtccaaataggccattttcttaccggcccgcacggtattacaatcaatttcaataagttcgccaggtttcgctgctgcaatgtagcttacattcaggttggccgtaactccgggatgggatccttgaaatttaaaaaaatttcattgtagattctatagattgtaataaacaaactttcaaaatacctttcgacataagggcatatgtggtacaattatcaacaattgttgccgtaagaccaccgtgcaaagttccttggcgattcaaatgctcattggccacagtgaactcccctattgcgcgaccatctccaccgcctgtaattttaatctgcgaattgaaatttgtttacatttttgaatctctgaagatcccacgagagaggtgagcacttcacggttatcgattgcagcgagctgaattatgtaataccatcactgatgacagtcagctgtttttgagagacttcgacggcgtcgctttaaaatcggctgcacaaattgtttagaatcttaccattttcaagacgcggtcgaatccattggacccgctggcgtactcggacatctgcttcacaaagtcctttgaaaagaaagaacttcagttatctactcaacaagttacatggtgctctaaccattcccagtttcttggccgccattccggtggatttggattcctgaactgagcacgacgaaatgacgaaagttactgagggagaaatttcacatggcgttcaagatgtcgggaaatgtgagtgtatgcgtgctaaatagatatacccacacatctgagatagtgattgccgatttcgcgcggtttgttgtgctcgctctgttcgcacttacaaataattcctattcttcaatgaaatagtgtaactggaatatcttgtaatataattgcagtttgttattgcaattaataaatgtttaatttcgttctagattatctggattttcaccttctagccaaaggattcgtccgccaggactcggtacacgactttgtaaacagcgattccgatggagactttatagcactgagcggctccaaatcggaagtgatcactctggaattgagcagcaagttcatggtcgtggatccctttccgtattttgtggccatttatgattccaacgctgcggaaacacgacctctggacgttttggccaacaaagtggatctggttgccatatacgacagctgcgatgtcctggaggcacagcacttggccctggacccggcatacacggctgtgtgctccgttgccgtgccaccagccagactaacagctgttaagcgagcacccaagctggcagctaatggaaatctcctcctgggctccctcaacacttatggatccttgagcctaataaacaagtccgctgagtacaatcgttggaaccctgtggaaggactaaatatcgctgaaactctgagggacactctgctgcctgaagtggacatcgccaagataaaagactttaagagctatcaagaatatattaatcccgcctggatcactatgtttgcttggttacctgatgatgcagatgccactggccagcatgttttggttctgggaacagccgcaggaagtttgtggttgctcacactaagcgccgatgtcaaaactcttttaagtcatcaagaaacga

SEQ ID NO: 36740 - DNA, 450 bp, DROSOPHILA
atggcggccaagaaactgggaatggactttgtgaagcagatgtccgagtacgccagcgggtccaatggattcgaccgcgtcttgaaaatgattaaaattacaggcggtggagatggtcgcgcaataggggagttcactgtggccaatgagcatttgaatcgccaaggaactttgcacggtggtcttacggcaacaattgttgataattgtaccacatatgcccttatgtcgaaaggatcccatcccggagttacggccaacctgaatgtaagctacattgcagcagcgaaacctggcgaacttattgaaattgattgtaataccgtgcgggccggtaagaaaatggcctatttggactgcattctgaggcgtaagtccgatggaaagatcatcgccaagggcggacaggtcaagtacattcagttcgacaaggaaaaactggatttttaa

SEQ ID NO: 36741 - protein, 149 aa, DROSOPHILA
MAAKKLGMDFVKQMSEYASGSNGFDRVLKMIKITGGGDGRAIGEFTVANEHLNRQGTLHGGLTATIVDNCTTYALMSKGSHPGVTANLNVSYIAAAKPGELIEIDCNTVRAGKKMAYLDCILRRKSDGKIIAKGGQVKYIQFDKEKLDF

SEQ ID NO: 36742 - DNA, 2493 bp, DROSOPHILA
gtactacgagaatcccggtgtcttctcacccgaacaactgacccaaatcaagcaagccaactttggtcgagtgctttgcgatgtgggtgacaacttcgaccaggtcaccgagaacgtgttcattttggccaagcaccagggtggctacaagaagtgcgaggatataatcggcattaatctctatctgtggcaggagtgcggcaggtgcaacagtccaccggccatctttgattcctacataccgcaaacctacaccaagcggagcaacaggcagaagagagatctcggcaaggagaacgacgaggtggccaccgccgaaagctatgacagtccgctggaatccctctacgatgtgaacgaagaaagggtcagtggtctggaggaactgattggtagcttccagaaggagctgaaaaagctgcacaagaagctgcgcaagttggaggactcctgcaactccgccgactccgagccggtggctcaggtggtgcaattggcggcggcaccgccccagctggtttccaagcccaagaggagccactgcgtcgacgacaagggcaccacacggctgaacaacgaggtctggtctccggacgtctgcaccaagtgcaactgcttccacggccaggtcaattgcctgagggagcggtgcggcgaggtcagctgtccgccgggcgtggatccactgacgcctccggaggcctgctgcccacactgcccgatggtcaagtgaagacaatggtcaaatgaattacgcatatcgacgtttatccgtagtagccacactcactctaatcaaaaccaaaatggaaacacaccggcaattgcgcaatgagcatgtttaattgacaattaactaacaatgtactgctacacgtgtaataaaataaagcacattaataacccataatcatttatttgtacaaattatgaaacttacttggggcgcttcgaaaatatttttcaaaacgaagtagctcccaatttgagactatctagtctagtcaaatttgatatactttagatgtgtgcccttggctatcaccaagtcgtccttcttgtgcttcagggtgcaatcgatgaaggcaaggtacttgcccaccttggacagattggcctgaatcaccacatcgtcgcccagtttggcgccgtttagaaagtttacactaagatctaccgaaactccgggatgacatggcttggacattagggcgtaggtggttatcaagtccaccagggtcatgatataaccgccgtgcaaaaacttgtacaagttcacatgatcctggtccacctttagctcagcagtgcaggctccatcgccaccgtctacgatcttgacctttaatggaatataaggatgagataatgatattggtaaggagactctatggtgatctaaccttctgtaggtgactttcaaagcccgttgacttgttgataatctcggtgatgtgtttagcgaattcgagtcccttcttgcgagttcccatattatttattgatgttgctttacagacgatccgctagcttctatataactacaaaatgaattagtttgtccgatcggaacgattagaaatatactagatttagttttgtagatagataagtagtcgtaacgtgcacttatatctcaagtgtcagatagtaattgttttacaatagaacaatccaactttattgtatgtatgacgtgtgtaagtttggatgggactaaatccattaaaaaataaatcacagtagtatattaacaaatggattgctttgattttttcaatatttgatttcattatcttcgagtgcagttttccgcttttcgatgaaaagtaaacaattagcaagtatcaaaaaataaggtaaacataatatagcacgatattatgaaatagttagtatttagttaacggatcctacctaactatccccgtactgcccgaaatttacataaaaatctgaaaatctaacgtaacacctaacaaaacaatttcaaaacaaacaacagctgttttgcgataagcagaatcgccaatcgataagttaaaagggcaaatcgatatgcaaagtcctacctatttaaaaattatccgttgggatttctatagtctttcatctattttagttttaaatatctttattttgtaaattaagaaataactaacttaagaaataataaataattaaactagtacgtcttaagcagaggttcgaaagattttatttcgttttctgacgatctacaaaaattgttttaaaaatccagtttttccttgtcgaactgaatgtacttgacctgtccgcccttggcgatgatctttccatcggacttacgcctcagaatgcagtccaaataggccattttcttaccggcccgcacggtattacaatcaatttcaataagttcgccaggtttcgctgctgcaatgtagcttacattcaggttggccgtaactccgggatgggatccttgaaatttaaaaaaatttcattgta

SEQ ID NO: 36743 - DNA, 432 bp, DROSOPHILA
atgggaactcgcaagaagggactcgaattcgctaaacacatcaccgagattatcaacaagtcaacgggctttgaaagtcacctacagaaggtcaagatcgtagacggtggcgatggagcctgcactgctgagctaaaggtggaccaggatcatgtgaacttgtacaagtttttgcacggcggttatatcatgaccctggtggacttgataaccacctacgccctaatgtccaagccatgtcatcccggagtttcggtagatcttagtgtaaactttctaaacggcgccaaactgggcgacgatgtggtgattcaggccaatctgtccaaggtgggcaagtaccttgccttcatcgattgcaccctgaagcacaagaaggacgacttggtgatagccaagggcacacatctaaagtatatcaaatttgactag

SEQ ID NO: 36744 - protein, 143 aa, DROSOPHILA
MGTRKKGLEFAKHITEIINKSTGFESHLQKVKIVDGGDGACTAELKVDQDHVNLYKFLHGGYIMTLVDLITTYALMSKPCHPGVSVDLSVNFLNGAKLGDDVVIQANLSKVGKYLAFIDCTLKHKKDDLVIAKGTHLKYIKFD

SEQ ID NO: 36745 - DNA, 2934 bp, DROSOPHILA
aggcggttaactctagtgtgggttaactcgataactcggcgaattataaaaatcacaaatttttaatttaattatgaatctatgaggcattcggcgggggatgtgcgcaatatctccacatctgctctctagttctcggcctgagtcaacgaaatattggtactttcaaattctaaagttctcatgcctaaattgtacaaagtaccttgattaaaaccgcagtaaacttattatactatgaaataacgaatcaaagaattatagccatttcacatttcatacaagaataatattttactaccacacaaggcgtatgcgtgatttggagaaagattcaaattgaaagaagcttggcatgtgatgaataaaactctcacattgcatatcaaatgcaaacgatcttgatattctgcgatcgaggcacaagtgtacgtcatacggggcgtatgcttaatgtgaaataatcttagtagacgggcgcgtgtccagaccacatgcaatgatcccgacaaatgcgtcaccggaggtgcaatgtttatgggcttatttttggccagagccgaggagtaaacaacggcgcgagaattgcgtagacagcccttgccaatgatcaatattggtggggatccgactgggggacagtccctgggacacgctcccaaaacgagcacaattaattagagtctgggccgctcgaaaacaatcgtcagtccagccgaaacggaagccaggtccgaatccgcgcctagaaaccggcgacgcagaccccggagagtggcaaacccgtcgggcaattaacagatgccgataattacgcggaatcgcgcctcgccagcggacgcggccgaagctccagcggcacagtcgctataaaagcgctccgatctgcactaattaactttaaacgcgcgaaagtcaggcgagccaccggagccactatcccagcagagctacagcagcaggccgtattcccttagccccaaaaagcctaaaccttaagatgcaggtccaccaggctgtgtttggagccgccgtgctcggcatgctgttggccatcggctgttccctgcccgttttggatgccagttcaggcatcgacaacgccaccatcgaggagctgagggccagcgtcaacgatacgcccaagaatctgtaagtctagaaaggatagttatatccaatagttggaactcttatagccagaatatctaataaaagtagtaacaaataagtgatatattataaacttgaaaagattgttagaaaaattcaatattagtagttagtatagtcataatatttccacgcatattactttgtattcttaccttaaaataaattgtgctaattgaaacaatacatatatgtagaaaatgacgtagaaatcaccagaattaactaattaatatatttttggtcacgtagaaagtcttctaatcgtttcttcttttccttccagctatgtggtcaaggcggtggtctatgagatcggcatcctgacggaggtgggcgagaatgacaccagttttgagagccaggaacgcgtggatctgaccttctacgacacgcacagcaacaagagtcacattgacctgggcaacatcccgctgcccatccagaccaatgtcaccggtcaagtgctgaccggcatcgcacccgtgaatctgggagccttcagcagcccccaggaactcctagaaacccttcccctgaccggaagcattgtgaacatcacgcacagcgacaccgccttctatcaactgagcagatcgaacaccagtgccgcggacaagccacagattctggatcaggatgcgctggccaagctcacgcacgcggcccagttgttcccgccatcgtcgcaaattggccagtcggtgccagtgaacccagctgccgataacgaggtgccccagacggaacccgaggattaggcttactccgcggaatctcatcgtgatgcagtgcgttgctctccaagcaatctataaatacgtatactctagatctacttagttttatggcttcacacttaagtacctacagtgctagaaaagactggacgaggacaagagatcggcaacattgccgtggtcacatcacaaggttggaatttcacttttctatggcaaagtaaaaataaatttcgcattagtgctaggtaaatgaggcgtctctcttctttccaactggtgttatctggtcttcggattgtgcgaggtggtcatagtcatgtgagtggcgaatgctaaaagcatttccatcacttctcacctctgacgtcggcggatggtggagttgagcaaagtcggaggcccggctggagccccttgaggtgcaatgaaaatctgctctggtcgtagcattttatattaactaagtttttaattttctcattttcagtttgtttgttgttgtttgcttgcttggttggttggttggttggttggttgtgtgtgtgtggttttgcattataactgtagtacatggggatcttaggtggtaatagatgatatatattttaatattaatagataatgtgtaatataaatataagtttaaacttgtacacaaaaattaaaatgtcgaacgtctcgtcgtctctcagatcagtttagaagagtccttcccccccacgcttcgcttcatgcaacttcctcctctctgcctcatcatcatcatgactgttcgtacaaataagctagaagattcgagagaagaacgaagcgaggcacgtcatctatctgcggggcggggaccttttcaaaatgtatatacatactgcaacacacatttggatactcgtagttctcgtataaatagtttagtttttaactaatttacatagtcatcatgctgacgatgcgctctggcggcttcttcataatatgctttaaatatagttaaatatatatgtatgtatgtggtatattt

SEQ ID NO: 36746 - DNA, 627 bp, DROSOPHILA
atgcaggtccaccaggctgtgtttggagccgccgtgctcggcatgctgttggccatcggctgttccctgcccgttttggatgccagttcaggcatcgacaacgccaccatcgaggagctgagggccagcgtcaacgatacgcccaagaatctctatgtggtcaaggcggtggtctatgagatcggcatcctgacggaggtgggcgagaatgacaccagttttgagagccaggaacgcgtggatctgaccttctacgacacgcacagcaacaagagtcacattgacctgggcaacatcccgctgcccatccagaccaatgtcaccggtcaagtgctgaccggcatcgcacccgtgaatctgggagccttcagcagcccccaggaactcctagaaacccttcccctgaccggaagcattgtgaacatcacgcacagcgacaccgccttctatcaactgagcagatcgaacaccagtgccgcggacaagccacagattctggatcaggatgcgctggccaagctcacgcacgcggcccagttgttcccgccatcgtcgcaaattggccagtcggtgccagtgaacccagctgccgataacgaggtgccccagacggaacccgaggattag

SEQ ID NO: 36747 - protein, 208 aa, DROSOPHILA
MQVHQAVFGAAVLGMLLAIGCSLPVLDASSGIDNATIEELRASVNDTPKNLYVVKAVVYEIGILTEVGENDTSFESQERVDLTFYDTHSNKSHIDLGNIPLPIQTNVTGQVLTGIAPVNLGAFSSPQELLETLPLTGSIVNITHSDTAFYQLSRSNTSAADKPQILDQDALAKLTHAAQLFPPSSQIGQSVPVNPAADNEVPQTEPED

SEQ ID NO: 36748 - DNA, 4176 bp, DROSOPHILA
gaagacgtgaggtttggaaaagagcagcttatactcgtaccacacagtcttccagaagccttcctgatcgtttgtgcttgatttctcttcactcaaagttatgtcgacgtcctcccacttcttcctgttcatccggcatatccatttaagggccaggagggccttgtccggccgattgacagacatgagaaaatgtggtgtctccggcaccagacaaattccgacgagggccaaccagccgggaatcatgaagaacatcattaggaatcgccacacgcgtaggttgtagctgctgctgaggtccacattgaagttgttgggcagaatagccatggccaccagtggacagtagatgagagctagaccctgagattggctacaaatggctaccgttattggtcgccacttgattgcgtggaactctccgaggaatcctacctgcaaagatgcaaccgccgagaggctgtaggagatattgggagatgcttagacactgtgccccattttgttgcccgtgccacatacaaagttccaacaataatccgaatcacagaaagcgaatagagatccggcattaaagcagaaatcaccgagaaggacagcgctcctacgagtgccaatcggataacgaacttgcgtccatacctgtccgccaggaagccaatgaacaatccggaagctaccatccctcccagcagggaattggccaatagggtcttctccttaggcgaggtatcgaactcgcaggaggtcaggaccaccagatagccagcagtcatggactcagttacggagtacatgtatatgaagaaactcaccatgaaaatgatcacctgaccaagcccataacctggtgaagaccaaatgttatccgtttggggggtcaaaagctctatatattcttttacctatggttaagagagcagtgtccacatccatcgccggcatctttaaaatttagttaactatctttgcgaaatcaacaagaacattccaaaatatgctaaaacgaacgaacgaatttccaaatcgtaaatgaattaagtgtttagctgcatgctttgttcagtgtagcatttcctttttcttaacttagtcctagtcctgcaaaaccttccattctagtctgccaaatgccagtgatgggaaactctgattagaaattgaaaagcttagaggaaaatttcatgatcatatttactaatacatatctataattaaatttgagatgtaacctttagctgcatgatgcccattctctgggcttgttattgatctcaactggtagttggccgtagcctctgagtagatagacttatattagtcgatagttttcccatcactgtcggtattaattaatacattgagttgagttgaaaagctaaagaagataacgtaggggaacgctctaacttaagatttccacatgaacaggtgccagtcgcgttggattgccgagcggaccgagtagccggaagagttccgtcttagatttgtcgcagcagcatcagcagcagttgcagcagctgcagcagttgcagttgcagcagcagcagtacctgcagcagcagctgcccatgggagtgggcaatgccgacaccagtccaccgtccgaagacgaggataagcgctacaggccgcgctggaagggatcggtcagccagttgccgccgcagagtcccaagcaggcgctatcccggctcaagcaggccgcatccgcgtcgaacgtggcccaggacacgcagcgacagggccaactgctgaccaccaacccactgcagcaacgcaagagcagcatgttccaactgggcgagtcccaggcatcgcccccaacgaccaccaccacccacttgcagcggaagggcagcatgtacgtcgccaaggtcaccgagacaccgccccacggtacgcccacccgaaagggcagcgtctaccagagaagcgtagtgggactgagtgtggatagtcccggagcggatagcccgcagcgcaagcagagcgtggtcaagaccctcagcggcagctatgtcaacatatgccccctcacgggtggtgagtccagctatggcctgaagctcggaccctcgcagatccatcccaagggctaccgcctgaccaccgcgaggtacggcgagctgaagatgggcttcctgaagatcaagggcaacgtagaggtggaggtaggtgaaaaatatccagctttaatgaaaattaaagataccctggatctgccattgcgtatccatttttattgtccttctttactgcacctcgctttcagctaatctgcgcccgtaacattgtcaacgaggactgcgaaactccgccggacacgtacgtgaagtgctacatcaaggacggggaccgcctgcgccacaagaagaagacgcgtgtggtgcgccacgcggcggaaccgctctaccgccagaccattaagtaccaggtgagcaaatggcccattgttgtcacgcccggcaggtgacgatgataatgcggacgaggagccaacactccgccatcccgatactggtcgcggccacgtccggatgttattaccagccgcctgcattgtaatgcgattaatggccactggccggccgagccgcatcgacaaggccaatttccgcgccctgcgggtggctgacaggtggcccagccttaaccctctgcatgcccacgtcatcgtttcgctttaaacacctactatgaagaacgccagggtttgtaggtcccaaatatattttttttagtctgattttgcatataaaattaataatctgcatgcatctgagagttttcgttggttttacatttttcttttaaatatgtaaatttaagagtatatcatatctaaagacatatctaaagttccgtgggcaagcggagggttaagtcgctgtgggtggtccatatttttattggtagcccatgtaattacccaaacgagtaacccgtaacgataatgaatctccgtgaaaacgcagagctcggacgtctttggccgcaacatcgtcatcatggtgtggcagcggtgcgtgggcttcgaacacaaccaaggactgggcggcacggaggtgaatctggacaagctgagcatcggccagcccatcagcggatggtacccacttttcccgatgcacagctacggaggctccgactcggacaactctccctgaccgaacaacccggtaatcgcagtccacatgcagtgccgtaatcgcctggagtcggacgtgatcggagtgccactgcactcagctcaatttgttagcgcctaagttatggacaccatatacgcgtacactgttacccaagatatccatccccacacccccccccccccctgtatgtattagtcatagttaaatgagcttagcactttaggctggcaggtggaatcgggtcgggttatgttaaactacactaaattaaatacattattcgtggtgagagagctttgtaagtagggtacacagataggacagcaccaggatggggaatgggaatgggaatacgaagaatacccatatcagacagcacaataattgaggaatcgcagtaccagaggcatatttactcgcgtttatatatttttgcttgttgtgtttgcgaaattttaatgttgttcgcatttgaacggaagtggattagtggaaatacatatatgtgggtatggaaaatggaaacgaaacgggcaccaaaacaataatgtcgaaacttcgaggcaacgaagtgggtggatctttcgcccacagagagggatttaaagcttggtagctgacaaatgcatatttatccgtgtaagtgttagttaagtgttgcgcagaaaaaaaaaaaccaaaccaaaaccaagtaggctagccccaactatctgtacagctgataaccccgccaaggtttcaactgctccacgaactggaagtccgagtatctggacaactgaaggtctctatctatgagtatctgaatctctgcacatctgaatgtctagtaatatcgcaaaatcgggaaaccaatcaacggaatctagtttaaatcgacaatcttaatgggtgtgtgcttgtgtgggtgcgagaattgagtgcgattaaagcgtgattaagacgaatttactgtagtcattttatggtaggacattggttgcaacacagcatggttgaagattaaagacacccc

SEQ ID NO: 36749 - DNA, 1236 bp, DROSOPHILA
atgctaaaacgaacgaacgaatttccaaatcgtgccagtcgcgttggattgccgagcggaccgagtagccggaagagttccgtcttagatttgtcgcagcagcatcagcagcagttgcagcagctgcagcagttgcagttgcagcagcagcagtacctgcagcagcagctgcccatgggagtgggcaatgccgacaccagtccaccgtccgaagacgaggataagcgctacaggccgcgctggaagggatcggtcagccagttgccgccgcagagtcccaagcaggcgctatcccggctcaagcaggccgcatccgcgtcgaacgtggcccaggacacgcagcgacagggccaactgctgaccaccaacccactgcagcaacgcaagagcagcatgttccaactgggcgagtcccaggcatcgcccccaacgaccaccaccacccacttgcagcggaagggcagcatgtacgtcgccaaggtcaccgagacaccgccccacggtacgcccacccgaaagggcagcgtctaccagagaagcgtagtgggactgagtgtggatagtcccggagcggatagcccgcagcgcaagcagagcgtggtcaagaccctcagcggcagctatgtcaacatatgccccctcacgggtggtgagtccagctatggcctgaagctcggaccctcgcagatccatcccaagggctaccgcctgaccaccgcgaggtacggcgagctgaagatgggcttcctgaagatcaagggcaacgtagaggtggagctaatctgcgcccgtaacattgtcaacgaggactgcgaaactccgccggacacgtacgtgaagtgctacatcaaggacggggaccgcctgcgccacaagaagaagacgcgtgacgatgataatgcggacgaggagccaacactccgccatcccgatactggtcgcggccacgtccggatgttattaccagccgcctgcattgtaatgcgattaatggccactggccggccgagccgcatcgacaaggccaatttccgcgccctgcggagctcggacgtctttggccgcaacatcgtcatcatggtgtggcagcggtgcgtgggcttcgaacacaaccaaggactgggcggcacggaggtgaatctggacaagctgagcatcggccagcccatcagcggatggtacccacttttcccgatgcacagctacggaggctccgactcggacaactctccctga

SEQ ID NO: 36750 - protein, 411 aa, DROSOPHILA
MLKRTNEFPNRASRVGLPSGPSSRKSSVLDLSQQHQQQLQQLQQLQLQQQQYLQQQLPMGVGNADTSPPSEDEDKRYRPRWKGSVSQLPPQSPKQALSRLKQAASASNVAQDTQRQGQLLTTNPLQQRKSSMFQLGESQASPPTTTTTHLQRKGSMYVAKVTETPPHGTPTRKGSVYQRSVVGLSVDSPGADSPQRKQSVVKTLSGSYVNICPLTGGESSYGLKLGPSQIHPKGYRLTTARYGELKMGFLKIKGNVEVELICARNIVNEDCETPPDTYVKCYIKDGDRLRHKKKTRDDDNADEEPTLRHPDTGRGHVRMLLPAACIVMRLMATGRPSRIDKANFRALRSSDVFGRNIVIMVWQRCVGFEHNQGLGGTEVNLDKLSIGQPISGWYPLFPMHSYGGSDSDNSP

SEQ ID NO: 36751 - DNA, 3967 bp, DROSOPHILA
tttatctgtgcatgggcatgtgtgttttgccttttgtaaatagagaacacatgcacatcgttgttccagtgtgcgaacatcataatttgcattatgtttatgtgcctgcctttcagtttcgtatttcgtatttgtgtttgcccccagggggatgcgttgcaatttaactggcatgctgcaccaaccacgccccgccaccgacccttcgttctcactcgtttaattagttttatttacgttttgattgctttaatttgttgttcagttatgtacacacacacatcgagaatacaacaaaaaaacaaagcgaaacaaacacgcaaattttcagagaacaagaaacagccgaacaactgtaaataggcaaggcaaacaaaatgcttttgtttaggctctaggcgaataaatctagactatgccatatctaaatatacatatattcctagcgattgttaagagttgaatagcgacaggcattcgcaggaggaggagcctttgtgatccgtgaactaacgagctttttggtcgccacaggagcaaattgcccgcgagaagctggtcaccggaagggttcagatccaggtttggtaccatgcggagcgcagcgagctggtcgtctccctgatggccggcgacgacctggcaccgcgggatgaggcctacggacatggcaatctgcccgaggcgtacgccaaggtccgcattctgccgaaatggtgagtgaaagcaaaacggtccctgctcgggcgccattacaagatggataaattaaagagaacatcttaataactctagggtttaaaatttaaacaacacaacgctatttatctcactctatactttgcagcacttgcagaaatttcacacaaccctagaggtttctctgacacgctctctaaacttttattaactgtttcaaacattaaattttattcccaccttcagtggagatggcagcgtgcaacaaacggaggtcagccgacccacacagaatcccatttggaacgctacactgaccttcggccatgtgaaggccgacaccttgatggttcgctacatagacattcagctgtgggacctggtaccccacaccgagtccattttcctgggcgagtgcagcatcgagctgcagcaggcctttctcgatgaccaggcaatatggtgccgcttggaggatacgaaggggctgcgtggcataagcattagcaaatcaccgagtgtatcgccacgtggctcgattgcagccggcgcaggggcgcccagtggcgatgtgacccggttgctgcgtcgcgactacaatatgcagcgctccaactccgatgacgtagactccatcggagatggaacttcactgctgcatccggatcacgcctggatagctggctcgcgacgcggttcctctcagtcggaaaccatggaggtggaggtctaccagctgggcaaggacttctcgcgctcattgccgggttcgcgtcgatcgagcttccaggatgccgaaaagaatcggctggaggaggacgccatggccacgccgcccacctcttatctggtgggccggcgccgttcgtccgtggctcggcgcgatccggatgagatcttgaaatccttgaaggctgtccgcggtgagctggggcgcaccatgagtctgggtaccgagcagcacaagcgcatgggatcgagacgtgagtagggggaaccacactgaaaacaagtagggcgacataaggtaatgcccaagagcagcaagccaatagcaaaattaaacgactgattcaattgttcttctattgaagttcgttgtgtacggagccctcaaaaaaaggtccctgcttgggcgccatgttaaactgatacttgtaatcaagattaattatgttacgagttgaaagctcttgggaaatatattatgtcatcgaaattgggaagcgggtctgaattgctaaaggaaatcttctcaattattatgattttcccttccacaaaaccgaaatctgagctactcactgcaagaaatctcttgctgcctttcacctcttctatctgctatattcctatgtctctttgcatttccttcaatacccactaaacctgaactgtgccttgctgctacttgctatatggacacccactatatctgacattgcatctaacacatatgaatctgccactgtctctatctaataacttcttccatgtctttccctatattagccacaatatcggtgtcgcattatcaaagctttgacacaccctacacaaactggacaaaacactaaacgaaagcccagcaaagccacacagaacttaattaaatcgaaaatcaaataaactaaagcactaactaaagccacttatttaaagccctcagcacctgtcagttactcgtaattcttttgcttaatctaatctaatgaaaagggatcactctcgagtgggccaacaatcaccacactgcaccaccagagcaaccaaccacaaatggtagaaaacagaaagccaaaaaaaaaaaccaaaaaccttaaacccttttgtaagatatacaagaaaccaacataaactagaaatacctgcaaattgagcttagcagcaagtatttaacagacataaaatgcaataaagcaagaactacagtatgtaccacactagaaacaccaccaaaacatcactcaccactggtaagaatgcaaaatgaacttgagttgagattgagttgcgtttggcattttggtttcttctttttcaatcttaattagcgccgtaaacctggagttcttgattccagctagctgcatgcaagccacctaattaacgtccactttcacacacaattacatagtattgtagtatccgtctatatgtgctcgcatgcatgtttgccgagcagcgaaaaagccgaaatctcattacacactcatccaggctcacgtactgcttgataatccaccggaggacacccgggacacatgaaaacttctcgtctgcggttggggcttatttaagcttattgatgccattttcacagtcacaaaaaagttgccaaccgaaaaaaaaagcaggaggacaaaagccagtaactcgcagtaaatttgtgcttaaaatgcaaagctcggagcgggaaacccgcttattacctgttggcttcgcaacagttcgccgctcacataaacccttcaacgccccggcgaaatagctgagccttgaaattaacttttcaaaagcaaaagcggggcggcaaaggcgaaatatgaaaactcacggcgacagaacgcagccgaaactcgcattttccagagccacaaacaagccgttaaatatgaaaataagcagaatcgctgtctgggaaaagtgtctctatatacacacatacatacatatatgtattttacatacatatatgtattttacatacatatcacgccatatacacgctgtactccaaatcgacgattccatgctcgctggagatccttgctgccaagatgtccctattgtagtgccagttcagcaaaaaaaaaaagttccctgtctttgccaatatgttttcttgcttcttgcttctcgccttccgttttcctttccattccattcctttcgattcgattttcttgctcgacagttattattaagccgcttagcgattgcctcgccttccgtttccgctttgccttttacgcacactcatatccgctgggctcgagcaaaccaacagagaaaaatccactcaagactatataaacgcagctgtcgccaagtttatttgacgtttattttattttcggctggtgtacaaaaatatttgaactttcgccataatcctttttccgctctgagcgcagggacacatcaaatttgtactgcgtgctgtgcgcccaattgattgaatgattgattgcccgattgggaaggtcgatagggaagcccccttgttgaaaacccacatatcacgcatgtagcaaaacgaaggaat

SEQ ID NO: 36752 - DNA, 1020 bp, DROSOPHILA
atgcacatcgttgttccagagcaaattgcccgcgagaagctggtcaccggaagggttcagatccaggtttggtaccatgcggagcgcagcgagctggtcgtctccctgatggccggcgacgacctggcaccgcgggatgaggcctacggacatggcaatctgcccgaggcgtacgccaaggtccgcattctgccgaaatgtggagatggcagcgtgcaacaaacggaggtcagccgacccacacagaatcccatttggaacgctacactgaccttcggccatgtgaaggccgacaccttgatggttcgctacatagacattcagctgtgggacctggtaccccacaccgagtccattttcctgggcgagtgcagcatcgagctgcagcaggcctttctcgatgaccaggcaatatggtgccgcttggaggatacgaaggggctgcgtggcataagcattagcaaatcaccgagtgtatcgccacgtggctcgattgcagccggcgcaggggcgcccagtggcgatgtgacccggttgctgcgtcgcgactacaatatgcagcgctccaactccgatgacgtagactccatcggagatggaacttcactgctgcatccggatcacgcctggatagctggctcgcgacgcggttcctctcagtcggaaaccatggaggtggaggtctaccagctgggcaaggacttctcgcgctcattgccgggttcgcgtcgatcgagcttccaggatgccgaaaagaatcggctggaggaggacgccatggccacgccgcccacctcttatctggtgggccggcgccgttcgtccgtggctcggcgcgatccggatgagatcttgaaatccttgaaggctgtccgcggtgagctggggcgcaccatgagtctgggtaccgagcagcacaagcgcatgggatcgagaccgaaaaagccgaaatctcattacacactcatccaggctcacgtactgcttgataatccaccggaggacacccgggacacatga

SEQ ID NO: 36753 - protein, 339 aa, DROSOPHILA
MHIVVPEQIAREKLVTGRVQIQVWYHAERSELVVSLMAGDDLAPRDEAYGHGNLPEAYAKVRILPKCGDGSVQQTEVSRPTQNPIWNATLTFGHVKADTLMVRYIDIQLWDLVPHTESIFLGECSIELQQAFLDDQAIWCRLEDTKGLRGISISKSPSVSPRGSIAAGAGAPSGDVTRLLRRDYNMQRSNSDDVDSIGDGTSLLHPDHAWIAGSRRGSSQSETMEVEVYQLGKDFSRSLPGSRRSSFQDAEKNRLEEDAMATPPTSYLVGRRRSSVARRDPDEILKSLKAVRGELGRTMSLGTEQHKRMGSRPKKPKSHYTLIQAHVLLDNPPEDTRDT

SEQ ID NO: 36754 - DNA, 40388 bp, DROSOPHILA
cagcaaatgcacgaaaaaaaacccagcaaggggcaggcacagtgggccagtaagcgcagtagattgctcgaaaaagtattaacattttttcaaatttttatttgataaattattgatacttatataaaaagccttattatatttaaatcaagttaatatatatgtatatggtaattacgaaccactgtgcagtggcatgtaaaaatgcctttacaactgtcaccctgccgccgtctatttccgcttttccctgcttttccgagtcgcgtgcatcgtgtttatttgtcaaaacatttctgcagcgccgccatcattgactgccagccatgtgtttataataaatgtttttcgcaaaatgtttacacacaccctgaatcgaactgaccaacaggcagcgtgaactggtggttgttgctaaatatgcagtttattgttggataactcgttgagcgcctgccggaaattttcaccatacatttttggcagttttcggcgagaaataaaccctgccagctcataaacattcggattcacagagtctttttggtcagggtcagggcgtgtgaagtttatcacccatttccggttacacctcgaaaatcgtgcatgtgcaagcgacaagagctgtcaaaactattagcgactatgcagcacatatagtacacgaatgtatatgctatatccacacactgggcctgtcatcttgggccattcaaaattaataagaatatttctgctcactcaaaatgccaagcaaatatgtaggccagccaacaagaacggaacggaaaactgttgacaaaatacaaaaacaatttttgaatgagttttcgaccgctggccgctggcgaaggggcgtggcacctcaagtgtacgccttaagtgcctgttgtgccgtgacagcttcattaaaactgtgtgcgccttgtaagagccaccatcgcccgccccactcactgccccccaggcgaacgtcaataatgaggcgggcatccgaggattatgatgatgactctggcgaccgatgatcgctgtgatgggcatcgcagctcggcagctcggctgctatggctggcatttatgactaagcaggaggcaccagatgacaaatgccaaacagccgccgaaagatgaccaatgtgggcgacaaacattgggtaaacaagcgaagagctaacaaccgaagggttctgtgagtacagtgaagcttttttaagtagattgattgccagctgtcagctaactagatggttatatatttagctttctgtctttagctataaaacgcagaattactatgattttagttcaacttacattccttattcttgtccatcgctggctgcagcggactggagtccacgatggcctttggtggtgactgtctggcatcgtaacaatccgagttgttgccatcatcgctgctgcccaggaacgtcgcatgcaaacgctgctcacctggaaatgttagcagatattagaaaaatcatatttcggagacggatgccaagggagatccttcaagagcggcacacaactcaccctccgacatgtcgtcgtaggcctcgtgcagcaatattatgtcctgaaaggagtgctccaaatccttgccgctgagcctggtggccaggaggccactgcaggcggcgctcgagatgagctcgacggtggtcagtggcgacgtggagatggtggccagcagcgaggagctgccgctggcgctgtttccgctgctgctcccgctgcttccgctgctcaggctgtgcagggaggcggatttgaccagctggccaaccttgtggttgccgttcggcttctgggtggcctttaaagtcctcgaaaggctcttggtgggcgacgtcgaggtggatttgttgaggaacctgctcgccgtcgctgaaccggctcccttggctccactggaaacggacttggagttgcaatggttgctgccgcaactgctgctgttgctactgctgctgctgcagctgctcaggctgctgctgatggacttcttcgacgagttggaactgacggaggatgcgggcgatgctgacgacgaactgtggcccaggatggccgtctgctgctgatgttgctggagtgtatttgtattgctggcggcgagcttcgtgtcaatggttatgggtatgacactggtggccaccagctggtgatgcttctgctgggccagctggtgattgtgctgctgcggattctgcttgctggctgctcctcctgctcctcctcctccgccggctgagccctggaaccagctgggaaagttgcccttgagcgtgtcaattagatcctgatcgagcgttaaacgccacgatgcaggtccgccgtccacgctttgcgtcgactctgcaaattagaattagaaatttgaattttaaaggttcgaaaagttaaattgcttaatattgatgttatataaattgaaaataatatattttgtggctcataattataccattatcatttttacccaattgtcaaaaagcgcggcaaatgtacttattaaataattcaccataatcaaacttgtttgctaatgaaacagtaagctttttgatattttaaagacatcattaaatatttgccattgtcattcccgttcatcgttcatagctcacccacatttgatagttaaagccaacccaattcattaatttgcaatggcttaacactcggtgttaatttgattttccactttcctcatcggtcgctctctgtttttcctgcccacgctcacatttatttatttgaatgtggcttttccgatgatgttctgctgctgctgctgctgctgctgctgatgatgtggccactggtgtgctagttatttatgctaaacactgccaagtaacctagtttgttggcccaatccccagtccccacagccgcccccgcatagaaaacatagcaaagcgcgtacttggtatttatttttcaaattctttgctagtcgatgtgtgccttgggttttttggttctgcctgagattttgcggcactttttggcttgggaattgcccgagagatatacatagattataaatgtataattgcaatttgccgaatcactgggcgcactgctgcacttactcgtaactggtggcgacagtaatgcgaactggcgaactgcgagtggcgaaattgcgccgaaaatcttggcaagcggatgcattgcatcatgcgaaagcgacattcccagacacgcctcatattatgcaatattcggcgatatctggcgactatttagagccgatcggcggcgaaaatagctaccatcccagcataatggccaaaatctatcagctcttagccaactgacatgcacttgtcaaatgtccacctatttctggcacttatttttgtttccttttcctttgattgttatttctggttggcttaaaaaggttctcatacattgtcgccccccgaatttgggtatttttagagatctagtgaggatcacgactgttacgccgtctgtcccgatgactgtccagcctactgtcccgttgactgttcgttccgtcgaatgttacgacgatggtcccgccgactgttcgttcgactgttccgccgaattgtcgcatttaggtcgcctccaaatatcttttcttaacactgcgtgggcggagaatctgtcacacattctgctttctgccgccttgtttgtttatctgaactaaatttgaaattgctccgcaaataaatggataactgtgccgaccgctgcatttgcatgcgctgcgacatttattggtcattaagtcgagcgccagagcaaaagaaaaccagcaggaaaagcggcagccgctgcaacaggcaagcaaacaagcaaacaaaacaaacataccagtcatccaacagagcagcaacaacacattgcccagcagcaggatgcacagaaaacaattaaggaaactctttatcttatgcctaagtaaaagacaatctttcgagcgaacttttcaaaagaagttcgtagattagtgaaacatcaatattatgtttatattcaactaatatttctccccgtgtacctttgatgcatgccccaatgtggcgtttggttttctctgtgtgcgatggcgcgacatgatgtccacacgcagccacatgcttttgagataaacggacgacggactaggggagccaccaaagccattgccaaattctattttcgcttcagcagccagcgaaatgcaagtggtttctcttggccaagacgtcgccgccccgatcgccagggaatctccttctacctctgtccttcacccttcaccctccgccaacagccaaccgccttgccccgcccactctgcagatggcggcggcgacaagagcaagaacgccttggccattacaatttgtcaactgggcgtatgcgcaatgctgctgctggggcaatgacaaaacaatcaaattgacaaaggaaccgagaatgaaaaggaaaccactgcatcaaagcgaaatttaatgaatcgaaaagaacaattgaacaggcgacaattgcccagaattagttggcttaaaatatttcaactaaaatagaaaaacaattgcggaattggccatttgctcaaaataaactagatactagttttgtaatacctttgacgacaagtctaaaaactaacataagtattacgaatgcaaatttgcaacaagattaaaacatttaatcccaaatgaaattatattaaattataatctagatttgtagaacccgcaagtttggcgaaatcaaatgagaaaacatttccgaatattccattccacttgttgccattatgtaaattataatcaaaggacgagcaaccccttgacgaatcaataaatagaacaaatacacactccacaatatcccagggatgttgacaaaactaaaaccttgagcggcaaaactatatacacacacacacacaggaagagggacagggacagggacggggagggagtggagcccagccaggcggaacagttgaaaaataaaggactttggcccagcacttagtttgatttcacggccaggaggagcactgccatggccaaaactaatcattcaaagcggagcggaagttgtggcggaagttgtagcccagtcttccgcagccgcagaagtgtgtgtggtagtttggcatggttacttcagagtacacatcaattatgtatgccgtatgccggcagccatacacgaatcaacgcgccgcaaagtatgctacattgatgttgccccctgagtgtaagtgtgtgtgtgtgtgtgggtgtgggtgtgggtgtgggtgtccgtgtctgtgtgggccaacttccttttggcaagacaggaaacaggatgctgttaacgttacaattcgacataatcgatgcttgtcgtacgaggcatcgcatttaacctggcaatttgtctgcggctgcataaacattaactttcatttgcagtttatcttccgagccgcgcagtaaatcaaattgtgaccgaaataaataaattgatccttgttacctcttggggtactaagaaggggattactttcacatataaattaactacaaaaaggcagactcttgacttaaagattacattcaaggtttcccactcaagaactcataatttgtctggcttatcaagtgactcatcgcgcgcaagaagcagttgcatttaaattattagaaacgtgctacctgctgacttttgcacctcgaatcgtgaccactcgcattgtttatcgtttcgatttggcgaaaacaatctacgagatgcgacgtttacatattcatttgaatgccaataacagctgcagtggcaacattgctgacagcttcgacaagcgaggattatgcaagcgccatgaatccaaaaaaaaagaagaaaaaatagaaaaagtacgaaaagaacccccaaaaaaagaaaggaaggaaaaatcaaatggatccgtgggggaaacatcgcagcaataacaaacagaaaatcgcttgccatgtgtcgctgggtgggtggataatgtataatgtatagtataatgtacatgtatatggggctgcaaattgaaacgtatatttgtaaacaatacgcagacgtcatagacaaaactcatttaaatgggaaaaacatccagcaacaactattcagcggaaaaatgctagtaccagcgatcaccagcagcacaaattaaaagagccaagaagctgcgtcgatcgtttcaatgcactgcgcaaaattttgccatccgaccaaggtttaaaagaaacaagtattaatagttagtcgtaagtaccagtaagtaccagataaatttgcacgaaataagcttttccttgaaactatatcttttaaaaagaatgcagaagtttctctgagtgcataaacgactgaatgagctctttaccaatttggtcataatactgaaaacgtgtttttccactcgacaatccaaagattaatacgatatataataaaacaatctatggcgagcgttattttatagtttttaatatgcatagagtggtattgcctttttggtgcagcttagccagaaatttcgcatgttatcgcaacttgacaagtgtcaggtagctaccaacaacaaccgaacaaccaaacaatcaagcaacaaatatgtgtgaactacaataacaaatttcaggagcatgttctgaggtgcggggaaatacatcatcggacaaatcaacaaaacatctattctatgctggcattgaaatcagaaatattattttggccgaatcagttacgtttgcttttgggcccctggccttatcaatggaatgagtcactacatagttcgtgttttttttttttttgtgtgggggattgtccaacaagaaaccatttttatgtctatttggtagtggctagcaactaaaagccagtattagatttatttttcttcacttgagattattcctttatttcaaacttttaattgctgctgacacgtttgaccttcacaagttatagttgcaaagataaactaataactttttcttggaggagaattattattcgacttctttatgcacacttagtttgagtataacttattatcgcaaaattctgggtatttatgggttaaagcttttaagttatcactttgtcaaggctttaattgattcttttgtgttgctttttcctaatgcaagtagagtttagttaagaactttaaaatgcctaacttatttttcaccagacggcagttaaattgcataattttaattaaatttctcttttaattggttttagcttaaatgcacaatttcgtttgaattaataataaattttcacacctttcaataactttcaacgctttcgtgcggctccttatcacttttacatatttattcttagactcttggtgttgcttctgtttacttttgagcttagaattagtttcccgaccactggcatatcagcagggtaaacaataacaaaaggccgcgataacacaaatcgttaactgattctgattcataaggccattatcagtcgcaggtatagaaaggcttttgattcgcgtccggcgtgttgagagcaacccggcaaactgaataggaaaacaaaaaacacaaactgaaactgaaactggtcgagcggctaatgttttgggggcgctgctcgattgtggaaatggccaagtgacgttcacctgaccaactgactgagtgacacaggtgggcgtcagcgacttaactggcattatgcgacgtgctctctctcgcactctttaaactcaagttctgcgctacactgcgagaaatggagtaatctatgttacattaaaaaagcggtttaaaaaacattagctaaagatgcattaactatattaggtcgtgtagaaaaagcattcccttgcggtaattatactgttattagttttcagtgatcgactggtcgatgaaaaatgatttttagccgcctgtgctgacaaatttgcgcttcatggcgttgattgttgccacagttgcagtcagagtggctccttcccatgaacaatggcagctaataagcgccaggcgggccactgagtgcaacagaagctgaaattgaattaaagctgcttttgttcaactgttgcatgcaaatgagtgacggctgcgtcgacttcaatgcctgcggtttccatgcacttgctgctgctgattctgatgttgctcctagcgttgctgttgctgctgctgctgctgctgctgatgatgatgttgctgctgggcgatggggttcagtgctacctgaaccaaacaattgctcgacagcaaaagtcaattgggcgacacacgcaacatcacacacacacactcagcacagcacagcacaccacacagaacccaaaaacactaacaaagcggactcctctcggctgtcggacatgctttgcatacaaagatcccactgaagttgactggtcttttatgtagctgcatgcgtgaggtgcgtgtgtgcactcaaagaaaatagcagtggaatctaaaaaccttctgaatcatagctgacaagaatccagttgaattactagaaatacaatggggtatcctagagcatcttaagatcaaaagatatagtttatttatccaagtatctggcttgcaatcaaattaaacttagttctaactatcctctaagttgaattcgttttcgatagtgcacttgtgcgaatggaacaggatgcacatgcaggattgttacactgcagaacacaatgggcggtggtcaggtcagttgtccatttttgcacaggacgcaggcctgattgaattgaaagttaattagagagagagatagatgtgctgaccgaatgttccgggaaaatgtgggaatagtttgggggattcgttcgggcttacccattttgcatagggtatccgccttccgagaaacaactcgtataaatagacccaaaacgaccgtgtttttcgtaagggtgtggccgtctgtgtgggtagtgtcctcaattaaaattaattatgcccaaacgatacgctcaataaaatttaatttgcgaaaatatgagccaagaaaatgagccacataggaaaatgtgacatttaagtgccgggggccagcatcctcaaactattcgccaaacaacaaacacacacagtcgggtctaataattgaaattgaattttcaatgatagcaaggcgagggcccagcgatattttagatttatttagatatgtgtatccacccccatgagccgaaatgtttggcacactatttagaagcaataggacttgggttttattttcccgagatttcacctcaccctggatgactagctaagctctaggaacacctcacctacatacgaaatggttcagatttaactggacctggcatcgtcacccagaaaagcagtcagtctccagatccccccaagtggaataaagactagacacttgaccggattctcgttctgcattaaattttgtgcgagtaagctgacgactctctattctgttttatcaaaaccaaacgaaatcgcattaaaaataaataaaattaaaagtgtaaactgcacaaacacacacgacttttggccatgctgcgtgccaagtggaaaatatttcgcaagtttttctacacattattgtgtgaaaaatactatatacatatagtgtactatatatatacacatctgtgtaaaaagtcggacacaggcaggcaggcggctgcctgtgtgttatgtttagtttgctacgttcaatttgcattgttgttgcctgctattctattgttgccggcaaaacaaaataaggcaacgcaaaatgctagaatgggcgaaaaaaaaaacaaggcataataagcaggcaagaataaaaactacaaaaagaaagcaaaaaaaaaaaaaaaaaaaacgaagcataaaggagatgaaaatgaacattttttggcaaacaattcagggctaaatattttcattgttttgttgagtttttatcacaacaccataagtttgtatccaagtggcaacaggaaaaatctagataaaatcatcaagattctagcaatttaaagtcccgcattatttgtgtgcgaatcatacgatatttttgttttcttcctgtttgtagttaatttaaaggaaatcccaaggatttgcatctctaagttattgggtaaacattacgaaatatacaaataatgtgattatagtttaaacatatttattaataagatgcacaaggtgacactctttgtgtttcttagtatgggatcttttaaatttagtaaaaggagttaaagtaacaaaacaaagcaaaggcatttaaaatgtcaagataaatcccatttgacgcttatccttgggactttgcaaagttaatggataaatatcgagtgccatgataaagtttggttagttcaaagggttttggggtttggggtttgagttttggaacccgcacaatcgcacgcacacatttaattgcagaaatgcttaattatgcatgaaacactgaaataagcaagacgcacacacacatacactcactcacatccagcgagggatgaataattcatggcaaaacggagaattcgtggatcggctttgcccttcccttcccttccccttcgattaaacagcgcgcgttggtaaaacaaacaaataaacagcatagccagcaatattttgtacctcctaatgacgtactctttccagacggcaaaaaaaaaaaaagaaaggaacacgaaaattgagaaaacttttgccgtgcaatttgcacgtcaacattttcccaaaacaccgaaaaaagtaatactaatggcaggcacaacaatattttcggcagcgtcggcggtcaagtttgtgttgtgatgttgcatggatgcctccagtggccatacccttcccccaaatcggcgaaaccaaggacattcaatatgggaacgaggtgagaaacgattagacaaggcctcgttagctggagattacagtgaacacagttgaaattccacatttggaaatacccttcaaatcctatactcagatatttgagtttcaaaagatcactctagtatgaatatatcttttttaaatagcactcagttatgaagtgcaaattgaatgttacaattcttaaaatactcctggttttcatttgcgaaagtgcactgtaattcttactaaacataaatgacatctcactctcgaatggattcccatcgattggccacaaaggaaactcacctgcaaagatacaaaaagaaaaaataattagcaataaagccagcgagcatagacgaatgtaatttgtctaagcagaatcagaattcagaagccgaatgggaggaagaacgattttcttttggttgccacaagaacaagactgtgagcttgtgtgtgggttgtcaactgattgcgcatacgccgcgttggtcaacgcactttccaaggctgcgaaaacgcgaaagcagctgcagcgcgctagtcgctaatcataatttttgatctacaaactaattagtgttcgcacgagtgtgattgcaatttattggacaccaattgagacgaaagcgcgcattttcattcataaacatggcaaaatacggggaccagagcgaaaaaagggaactcaatttattaattgctagcaaatgttgggcgtgtgttgcaagagttttgcctttgcgatcgcaattgcgattgcattagccatattgcaattatgtcgtcatgtccgcgtcgccgccaaagttcaaagttgcagaatctttagaacataaaagtttttcgcacgttccgcacatggtggtgaagagcaaggagggccggagggaggaggcagtcactgtgcgccgagaattattcatggcgcatatttcagcggtttggcaatagccccccaccttccacaccccctcccaagaggcgaaataaataattgcaaatattattggccactcagcgcatgccaacaataagaactgcaaaaatagccagcgaaatttgcagttcgcatagtttcgcaataagtcggcggcaatgatgactcaagagtgcaaaaccaaatattatagccatataaaaaatatgtgggaaattatgcatcttggcatggcacttgggcatcccgatgcgatgaactgaaatctgacaggttgaggaggtactcctgggtctggttattctagtcatgatgggctagtcaattggcaggattcgcgtctctattcaattggccgaaccgtttcaaaactatttcaaggctttaggccaaaacgaatcaatttgaaacacaatattcgtttttgacagtgattaagcgaaaataatcgctggtgggaagtaaatcaaagtggctacacttatagtacttaatcgtttaattaggctgtaaaatgttctacaatctacaatctgctgccaaaaagcatttattttatactaggatcaacgaaaactaaatatatttccctcactgacgcgcctttgttttaagtaacataatacactatttttttttttttaagatttattgtctttccattgatatctgcaagtcacacaaatggtataatggtctgaaacaaaatcgcgtagcaaatctaatttcaatttctatactaaaatatcagacggatggaaataaatagggcgcacacatcagggtaaaatggtagacgtattccccatctacaatgacggacatgtggagcttgaagatctgtgcctgtctgggccttctattacttttcaaacccatcgactccatgggatggcaaggacctaaagttgactgtacggccaacggaactcagacggagtgtcctgtagcatgtcctgaaacctgcgagtactccggcaatggaccctgcgtcaagatgtgcggagctccttgtgtgtgtaagccgggatatgttatcaatgagaggattccggcctgtgttctgcgatccgattgcccaaaagatgttgttcgaaaggaagatatgctactgggtgtatcgaactttaagtgctttagcagaaattacaactgttcatagaaatttattaggaaggcagctaaactttaaactaaattacaataaaatgtaaataaatgtgtagtaaattacaagctataattacaagataattacaaatagtaaaagaaatccgaaatgttagttgcactaattacgtaactggaacgaagttgcatagcaaatataatttgtattgctgtactagcaacctataagaatactttcgaaatcttcattccacctgctgcccagttttccagccaagtcctgcccacttctcatttgcccgaaatgccactgcaaatgtggcggtgcaactgttaccaggcggctggttgtgtttgtgaccgccatgtgcccactggcagccacagaagcgcacgtcacccgcacatacagtcatgaccattacaatggctattaagagaaagaaaacgcatttcttggcaagcggtctcgtgtgctacgggtcatttgggcggaactatgtgactgcaattgggggacacagaaaaatggggatttcagcaccaatccatgcgaaacgcggaacacattcgatatggtaatcacatcggaaatttcactgtgaattatttagaactgtgttattcctacatgcttttcgagctgaacaataaatgcacagaatgaatactttgtatttgctggccagattaggcgcggtgatgcatggtgctgcaattgggatttaattaaaaacttagtgggccagcaaccaaacggcgcacactttgatttatgatttaagccaaatagttttaaagcgccgccgacgtggtataattctcttgtattttgcatgttaaatttcgcgtaataacgaaaatgatatatagaaataatcataattttcacacttgaaagagcgacacaagacgtccacggcgacgacgcccgttcgcatcgcggcttgtgcattatttcttaattaaatttattaattgcacacaacacgagccgacggccgtacaacggggcgtatgcgcaacgctcgcccccgccatgagatttaaatgaaaatgcgagcgagtgagagggagaaagaaaggcaaagaaaagccatttgaatgattcatttacgtgtcgaaaacttaattgtgctagcaggtaagacgcttgtcgatgacgccaaaggctaagaggacaaaaaaaaacaacattatcatcatcaccatccgaatcgcagctgaactgggcttaagaaaaatggtcaaaccaattataagacttctgtgggctatttcattttgtcattaagaaactctagtagttgaagaacatccaaatttggtcacaacaaggcaaccatatcagccattatgcttataccaattttcacttttcacttgctcttttcgcacgtcactaggggtttttcacgattttcttgaatgactgcctgcagcatccgcgcatccaaacagcagctgtcagcccagagtatatcaccgtcattgggatctgtcacaatggcgaactctggggcatttgtcacccagtcacctttgcacccgcgaattccccggcagtccgcaaaagcaattagtcgcaacagttcctaaaaatgtgtcattttcggccaaaataaatactgaattatttttgtgccacgaatatttttagctattttggtctaagcaaacaaaactcagcgggactttgtgctgagtatctcttcgaaaattaattagcagcgtaaaagcaagaaatgcaactgaaaaagaagccacagggggcaacagggggttaaagcgagcatcgtccttggccaaatactttccatgacagttgtcgagtcaatttaattagttagataccattcttgaatgcaaccatttcagagagctcaggagatttgtgtaaaataagtaaatattttgaaaaatattcttttcacttggtgcattggaaacaatactttcgactcttttaggaaaacgtctcttttttcatggcccacaaattattgctatagctcttataaatcacttcaatatacttttatatatcatgtacgccttttctttcagtgtgcaaaccaaagcaacgagtgtaattgccttcgaaatgcatgcatctaatttggccacatttaattcagctctgtaaacttttcaatttaaactttttttttttaatttttgggcaaatataccattgcataattcgtgttgtgtacacactttttccatttgcatcgtctcattttaacttttccctttgattcgccccgcctttttgccgaaatctcgcttctccccacccgcttagagcaaacatttgcataatttaagtttgatgttgaaagttacgtgtttgccagcgaaacgacaacaagctacctggctgagtgaaccgtgaactcaacggctcaatggctaaacaggtgcagcgcaggtgaatgagccacccacacacccactggcggaaaacgccacccaactgcaacattgtcgaatgaaaaattgagagcttagcgcatttgctagcaatgttgccagggaaaaccagctaaatcaggagcaaccttgtcgattcgcggctacaggtgtttgttgcttttgcacatggaaatgcatttaaatatatatatagcagagaagtgggtgcgtgggtgtttaaatcgtgtaaccccatggaaaacatttcgtatttttaacaatatatagcagactagtaactcagttttaaaatacttaagcaataagtgggaaaattagtttctaaattcgtgtccacaatcgtagatatatttggcacagcgaaagctggcgcttttggatctgcagtttgtgctgttgttcagtttttggtaatctgtctgattatttaacttgcgctaaatacaaatatttagaaaatattttgcggcaatttttatgttatttttcttggcagctcagctactcggatattttcccctttccaccgccaaaagaatgagggtcattaagatacatatacgccggacaaagtcttattgttttatactatatctatatggcgagcattattctttctaatttattccacttgggcttagaggcgcgtaaataatataaacttagtgctcactgaaaagttcgaactggtggagacaaagaagtggtcgataattggaatatttcgggaccttgaaggcgcacttttccaaataactcccaccttgcggactgcctcaattaatctgaaaatttgcaaaataaccggccggcaaagctaaaaataccaaacacacaaacaggcgaaaaacacaaaactaaacacattcgagcgcgttgagtgttgaacatttgtgcaaacagtgattaataaattttaggcatttgcatgataaaactacaaagaatgtcagaggaacagctgcttaaacttgaaaaaatgaatttgttttctcaaacgaaatagtcactgcttataggtgcgataaatctagaattttgtttaagattcgttacaatactattttccttggacttggacttttatacattttagtaatattaaatcaaattcaaatatatattcatatttcttgttctttttgcgtacttgattcgcataaaatgtagcagctccccattaaatcagctaattttccattaagcgcaaaacagcttccaatttaccagccatcaaattcataaattataaacatcgcctgcacgacgaataaatatctcaattaagaggcgggtgaatgtgaaacatgcctaaaatcgcaataaataaacaaaacagcaagaaaaaaaaaagaagaaattgtcgctaaagaaatttgcaccacaagcgaggcgaacaaagtgcagcgccatctgtgacacatgaagcaaattaagagcgccaaatgtccaaagacacaaaataaaaacccaatgcaaatgacgcccacgaaacaaactggacgaggcgacagtccgtcatttgataaattcgcatggaatgattttaattaaaaacctgtaaatctcatctcgccggcggaatgcagaataccgaaaacacaacattctgcggaccgcgtaataaagttgtcaaatattcccagacaactcgaatatgtgcataattatgatggatgtgcgtgcgacattcgccaattgatgactgctgttcgcctttgttctaaaatgctgttcattcagctccccccatttggacattaatcatttttgtttatgccaaatacaaattcaaattcaaaaagccgacaagaagggcagctcagcagaaagcaatgctgctgcctgttccattggcaatttattagcatttaatttatttattacgcctgctttcgtgcactttcactgctgtgacaaatcaattaatttgcatttctttggaatgaggtagcaaaaaaactagcaataaatcgaatttcacataatattctcgacaggcaaaatggttttataaatgctagttgatagcttttaatttgaaatcaaacagcttagtgccaggacttttcaacgaaagctaaataaatgtttcatgaattgaataacaacaaactttataataaataaaaattgtttttttctttcattcgaagtcccattcgattatttctgaagttaatcatcagattcggaatggcctcttcaacacgcccaccaaactgccagaattctctaccgatctctataaaatatatatatatctatatatatatatatctagagtatatatagtgtggcgcatacttagtgccacctttaggcagcgtcaaaggtaaaaacttggagcttctcagggaaaacgtgaaatgggaacgccacaaatctccgtccgaaaatagatgggcacaaaagaatgggacagacaggcggatggatttgagttgacttctctgccggcggcaggcgaaaagttggtaacaaaaagtagaagtaaaagtgtaaaagtttattgaggcattccgtctaagctgatttgttgtccagctgcccgggctttttcactcgtgtctatctctattcgatggaactttttcaggcattgcacaagggcaacagttgtcagctgcttcgctgctccaaatatttacatggaatgtgtgtagccggattttcccccctgggaattcatgtgtgtgtgtgcgtaaaaattttccacaccggacggcgtaaatcaaaagacggcgcagcccttcggatgtctccgctttcccgactgcatttccctttgaaggcaactgtcaaaggtattcgaccagattttcggcaagattttcaagtatgcgggagaattttgcagcgaggatcccttcttgcattccccaaaaatgagtgcaaacctatcaacttgggtctttaaagagtccatcaaatggattgagcatcaaaagcgaatatatatatttcattagttaccttcttacaaatgataacttcttgaagcggttttcacatgaaaaactcaaaaccaaaaagactatttcgttttaaatccaagctctttggccgcaaggcctcgtcgtttgttgacacttttctttatttttattttcatttcgcatttgttttgcgtttgaagttatttacatgtgtcgccgcctgacaattgacgatgctgtcccttttcgctcagttttcctctttttccctgctattatttattttttagcccccctgcgagcataaaatgccagcggttatgcgacacactcagctagtcggcagttttttgccttcgtttttatcaaatgttcaaaatttgttgtcaacatgttgcgactgattgtaaaagtcgctctcgctccctcttagctgttccgtctctttctctctgattgtactcgccgtctcgctctaactggcaagtcagtttcagctgaacaaatcgattgattgatttctcaggtgtgtttgattgcgctgacaatgacaacgataaagatcccgcgacacgaaagaatggcaattcagctcagacagagctaaagtttaggtttttacaaacaagctatcctatcctcagttgatactgatttcatatctaaatctaacaacccaataaagattatttcattactatctgttcataaataaagtacatcatatggtaactgatataactttatctctgcattgccatttaattaattatttggcttttaaacaatctgaaatcagtgtcacgttctggcactcatttgattcgcatcactaactgaaagctggattggtgggcgaaacacggtttagttttgtgtaacgccattttacttttatgagcttcgcaagcgatactccatacgaccacccccatgtatccatgtctgcgtgcatgagtatctgtgtgcgtgcgtgtatctcttagtttggcgcttggattgggattgggttggtgggtgtgtttgcatttggcggctaacagcggtttgattgaaacgctgattgttggagcgtagcaaatatttacaaatgtaaaccagggggaaaaaaaaaacaactaagccgcacaaaataaaattgaattgttgcattcataaacagcatacatttgggtttatagagttttgctgagaatctctctctgcctgcactttaggtaaatctgataatagagaaatgttttctttacttcatgcagcagagccgcaagatcgatgagcaattcgcgacctaaaacctaaatacggtgctattttcgccaatgctcatttaggtacgcagaaaatgcgcttgatctatgctgatccgatccgattcgatgccatccacatccacgtccacgtccacatccacatccccttcgattctcgatgtggtcagccgcagatgtatagaaagcaatgccaaataaagattcaactagagaaggacttttgcggctggcctgtagcctgtaaattaattacatttgggcaaggggaagccgaaaaaacaacaattttccaagcaaaaccaaactaaagccgaaaacaaaacgaaacagaagacaaaacacacacacacacacacaggggaaagggaaattcaagggagggacgtgcagaagtcacaggcaaaataataaaaacagcaaataaaactctcgtctgacgtttggtttttgcattttttatgcagacccagctagaataaagtagaaaattatccaacagacgacccgagtcctaaataaacaagaccaaaaactgcacggacatggagcccgtagtgcctctgctattttccgacataagcggacaagttaagtttcgaaattattcggccagaccagggaaaatgcattagaatctgcttttcatgcatgcagaaaaaggaaaaaaaaaaagaaatgggaaaagccatggggaaaaaataaagtcaagcagagacgacggcgtcgacaagatgcgtgccaagttatttgccttgcagccgcattatttggtcttatttggtctaaaaaacgtgcagcaggcctattgccattgctctgggctcagagagtctgacaatgcttaggatccccgattcccgatctccgatccccaatccccaatctcaaatccgactgacagttggctcgtgtcgataaaatgctgccgcggcggcttaagtgccatctattttcgtttggccgccggacgttgcaaacaacgcctctgccacattgctatgtcagttcaacgtgtgcagcataaattcaaattgaggaacgtaaaaaagtaagcaaccacaagaagcacataacttttggtagtttggcacttggagggtcaacttgcataaatgccatttaagtagcactaatctgttgcatactcaactgcaaattaattatgggattttttggaataacagatacattactttcaaacttgttgaaacttatttgccgactgtttatgattgcttgacattcacaaaagtcacattctacagtgaatctttgaatcttggaatatttaaattcattcagaactcatcaataaaaacttttcatattttaagtggccaaaacaaactttatttctcagcaaaatgaattcctacacttctattaccaatccaagtccatttgtggcgtacatcatacgttttagatgcttcgaaatgtttacaataaatgtatatcctggcaattacttggcaaacttttccacttttcaacaatctttttcgaatagggccaaaccggcacacataacagacagtttaaaatcgaattactcacataatttatatgcacagcctcgaacaagaagaagctcgcagtggatggcagcgggggaaggggaaaggctcaggcatccagaagatatggaaaatccgagctaatgcaaaacttttacagaacgccctcgcactttcacctcccaaccgaacggtaccaccctcccaccccgcttttccaattcccgcgtgtgtttgtttgtttgtttgttgttgctgcccgcccgttcgcccatacaatatttgtccttcatttgaaagtcaaatgcgtgtgaagcgaagaaatctgttgctttctcgaccaaccgactaaccgccctggggtctaaaaaaaaaaaaaaaacaaagtatataaaataaaaaaactcagcctccctcgccgcgaagacaacgaaattattttatagaaaggaatgaaacagccgagacaaaccagcggaatgtatgaaaaacacaacatacatataaaatgctgacaagcatataaaaaagcatacacacatatatagagtatactagagcatagtatagtatagtattagtattagtatggtaaagcagcgtcattgatataaaaactatggaccgacgggaaattcggttaaaaataaatgcaggcccatcaaaatttatggttatgatgtcgctggctctgttcgagcaattaacaaccacggcagggagcccgaaaaaaaataatttaaaccttcgaggtggaaaggttggaccccctcgaaggatacacaaatagtactgatatttatattcacagatacactgaaaataaagtgggatatacattgcttctacttccctacgacattcatcaaatgcggagtttctaatctaatctatttctatatagatatttaagtcagttgtgctgtttcactgaacagaatgccaacagttgcggctaataaaactagcagaacaagaaaacatgctaaacgtttaatctgtgactaatgaaccgcctgcaatggcagccaaatatttaagttaacaatacgcagcataaacataaacaattccgatgggaaatgcgcaactgaaaccaataaaaaagtcagcccaaaatcagacagatcacgaactaaacaatagtggaattgaggaggaacagaaatcgggggaggaaaaacaaatttatgcaaatcaacaaatttccactaattgtgggcagaaactagatggcggaggttattggccaggcccatcaattaggcccaaaagcacaagatggccaggccatatctatcggaatggggcattaacatgtgatttggctgaaaagtgttaattgccatttgattgtttcgccttcgcactggcggcccaaacatcgcaatttatgcaaaatctttgtaaaatattgggccacgtctgcgtttacattttcattatggtgtccatatttcttccctttttttttccttccaccataaaattgggacacagcttcttcgcgggctaatggcaaaatattagctagatgtcaatgaactgaagtgtctgcatgtgtttcacaacaggagcaatatctgccccttatatcacaccagatatacatgtttattgggcgcaaagttcaacgttctgatgatattgttgaaaaaccaatttccagtgtgcgccaatgcagatttttctatattgaacataaagctcgaaatgaatctttcaaagtaaattatatttacaagaaattagcgataaaacacaagcaaaatatatataatttccagaggtctttatcatcttaaagtagccttcaaggttttcatccccagagatgggtaatttttcatggctcgcttttggcagacactttcacaataaacgctagaagttagcttgctaaataatctatgaaatggacccgaaaatggaaacctcaaagtgtattaccgccttcatgcacaacaattgactccccagagcaaaagccatcgcatgatactttcctcggcgacggcaacacatctgattacgtatacgcccggttggcagctttggcaaaaggccaaaaaccgactttgatgcgtttttaagttggctctttgagtgccaatttttgtctattttttgctggccaaacttttccattaccacatcaacaccactacactttgagccacggcacaggaagggccgaaagagaacaggacaggagctagtttttggggtcaagtcgacattaaaatagtttagggatttgtatttatgttgattgcattgtcgggccaactaactggcatgtgcatgggatttgtgggggaaattgaaaagttttgtgctgccagattccagagatttgcgccatgtcagcgagtgtaaaatgcaatttctttcgctgccacaaaaggacaataatggaatgaaaaggccaagctgcagttaaattgacactcctttcaataacattgttttatttaatcacacacctatatcatacatttgttttgcacatgcaaacatgtggcaaaaactatagtatgcattttcaaaattccccaaaaaaacaaagtcgctggtgcgaaaaactgtctgccacagttgaaaagtgcgaaagagtcaaacattaaattgacccccaaccaagagcaaatattgcagcaaacaaaaatgtcaaaaagagaactcgaatcgtgcaacatgcacctgtttcaacttcaattcgcgtcgtttctatttttatatatggcccgcagcgtctggtctttatttcttcccggcgttttagctctttcgattccctttttgccattctgccatttttccattattttttttttttctttgcctgacccacattgacaatattcatgtttattaatatgcatctgacaactccgcccagctgttgttgtttgttcagcggaaatgaagttatccgacttgccggcattaattgcccgctgcacgagcggcaactactctaattaaagatacataactgcatagctgcataaagatacgaagctgcataagcaggcagtaattgttcgcaaagtgaactaattggcatttaaaggatattagccaggctactttgagttgagaaggagaattttgcacctttagtcatacggtgtacttgaaaaggatttaaagatttcaataaaataaatgtgtgtaatatattataaattatttccttcaaagcaaccaagagcatgtatctttttcataattacttaactgattgttagcaataaacggtagcaataaacggtactgctgcactgccagcaaaacaaaacgaaaacgtaaacaaaaaagctgggtcgacctggcagactggaatggaccgctacattacaataaagcgaaagctcagccctgaaaattcagatttgggaaacaagccgaaaaatacacgcggataactctaccttgatcaaaaatgtagcccctgcaaataccaacagatttgccttgctggtagataccgctgaggacgtgccgctgggatccgttgatatcgaaccgaagaaaacaaagcctccgccaatatacatccgcgagaagagcacaagccgtcttgtaaatactttgattggccttattgggaaagatagctttcatataactcccctcgtaagaggttctatcaacgaaatcaaacttcagacgaaaacggaggacgactacagaaaagtcacaaactattttaccgcacaaaaaataggcttctacacctaccagcttaaaagcagcaagggcctgcaagtagtcctgaagggcattgagtctgatgttacgcccgaagagataactgaggcgctaaaggaaaagggattttacgccaaaaacgtgttcaatatcaaaaacagaaacaggcagccccaaccactcttcaagattgagcttgaaccagaaaacaagcctcctagaaaaaacgaggttcacccaatttacaaactccagctccttttgcaccgtaggatcacggtagaagagcctgcacaaacgcaacgctcctgtacaatgtacaaactgccaagagtatggccacacgaggtcatattgtacacttcgcccggtgtgcgtagtctgtggagatctccacgactccaaacagtgtcaaattaacaaagaaaatgcatgcgagaaaaaatgtaataacctgcgggggcaatcacacagcaaactacagaggctgtccaatctacaaagagctgaaaatccgtcttcacaaaagaatgaacaccggcgcgggcacaccaaggatcaagctccctgataccatcagagacaaatcctgaagtaattttctcgaaagcagctagtttcgctccctggcctacattcaacactaacaagacaacatttgctaacgttttaaaatcaggtatgacgccttcaacccaaaactcccgaactccacatgaagtgcacacaaaattagacacacaacaaaactatcaccccagctgcgcagcaggaaacaaaaactgaagctatgatgcaagccttacaacagagcatgatggaatttatgacatttatgaagaccaccattcaagacatgatgcgtaatcaaaaccttttgatacaaatgcttgtagcccaacaatcaaataaataatggctaccttacgcatagctacgtggaacgccaatgggcgtttcacagcgcaaacttgagctagctcaattcctacatgagaagcatattcgacggtaatgcttctttcggaaactcatctcacaagcaaatacaattttcaaataagagactccatttctacggtacaaatcatcccgcggaaaagcacacggtggaccgcccatactcataaggaaccgatgaagcaccactttacaaagaatttgcggaaaatcatcttcaggcccatctatcaacattcagctggatgacaacactctccttacactagcggccgtatactgcccccccccgtttacagtattagaagctcaattcctggatttcttccaagcactagggccacacttcattgcagcaggcgactacaacgctaacatactcacttggggatcgcgacttgtgaacccaaaaggaaaacagctttataagacgataataaaagccactaataaacttgaccatgtttcccccgggagtcctacatactgggccatcagacctcaataagctgccagacctgatcgacttcgcagttaccgaaaaatatttcccgcagtttggttaaagctgaatgtctgccggatctctcatctgatcactcgcctgtactaattcacctccgccgatacgcagaaaacgtgaaaccaccaaccagactgacctctagcaaaacaaactggctaggtataaaaaatatataagttcacatattgagctaagcccaaaactcaatactgaatctgatatagagagctgcaccgtgtgcattgcaatccatccttactgcagcagctcttactgcaacacccaaaataacaaataatacaattaattcaaaaaagaccaacgtacaaatcgagcaactcggtccacgtaaaacgtcgcttcgcagagaatggaatcttccagatccccaactgcaaacaaaagctaaaagtagcccacggaaactggccaacggctctgaaacaagaagaggacgacgatcagcgccgatacatagagcaactcacaccaacaggcacaaaacaaaagtcactgtggcgagcccactcaactcttcgcccaccgactgaaacccgttttgccgataaggaattcatcaggggctgggcccgtagtgatgaagacagagccaacacatttgccggctcacctacaaaatgtgttcacggccaaaccaggctactagcacattcgcgctaccgtcctatcccgtaaaccgccatcagcaacacaccccaatttgtgtttcgtcctaaagaaataactaaaataatcaaagacaatctcagcccgaaaaaatcccccggctacgaccttatacaccggaaatgatcatccaggctgccacattctgcagttcgctacataaccaagctctttaatgccatcaccaaacttggtacttccacaacgatggaagatgatgaagatcataatgattccaaagcctggtaagaaccacacagtcgcttcatcttacagaccaataagtctactctcatgcatttcgaaactatttcgaaaaatgcctgctgatccgacttaatcaacatctgatataccacaatataatcccagcccaccaatttggatttcgcgaaagccacggaaccattgaacaggtgaatcgtattacaacggaaataagaactgcatttgaatatcgcgaatactgtacagcagtatttttagacggtatcccaagcattcgacaaagtctggctcgacggcctaatgtttaaaattaaaacatccctacccgaaagcacacacaaacttctaaagtcttacctctatgacagaaagtttgcagtgcgggtgcaacactgccacttccactgttcatacaattgaggctggagtccccaaggcagcagttcttgggccaaccttatacctcatctatacagccgacatccctacaaatagtcgcttaacggtatccacatttgccgacgatacagctatccttagccgttcaaggtcccctatccaagctacagcacagttggcactgtacctcatcgacattgagaagtggctctctgactggcgaataaaagtaaacgagcaaaaatgcaagcacgtgacgtttacgctaaacagacaagactgtcctccgctcttgttgaacagcatacccactcccgaagcagacgaggtaacggtaccttaggagtacacctagacagaagactcacatggcgcaggcacattgaagccaaaaaaacccaacttaaactcaaagccaacaacttacactggctcatcaactctggttctccgctcagcctagatcacaaggtcttgctctacaattctatattgaaaccaatctggacctatggctcacagttatggggcaatgccagcaacagcaatattgacatcattcagcgagcacaatcaaagattctgagaaccatcactggggcaccgtggtacgttcggagtgaaaacatccaaagagacttaaatatcccatcagttaccaacgcaatcaccggaacttaaggaaaaataccatagcaagcttcacacgcaccccaaccacctagcgcgaggtctaatccagctcagcagccgttcccgtctccggcgaaaggacctaccaacccagcgaataaattattagggccgtttaaacatagaacagttggaaaaataatacaactgttcaaaaaatacttgttatagttaagatttttaaacttattgttagttcttatacaagaagattcaataaataaaagcaaagttaaaaaaaaaaaaaaaaaaaaaaaaaaatgtatctttttcataattacttaactgattgttacgccttatgtgaaaaatcccagcctaatttcgaacacatttcacgtagattttcgtggatccctgactaattagccactcggatcacgcttctgacaaatccttttcgaatcagtttctttttctggaagacccatctactagtcatctatcgctcagcagtcccatccgtcggccaatttatctatatcggagcggcattataaatacaatgaccacacttcttgacatgccatggtcaaatttttgtgcatttgtcaaagcgaaaataaatcacaaaacgccaaacaaacaaaacgcaacgcaaatgacaatttcgtttggttttcggtttttttttttttcattttattgttttttttttttctttttttttgcctcgacaattgcgttgcgtgtttggacgcttttgtttaagagaagtgttcgtttatgcactcgaaagcaattggggaatctgacatagttttcgctcaggcagaaagtcaagtcagaaagacagcctgggatatagatgccatatagatatagacgcgattccgttgacagcataaaaagcgctgctaaaaaagcgaattatatgcaaaaagcaaatttcatgccacatttaaaatagccaacgcaatgttttgtaatttatcaacgcccgcccgcaccagatatcgcatatatatgtatattccacatattatacagtatacatatagtatagtagtatttgctgtggcaggcgtgtgactgctgctactacgatgttgcaacgcaatgcaatggccacggcgcagcaaaatgcagacatttcttgacacttctctaaatagttttgcgtgcgacgcagcagaatcggcgaccagggaaaaccaaggaaaatgcgaggaaactcgcagggaaatgcggcacggatggggtgtaggtaaaacgcacacggtcactcgagtgccaaaatgtccccgcacgccattaaaaacgttgcgaaaattacacagcaaactgaaaggtgttctaatgaggcgtgcgccggactctgttccgaaatgtgtgtattttcgtgggtgttttcgggctaaatgggcctggttggggatgccatttgcaagagtgttgcacgagtgagctctccatcccccacacacacacacaagataatcatgaaagtttagccaaagtttatggactggaaatcagccaaaatgggtatgtcctgaaaataacatttacatttcctggcacagaaaactgcaatgaactgcattcagttatctgcagaaggtaagtgccactacactccattcacctaaatcacttgcagcaacctactcgagttttcccaaccatctttcgttcttcgcccagccattggcctcgattttaatgctgcaattttcattgaaatgagttcaaaatcaaggccgccgccgccatcgcgtcccgatttcggccataatggtcatgctacatcatcccggtctcgataaacttgggtcttgaactcgaccctagcgatatgccatgaatacaaattgttgcatttacaataaaaaattcatgggattccatttcaataagcgaaacgggcgaataaatgcagtcggggcaaggcgaatcagtttattaaataaaagccaatgcgaaacatgaagaatgacctttgcaaagacagacgcacgcttctcgcatgaaaacttcactaaattaccgggcaaaatattcgccaataagccagaaggggaatttaacgatacaaagataaaggggcgacgaggagccaggtaatttgtttatccagcgaaaggaacacctgcagattgccagctcgagatcccagagacaagtcccccttcctccactcaacacacttctctgtattttccacatttttcccgattctattgtgagattggaatgcagtagtttccagtggcaatagcaaattattgctgtctttcagggaaaatgagtaaaagcaccagaggaaaagcgctacttatgcaaatggaacgaatgtttattcagactggccttggattgttgctgctgataagcttagctacttagataacttatatctaatatatataattaaatatcatataattgagaaagtgtttaacgttctgttatgtgatcatcaaagttcgtaaatatttcatactgatttcaatatctaatacgcccacttgtaggcctaatacccattgtgaattattcagacagatgtacatatgtatgtagcattgcgcccgcccctttaaaaaccacccacccccacctgttttccacccccgcacacgcccacacattgtttatttgcacaaatgcgtgcgctttcgtttttcgaattttccaacgaatttcttggccggccaaattgcaaaacgaggtaaaactggacaatgtgggctatatagcgctgccatacgctgcggatttacatatatatccacgaaaaactgcctgttgctgttgttgtttaggtttcccattcgagaacatgtgtctgcaacatgcaaaagtaatgcacattgagtaaagcgggggaggtgaaactgtaatccttttctagctctactatgcacgcgaaattgttaatttagtacgagtatacttaataattgtcttaaagtatgatctcatcttaagggaattatatgactaatgtaagttctgttttttttccttaaaaaaaaccaacgatcgattctcctctcttactttgtaccgcgtacatgaattttgactttgactggacgctgccatttaatgtgtgtaaacattgcgcaagctggaaacaacaacaaaaccagccagagaagcaggagtaataaatttatacacattcatacgccccgttgtacacgctcgcccaaaacatagaagacgccagaaagtgaggcaaaatgtggtcgaaagtgggacggaggatccgaactctggctgattcagaaaacaaacgaaatttgactacaaaaatgggcaaaatgcaaatacacacagtcggccacaattccatgtgtgcgtttggctttttcggcaattttgcggcatgtttttcacacattggcgcgctgtggggaaaactgaggaaaaacaatcgaacacgacgctgtggctgccatggaatatcaatattcatactcgtattcgtgtagtcgtgtattcatattcctattcattcccttcgatacgatataacatagcaaagatgatgatgatgatgcaagtgcaaatttatttgccactttgtttgcggctcgccgagttgtaagtgaaatttttgaatttttgccattgggcggctggctggaaaagcctccaagttgattgattttccaattgcaaactgagtgcttttgggttagtagttttggggccacacggagagaaatcgaattaagtttatagatgaaaattttatggattatttctattaaaaataataatagaaatttcattgaatttattaagtttttacagaccaaaaagcatgtatgtacatatatagttataattatagatattattaacaaacaattactaacattttttcgccgtgcaacaaacagttcaatgagctttggcagttcgatcaacgattgatccccaaattcttcggctgaacaacctaaaatgaaaatttccccctttttgaattcacagttcagcacgattttccgcacccccccaaaagagagcaacaatcgaatgagatgtcaggaatgcccggacaaagggaattcaatgggtggcaaggggtagctgcagcaaaaggcgactgtaaatagccccagcgatactcattttaaagtgtttaggagcgctcacacgcagaaaacacaaaatgacaacaccttgtgccccagtcagcactaaaaattacattgaaaatggtcgtaaaaaccggggaaaataaaaagaaaagcagactggaaagggacagcattcgtctgtggatgtctcgtttttctttttcattaaattacatgttattctggctttggtcgcacggctcagctaattttgtcgagcaggctgcctgcccagcccacctcgtttatcatgtaaataaaaaagccataaacgaaaaaaccaaaattaaattttatccaacattctgttgcagttgtctaatcacagccatcagattcactatatatcacaaggaataaaaatatatatatatatgcgcgcgatatattgaaagagtgtcaaggcttggaaaattttacgttccgattagccgcaagaaatggaatttttttcctcttctcagctatttgtaaacaagattgcattgttgtaaacaagtcgtttatatggccaagatgatttggcttagcctgttgttcgcttgttttttagtttgattaattctgggtattagagtaatttatttatttttaaacgcttcacgcgaaagtttattttttgtgagtttcaacaagtgttatcatggatttttggcctattcgaagataaaaggagttttctttgaagggttgcatgggatttgagatcgaaactattagaaatattatcggaaagcatatttatttattgatttcataaatattgcataaaagtttatttgttgtttattttaaaagattttccttctgtttcaaaaggcattcggttacgaaagatcgcttcctatatgagttgcatattcccatttgtctatatcaaatattttccgtacgattttcgattctgcgactgcgttttctggggttcgcccacgctttgtttaactttagcacatatgctgggttcctcgttacattatatattcatacaatgtctgcatttgttgacaacattttacaatgctttatttttaacagctcgttagctacagcggagaagggctgggggtggtgggtggcggtgggatgttttgggggcggggacggtgggctggtcagtttgacattgagcgcgtgccaagcagaaaacgcacggccaaaaggcagcaaaaacgaattaaaaaaaaaaaaaacagcctcccctcattagggacaacacttttgcctaatttaactaaactaactaaaatgcatctcagaggttttttaaagtattaaattattgtacgaatacaatcacattcgacccaattattttaagaaattaaactcaacgcaacataacgatttttagaaatatacaagtggataatatatataatttcaattggaacaaacaaaccatttatttctgttagcgatttactaaatagcgaataacgaaattttaatctggcttaatttgccacagtagccacaaaatatagaatatagaatacaagcaagtggtaaagttaaaggaaaaactaattaaattagttcactgagcgaaatattttgacatttccggtcacattttaatgttgtcaaaatcccggcaaaagtccatttttccccagctaatctcgaggcctatttttttgcagccgctggcgttggctgtcatgattttccactactgccgaaaaattttaagtagacccgtcagctttgttccaatttgactttggtagcaggaaaaactaagtgcccggcaattgctgccgcagggcaaaagagcaacaaaaattaaaacaaacaaatggagagcaaagttaatgtcagtcaagtggcgggggaagcagggagcgcgcagggggatgggtggcaaatcaagcataaatctttcaattgtgtttggattttgggccggagttaatagccaagaacagcggcggcggaatcggttaacgaacccgctgcactgcacttttccggccattgtttatgtagaacggtggtggataggtggatatctggatattcggataggctggataggttggatgtaagatctaggcataccctcacaatgtttgcaacattttgctggtggctcatcgctggcggcgtcggcaatgaccggcatggtccccgcgaaccactcgaaccactggagcccggtggtgcagtcctttcggagattcttctcggatcgtgcttggctcgatggtcggcgctgatcggcgggcaattagaggagacacatcctgcggtttcggcactaggaacactcgcgcgacacaaccacctgctgtcaggaatctatggtttctctctctcgaactctcaatctcgatcgatcgataatcttttaacagcggtttcagcaatggaatgttggcattttcgtaacacttcgtaacttaggctaaacactttaagatcagttagatcggttagatcgggcgtaagatcctctctcggttcgctatagtccgctactgacggtgctaatcgttctgctgtctgtcgtctgtgtgggacgtcacgccaggctatttctagtcttttttggctttcacattgcgcttttccgtgaaaatcgtctgttttcgttcgagagacgttcaaacgtgaaacctccgcagagaccactgagtgtagatattccgggcgcacgccgatctgctcccatttcgaataccgaattcgaaatcttcaaaattttcgaacgactctccgccgcagaagcagcggctcgccaatgttagataatttggctttttcaccatttttcctcaatgaaacaatgaactttcacatttcctacacgaacaacaaccgattcgtcgagctgctcgctcttttactctccgcatttcgaaaacgctttttcgaaaatagaactcaagatcctctcgccggagagtccggcgatcggcgatcggcgcacggctcttaatttcgaaaagttttcttctaagttttcggtctactttcccgagcaccctacactaaggagagttgctcactgggtcgggcatttgaggtcctacgatcgtttgggatcggttcctaagtgggtttgtgggtcaaggcgcctgcctgcacttagtccaatcatcttcgggtgggttcggtttcggggaaatgcgccaaggtcccccaaaggttgaaattgattggtggcgaatccttggctgtcaccatatagcaattaatggtcttttaagtgatacctagtatataatttttaccaaataggattatatgaacatgactcagattttttgtactcatagtcccattatccccaaaactagttaggcagtcagcaaatatagccccttaaagttcaaagcatcttaacccaatcagtcctcctatctgaatatagcctgtacactttaagtatattttatttacgactgacttcataaaatatatttccccatttcattttccagtccccaacccccagcaccttctatttatgccccaagccccatcccctttcgcaaggagcaacaaaaagatatgccaagtgaaaaatgcgaaaaaaatcatatttattatttggccagcatccaaagcagagatcttaactgcaaaaatcctttgcaaacatttcgacgaccttgaaaagcaacgtctctgaaataactttcgccagatcgcagcataattttttgccaataaacaaattcacaaattgggcaattggacgtgggggaatcgattccagccataaaatataatttatgattcgttcagaatctaaacacataccgagctgcgaattgatttcaaaatcaattggccaaaagtttcagtgaaaaaaccacctgcatgactaatccccgatcagtatccccatcgaatttgctctttcgattgatttgcggccgaggaatgcaggcgagtgaaaatcaaagtaaatcgcagatttaaatttagaacgcctcaactaattgggttaaatatagcgcccatatatatatttcttattattcgcaaatagaaatatacgcttaaaagtataacattaaagcacataccgaaagcagcaactaaaaataataaaattgactcagctctgattttcgctgtcgttcgttttgatttagcgacacaaaattcttgcttcgcccgactgacaagtgcagaatttagttgggaatcatttctcaaatttatggccaaattgggcgcaaacgtcaaaaggcttttcattttcagagccccggggaaaatcgcgcgaatgggcggcggatcaccaggcatcatcttcgattgtgtcatggttgtgggcgtgttgttttatgacgcctttagtcacacaactattaccagccccccctttaatacagtggataccagcatatcatggacattgttgttgagctattatacgtaacattatttagtcacttaattagtacttgaatagcaaaaacatcttagtaagaatttttaaataaattttttttaattttcgaatactttgtatttgagtttttggccactgtatctatggcaaaatctttttcggtttaaagcgttcgattcctcgctcttgcattggaaacttgtcgtaaacaaagtgaagcgtatttcatgcgaaaatatcgcccatgtgagttttccatttgcggcgattgcacaatttccacactttccatgctgcaagtgcaatgccagggccaaacgaagtgcaccgaaaaaaaagggaatttattggcgaatttcggcgtttgcacacttttatggtgcacatgctagaagcataaaaagatacatgcacatccattcgaatctaattgttgccgcagtcaagcacctcgtccagggtcacagacaaatagttggcacctgagttatgagtgggacgacttttatggcccactgtgcaccaagaactcccctctaccaccccacacacactcacttttggatcgccttaatgcagctttgcttatttatttctcgatttttgtgcataaattattagcgggtagcataaaaagtatgggaacacggcagcaagacaaacacaaatcgagcgcgtcagaattttcggcgtgggcgaaaaaagtctttctccctttttttccggggcaggagcagcggcgggaatttggaaaacatttttcaccatgcgaaagttttgctgcttttactttgacgtcgtttcataatgacgaaacggcacagcgagcatttagttttaaagcagctataaacaaaaatgattcgaaacagcgggaaacttcaagagatttccattatttcctttactttttttttcgtttttaccaaatatttagattataattattaatgaaaaccattcttaactgcaatttattttatttagtaatgttatatacaaataataacatcatatttctcaagtgataattaaatatatttttcctaagggatctattaaaatgaaaaaatactttttaaactgcctatttcgtcgcctgatttcaaaatctgcgataatttatgtgattacttaaatgagaaatgttagatcggtaaaaagaaaaacaaaaactatgccaagaacatataattggtctgaaaaaacactgaaatctcaaatctgttttccacactgcctgcgaaaaatgagcgatcactttcgtagccggcacatagcaacaggtagcgggtacaaacttttgacagacactgtgcggtgacaacgagataaaataaataaaaaagaaacaaacaaaaaataataaatggatgcctgacaccacgaagcacacccgctgcaataaataaatatttaaatcggccaataataatgttacaaaacactcataaatatgtgtaaagataccgtattaaatatgtaagttatttaaaattgtttgagtattttctctctactgataatgttcagagatatccctcgggtcattgcattttggatgctgaattatacaaagaatgaattaagttacatgcactctaatctcttatcttgagttgtgtatttttatcagttttatagttacatactaatatgtatgtattgatgtacgtatgtatgtgcatatctcaccaaacacttttatcgttgccgggtaattcatttacagaattactggatctaatgccttttgcccacgaaactgactcagtagaaatagaaataataaaaaacaataataaatttgtgaggcacagtacagtcagcccacctataaaattcactgcattcatgcgagagaccactgtataaaaaatttttaaatttcgcgttatatgttatactgtacgctacagatttctttatttagttcaatatttatttccaatcataaaacgtaagttaaggagagcgaatattccaattggaaaaagggcgtcgcagtctcgagcaaaagaagacaacaaaagccgtcgaaacgccggcaaaacaaagacgcgaagcagcggcacaaagcggagtagcgaaaaccgacgaagaggagccattgagagatgggaaaacttgcgaatctctggctaaaagcgaattaaaagcaccagatagatatacataaatgcaattaaataaagggggcctacatgagaattgcagcaaaaatcaaatttggacgggaatctcacgcacatcacacgcactaaactcgcacacacgctcatttatataaataaacaaaaaagaagcagaaaaaatagcaaaattacctcagcgcacgttgctgttgttgttgccgtggttgtgtgtgtgtgtgtgtgtgttgtagttgttgctggtatcttttatatatattgttattgttgctgcagctgctgaaatcgcagcgaatatcgcgacacgtagacggccaacgttaaagccaagaacttattgtacatcggagaggcgttgtcggcgcggggcgaacttaagtcggttgttaaatattattttaacaaagtttttaacaaatacgcgacgtttttagagctggtacaagaatcgatgtttaactgaaactatcgataagccaacagcttagtactgatttggggtgaccagattcaatgcaattttgaatcaatgacgattgacaatcgatagcactttaagcaaatacaagagtaggtacaaagttaggcaaattaaaaccataaacatatattaaactgcatatgaaaaagtaaaaccatatccattaatcaattttagatgaataatttaaagactttggcggtgagacagatttttggacattgccaaaccgaaccacaccgtttattgcctttataaatcagtattcttttaaaaaacctcattattaagaagtgcaatggatctaacacacgcatcgcaatttttaaaaacaaaaaataaatacatattccttaatgttgtcgaaatcagttgtaaagtaaacttccacatacctgtcatctagctagattcgacagcactgccgcattaatcgaaaccgataggagctctcatcaagtagcaaccctatagagacgccgggacttggtgtaaagaaaaaacgaaaaagatttgtctttttaagcgccgcaaagaatccggaaaaacgtgaatataccaccgaaaacggatctccggtaagttgaaaatgactgggattaggttgtgcgtacaatggaataactgaaaatgcccacaatgtgacccgcaggctgaaacccctacgtgtagcgcaggaaaacgaggaacaccacgaaccaagatgtcggacatctccagcgaggacctgcgtcgtgaaattcaggcggttctgaaggacgccgatttggcgaccatttcggcaaagagggtgcgcgagcaggtggagggaaagctgaactgctcgttgctgagccgcaagaaggagttcgacaagatcgtgatggaggtgatcaacgagcagcaggacgaggaggacgaagacgatgacgagggc

SEQ ID NO: 36755 - DNA, 1342 bp, DROSOPHILA
ataatatttaacaaccgacttaagttcgccccgcgccgacaacgcctctccgatgtacaataagttcttggctttaacgttggccgtctacgtgtcgcgatattcgctgcgatttcagcagctgcagcaacaataacaatatatataaaagataccagcaacaactacaacacacacacacacacacacaaccacggcaacaacaacagcaacgtgcgctgagatgcatccgcttgccaagattttcggcgcaatttcgccactcgcagttcgccagttcgcattactgtcgccaccagttacgaagtcgacgcaaagcgtggacggcggacctgcatcgtggcgtttaacgctcgatcaggatctaattgacacgctcaagggcaactttcccagctggttccagggctcagccggcggaggaggaggagcaggaggagcagccagcaagcagaatccgcagcagcacaatcaccagctggcccagcagaagcatcaccagctggtggccaccagtgtcatacccataaccattgacacgaagctcgccgccagcaatacaaatacactccagcaacatcagcagcagacggccatcctgggccacagttcgtcgtcagcatcgcccgcatcctccgtcagttccaactcgtcgaagaagtccatcagcagcagcctgagcagctgcagcagcagcagtagcaacagcagcagttgcggcagcaaccattgcaactccaagtccgtttccagtggagccaagggagccggttcagcgacggcgagcaggttcctcaacaaatccacctcgacgtcgcccaccaagagcctttcgaggactttaaaggccacccagaagccgaacggcaaccacaaggttggccagctggtcaaatccgcctccctgcacagcctgagcagcggaagcagcgggagcagcagcggaaacagcgccagcggcagctcctcgctgctggccaccatctccacgtcgccactgaccaccgtcgagctcatctcgagcgccgcctgcagtggcctcctggccaccaggctcagcggcaaggatttggagcactcctttcaggacataatattgctgcacgaggcctacgacgacatgtcggagggtgagcagcgtttgcatgcgacgttcctgggcagcagcgatgatggcaacaactcggattgttacgatgccagacagtcaccaccaaaggccatcgtggactccagtccgctgcagccagcgatggacaagaataaggaatccatagcagccgagctgccgagctgcgatgcccatcacagcgatcatcggtcgccagagtcatcatcataa

SEQ ID NO: 36756 - protein, 372 aa, DROSOPHILA
MHPLAKIFGAISPLAVRQFALLSPPVTKSTQSVDGGPASWRLTLDQDLIDTLKGNFPSWFQGSAGGGGGAGGAASKQNPQQHNHQLAQQKHHQLVATSVIPITIDTKLAASNTNTLQQHQQQTAILGHSSSSASPASSVSSNSSKKSISSSLSSCSSSSSNSSSCGSNHCNSKSVSSGAKGAGSATASRFLNKSTSTSPTKSLSRTLKATQKPNGNHKVGQLVKSASLHSLSSGSSGSSSGNSASGSSSLLATISTSPLTTVELISSAACSGLLATRLSGKDLEHSFQDIILLHEAYDDMSEGEQRLHATFLGSSDDGNNSDCYDARQSPPKAIVDSSPLQPAMDKNKESIAAELPSCDAHHSDHRSPESSS

SEQ ID NO: 36757 - DNA, 2384 bp, DROSOPHILA
atgcaaatgatgccccaagcaacagttgataaagcagccaaaagaacgcagaaaaaaagactccacagaaagcagaaagttacgagtcagccgctcacaaaaggttgacgacaccagcaaggatgcggtggcaaggacctttttatatattttttttattttgggttgactgactctcaaggatgttcgagcaacagtgttgtgtcgccggccaaaaagggtcaagtgccccggcgcgtggcggaaggacgagccacaggacgagaacttcgtgcggacggcaaggacatcaacccggaaaagggttaaattaagcccaaagccctttttattattagacgaaggcgtgctgcccgctttttgagcgtactttcacggtctttcgccgaccttgacccacaacgaacgccgcaaccttgacattggatcgctctgctttccctgtgctcctttgcctcttttttatttatttcattttggcctttcccccagccctcttggcttggatttcaatgaaggtgccgcaggcgtgtcccgttcggaacagcaacagccacagtggcagtggcagcaacagttgcgtggccgctttcagcgctttcattgttcgacttaagacccacacgggatctaccgcccgcccgtccgtccgtctctttggtctttcataaacggaaaaacgagccggagagcgggcaggagcaggggaagtgccatgccagaaggacaggagcgacagcaggacagagccaccgcagacaggttgccccggctcacgtgctgcgtgtgccaaaagtcgctctgtcgccgtctcctcttacagtttgggacaccagccaatgcactgagagtatttctaggaaatatatgaattttagaaaagggaaactaaataattaataaagaattattttgactactgcaatgtcattccatataaagattactaatctgtttaacatacgcgcttcatatttgcactttctttcggctatcatccctaagttcttatccccattttctcgctgtgcagcaagtgttgctgctgggtagctgttgctgttcctggtgttgctgctgttgccggtgcctccaatgcggacagttggacgacaaattgtctgcctgccgcctgctgctggctcttgcaactcttggtggtggtgctgctgatgccacgggccgtgggtctgcttctctgttttttacgagctgtttgtaagctcttgtatcgccatcgcacgtaggagtccccttggtgtttcatgttgctgctgctgctcttgctgctgttgctgctgccgtagatgttgctgctgtcacggctggtggtactgtgccactgaggtagccagagccatgccagccgacttggcgccgacatgttggcatttacgattatgtctggcccacagactgcaacttctgtttgttttggtttttgcccgccttgctttttcgttgagtgatggccaaggtgtggccaaagtcttaaaaagccttcgctttgacattggccagcagaggagcgaggaactcgttgagcggcttttcagcgggcgccgcctaattagacgttaagtgcacgagtcggctgccaattgaagaggcacctcctcagcccaaagaccccagcccgtgcccctgtgccccctttgcgtgccatgtccatgtccaaacattgtgacagcccgattgcatcgccgggcatgtgttgactaattgccaggggcgctggactgtggtcgctggtcggcggcattcggtagctggctgggatggccccattcccagcttgaacaacgccagtgccataaaaaacaagaatggtgggtggtggttggtcgtgcaggggtagaggtttggaaaaaatgcaacgcggatgtgcagaacaccaagctgcaaagtttgattgataactatgactactaaaataatttccataggtaataattttctaagatacctttttctcttaacaaaaaatatttcctaaaattgatttgaaggatcctcataaattatctacagatggcattcttttcatgggaaacccacttcctgctacatagtgttgtccccattggcccggatgacaaacaccagccacattccacatataagcccatgtatatgcagattggcagccagatgggagaggataaagacctggttaaaaatcgggagagtgtgggaagtgcaacaagtcgctgtcgctgatgttgccgttggccaaaaggacaaagccgacatggcgaccctgaatcgcctgtggagctgtggagccggactattcgaggccatcaaagccaaaacccgattcgacgcggcacggctccatttcaacccaatgcgacccaatctgcgacccggctggactgaac

SEQ ID NO: 36758 - DNA, 384 bp, DROSOPHILA
atgtcggcgccaagtcggctggcatggctctggctacctcagtggcacagtaccaccagccgtgacagcagcaacatctacggcagcagcaacagcagcaagagcagcagcagcaacatgaaacaccaaggggactcctacgtgcgatggcgatacaagagcttacaaacagctcgtaaaaaacagagaagcagacccacggcccgtggcatcagcagcaccaccaccaagagttgcaagagccagcagcaggcggcaggcagacaatttgtcgtccaactgtccgcattggaggcaccggcaacagcagcaacaccaggaacagcaacagctacccagcagcaacacttgctgcacagcgagaaaatggggataagaacttag

SEQ ID NO: 36759 - protein, 127 aa, DROSOPHILA
MSAPSRLAWLWLPQWHSTTSRDSSNIYGSSNSSKSSSSNMKHQGDSYVRWRYKSLQTARKKQRSRPTARGISSTTTKSCKSQQQAAGRQFVVQLSALEAPATAATPGTATATQQQHLLHSEKMGIRT

SEQ ID NO: 36760 - DNA, 2138 bp, DROSOPHILA
tattttctacaaaattattaaaaagaactacaaaaaaatcgaaaacaaaacgaaaaaaccaagaaaaagtttttaactcagtgcacattaaaacgaaaacaaacgcaaaaacaaagcgtaacgaaacgagaaggaccacgaaaagaaagagagcgcacgaggaattggcgaaggcgggagcgaaagagaaaaatgtcaacgttcttgaacaatttcttcccggcaggtaagcaaaaacaaagccagaaaagcaaaggaaatcaaacacaagcaaagacagggaacgtaagagcagaaccacagctggtggcaggagcgtattggagaggggttggcggggtgaaatgacccccccatcaaacaagttgttcatatacatagttattctatgattgtaataataaaattggtatgtttatgagcttaactcagtgattaatcatagatcagctttcttatattgatcggttagtacgttattttatctgcccctttttaaatccttcgcacgcctctggctgggtggcatttaattgaaagtcacctttggcatatttcataagcgttctcaccggggtcatcctgtaattcaattctgcgcctctcttgttttttctctccactggcggcatgtaaattgaattttcctaccgaagcgcatattgtgattattggcaattacatggacgtgaccgaggaacaaaggaggcgaaggagataagtaggcagagaatgcgagagtgagagagagagggatagggacgggatggagtagcggcctagaacagagaatcttggcataatcaatctgccccaaaacaatctatacacttccctttaattacgtacattcctcgctgcaataccatcgattatcgttttgttattcctggaaacgctcagattcccatttactgctccttgcaacccctctgggatcaggaacaagttccacacactctgcattctcctcatgcattttctttgtcctgcgaaagagatggtcatagagaggccgagacagggaaactcatacaggtacggcaggaaaaaccacttcctcgcttccctgccctttgccaaaaccagagccaaaacaatgagaccagcacaaaggctgctttccaacgggcactgaagcttgggatactctctttagggtgactttgtacagtgtaacattaacatattatcccattataccataaatatttgatcgtcgaaaggatattgtacaggatgtcctaggacattcagggtgtttttcacaatcattctttaccaagtagattctgtttcacatttctcaataaaaataatttgcacgaataataaaaagcggtagcaataccaatttgggatcgaaggattaagctagatggctttaagccatcttagccaagttaaaatctccgaattacaagaaagggtataacaacaaccaagcagtctaagtaaattggtaataggtggcagagggggttggctgggctgaatgaatgcactcgcaaacccgtttgcagagcccaaaattcagaccgatcaaaacaacagcgaaccagaattacagcgctatcaacaatggcagctcctttcgagctttcggttcatctggctttctggctttctggcctgctgagctgaggccaacggcagctgacggaaacacattgactttggtgatacgatgatgctgataggatggacaatggtacaatatgatggcgctggttacttctggatggtgctgcgtggcctgtaggtgcactgggttacctgttgatggccctgccactcactccttcttctccgcttccttttccgacggcgtccgttctggtcgagtgcggtggaaaactggtttaccaactcgctccttccatcttcgcttgtccctcctttgttttgggccgattgggccgagcgtaaacaagagaggctcagacgaaattggagatcttcagctcggcagtctctctgtttatgtgttttaattttttggccaaaagcggatggaaacaccttgccagaaaccggaaaagtccacatgaatacaggaaaagcatcaaattacatttaaacaggatatcatgatctttttcttgtgattttaaatgtggcataaaaattaaagcaaa

SEQ ID NO: 36761 - DNA, 138 bp, DROSOPHILA
atggtcatagagaggccgagacagggaaactcatacaggtacggcaggaaaaaccacttcctcgcttccctgccctttgccaaaaccagagccaaaacaatgagaccagcacaaaggctgctttccaacgggcactga

SEQ ID NO: 36762 - protein, 45 aa, DROSOPHILA
MVIERPRQGNSYRYGRKNHFLASLPFAKTRAKTMRPAQRLLSNGH

SEQ ID NO: 36763 - DNA, 2690 bp, DROSOPHILA
cacggttgacacgttccctgaacagacggattttgatcttccccccatgcgaaaagtaactaggaataccactattacggtactaagcctagaaaaactgcacctcgaagccacccaaacaatggataaaatcctggccgtccatcacaatactatacagcacacctggacactctacactctgctcggattggtaacgttcctagcagtcatcttatggctgcaccgacgaacgaaacacatcgtccacatccacgaggatcatcacgtaccaatctacgcgtcatccataccttcgctatggccgtcacttcgaactgggggggggggaggagttaccacccccaccccctaaacccccacgcctctaaacaaatcatcggacactcaaccgggaagacggcaactggaacaccgcatccggccgaatgctgacattccggccgaatgctgacattacacaaaagtcgcactgcaacattgtccccagctagccagccacatgccgagtcggcatgttcattatgcttacaattaagaacctatgtacttatgtataagacgaaaacggaggactcgagtagccactctctgacaataaacttcatactgattttgaacttcaagaaagtcagtcgtattctttattggaaatcttcacactacaactatctgctgaaacttaaaaaccttcatacatttacacatcatatcttcacaaaaggctccaccctcgatcacggacttaactcccgccctcgctccccctcgcactctttcaatgttttcaaggcgaataatgcaagagcgccccagctagacgtctcgctctcgcacagctgtgtcttgctagggtggagagagggagagaggtgttttactcttacagctgagctgccacgatttgtttgtatacagaatgaggcgcacacacacacgcgcacttgctgtttttcttctttcgcttttaaagctcttacttcctttttttgattctagtttacaagggcttatagttcaagccgctgtaaataatccaaaaactcacctggtacatggccgtcttgggcaaatccaggcagacggcacagcacagggcattggagatgcggtgggccagcttttcgtgcattcccgaggcggctgcggcactggaaagcaagctgctgccgctgctgctggtggcaccaccgccccctccgtccaacaactgtttcttggccggcggttctccgctgccctgcgtgtccagcggcacgcccaccacattgccgccgcccaccgacgaggaggacgacgatgtggaagaggaagaggccgaggaggcggagctggtcgtggccaccgcctggttgtcgcccaggagcggtaggttcgaggacgacggcggctgttggaccgccgaactggaggattccaccgacatgattggaaattttcttggaataatgtttgttgtgtttttctttgccactcgcttcgtacacaaactcccacacacacgaccactaaactactacacacacacaagcaatacccagtttgctctctctctctttcgctcgcacactaagtatggcactttctttcaattgccacctttccccgctgtccgtgtcgtgtcgttctcttctgtgttcttccgttctgttctgtttgcaagctttttgtccgccgacacgtccgctcgccaaaaaatttgttgtctttctagagagtgttgtgcggtgtgaccaaatcttatattaggcaaaatactagtataacgtatcgatgttattggcaaagcctatcgatgtttttctattgtctgtgtttctccagccctggttgatcgttagcagggacaccatcccctttacaaagtaataaaataacaaatattattaaattaaccatttcaaaataaaatagcattaaaataatatagcaaaatctgccttcatatatataattttacaagtatattattgaaaacgaatccattcgtgtttaatgtgctgcccttatatccggcagtacggaactcgtcactcgcgagatgcggtcacactgcttgcggcaaacggaaaacatgtaagaaattaaatattgtgattttgtctttaaaatgtacaaaagtttgacaaaacacaaacggcaggttctttatgaagtcacctctcgcaaagtgaactatgactggtcagtggaggtacggaaaacgtggattaaagagcgaaaaatcgcagttttctcagcagacatttttgtatcacttcgctgtgcgctgtgtgtttggcattttttgtgtttgtgtgtgtgtgtgcaacagcggcatcaatttgaaaaataacaaaaacaaatcgttggcgtgttgaacaaaaaactatacgtatttgctatctggcttgcgttataagaaccatttggacaaattgcgtcttaaaaatttggtgaccaagatggcttcaatttcattttcggtggtgaattaaaaactttaatgaaaataaaaacttaatgaattgacttttaattcacgtgcaattattatgaaaatttttgaaaattaaaataaaaatatttccaaaaacgttgtaacaaaactacacttataaattggcttttggcttgcttagtgaacttagttaattatttccagctgttcccactcaaaaaacaaatcgtatacatatgtgttcttattt

SEQ ID NO: 36764 - DNA, 690 bp, DROSOPHILA
cgagcggacgtgtcggcggacaaaaagcttgcaaacagaacagaacggaagaacacagaagagaacgacacgacacggacagcggggaaaggtggcaattgaaagaaagtgccatacttagtgtgcgagcgaaagagagagagagcaaactgggtattgcttgtgtgtgtgtagtagtttagtggtcgtgtgtgtgggagtttgtgtacgaagcgagtggcaaagaaaaacacaacaaacattattccaagaaaatttccaatcatgtcggtggaatcctccagttcggcggtccaacagccgccgtcgtcctcgaacctaccgctcctgggcgacaaccaggcggtggccacgaccagctccgcctcctcggcctcttcctcttccacatcgtcgtcctcctcgtcggtgggcggcggcaatgtggtgggcgtgccgctggacacgcagggcagcggagaaccgccggccaagaaacagttgttggacggagggggcggtggtgccaccagcagcagcggcagcagcttgctttccagtgccgcagccgcctcgggaatgcacgaaaagctggcccaccgcatctccaatgccctgtgctgtgccgtctgcctggatttgcccaagacggccatgtaccaggtgagtttttggattatttacagcggcttgaactataagcccttgtaa

SEQ ID NO: 36765 - protein, 141 aa, DROSOPHILA
MSVESSSSAVQQPPSSSNLPLLGDNQAVATTSSASSASSSSTSSSSSSVGGGNVVGVPLDTQGSGEPPAKKQLLDGGGGGATSSSGSSLLSSAAAASGMHEKLAHRISNALCCAVCLDLPKTAMYQVSFWIIYSGLNYKPL

SEQ ID NO: 36766 - DNA, 5983 bp, DROSOPHILA
cctggtcatctcactcggctgcggaagaacaaaaactcgtctgccagtcggccgctcattttgcgttgtaattttcgagggtgatctgcccttcccgaagcaggttgtttccatccttcgaagatggttgattattattttaaatgatttgtttcaagtattggcaaaaggaatgttttaagtgtttaatggaaacattcaaacaaaatgaattcaagctgatttcaaaatgatttgctgtcaagttattcatagaactaatcctttaatggattacttaccattaataagaaataagcaagaatgatctcaaagaataaatttcatttttaaagtgtgtaatccctagacttctgcttaaaagcccaataaatagtttgaaatagagattccacgaaaatccaaaattttaatccatttgggtttctgatcacccaaaaggcccaacccaatcaaactattgtgtgcagagcatccgagtttcagtgctccaaatagcaccttgttttttcccgtgctctttggcttttccttcctgctattgtggcccagacaatgatggagctgcacttggatgcttggctggtggaggaggagctcgaagtggagccgaaaagggagtgacgatagcgatctgctttcgctgccccttaatcagccagtcatcggcgaacgagcaagctcaccgtagttgtgcttatttgccttttgtttgttttacttttgttttggtgtttatattttttttgtcggttgccgccacaagattgatgagagaacaaggtttgtcgcttaggtcttttgtcggccaacgctttggaactatgatgccggatgtgttctaataaagctaccgcagattcaaggcctcaatgggccggaccaacaaggttgacctcagcacgcttttaatcgtaacaaaatataatcgcacagtttcacactgaatagagcgccgatttcttgatagatgagctcttgacgttgagcagattttggtttaatagacatagaaggagctgttaccaatgcacgaggaattagataaggaagtgctgcttgcagaagtcatgattttcttccgactggcgtgtgttttccatctctttcgaatagagtttatgcccagatgcttgaggatccctgataaaagtttggagcgctgtttttggttctctcttctgggggattcagttggagtcagtgattccgacggcgttgagggctcaacaagaggtgggacaaagatgggctttggtggcggaagaggcaaaggatcattctgcaagccacctagcaccatttccaaattctccctaaggtatttgtacttgtcgtcctcatcaaagagattctcttggctgagatggggcttttgataccataatatcagactcgaagatgaagtctccgtgactttatgtcgacgaagacgcggcggtggcttgggagctagtggaggtggaggagcttggcgcttgacaggtctgttcccttggctgtccaccaccaaacgctcggcactgctagaaacactgcagtgtagacgccatctgggaaggattcactaagatcgttacttctttaaatattagaaactcaccccaccacaatcaatattgcattataaattggcaacgctaacaatccgagtatcaatagccttaccagcggacacgagggttgttggagctgcataagccagtctatggagcagcatccaatggacccgtccaccatttcccgactttcgttaagcatacttaaggtggtcatatcatctgcccaggacaaagaattaggcaggatgttgggcatgggccaaacaaacgacttccaccatagcaacttcattatttatttcgatttctattgctacatttaaaactagtaacactatgtgtctagaaaacgtataaaaataatgactttggattctaagatatggtgttcctaacttgatacataaattttccaattgaaaactaacttgatacatatagttttcaagtgaatattctacagatgtaatgtcactccctctttcgctttacttgatccacatagtagtcttccatgccctccagataatccacattggtctctgctgatacggggaggtacctgtagcattggcattgtggcaaacccaagggcaatataccaggggccataaagttgctttctccataggaaactggtgtagccaccgaatgtttcaaagaattcagacgacttcttaaaaagtgggtgcagcaaatggtgggcaggagaagcgaggaaaacagtaagagccaaaaccaaatagcattctatgggatgcaaataaaataaataagctatacattttcatttttttgattacatatactacactaaaataaatattgattcaccattaagtttatgcaaacttgtttgattatttgctcaattaaaagtgtacggcaatcggggaatcacctctttacttaccattggcttagcaatccgattgcagaggtcggcgtactcaaccatggcttcatcatcctctcggatgaggggttcacagctctccatatcctctttggtcgcctcctcgaccactcgaacgtaatcatccaacccggatttcactaatttactgatattacgggccacctcgtcggcttcctttttggaatcttgccgcaataagtcatcaccttgcttaatcttgtccagcagatgatgaaggtacttgacaaagctaccgtagccgcctgataagagccaatccatttgctttagtcgctttatcagtcgctggacaatcgctgccaaaggtacacacaagtgtttttgatatgctcgcagatgaatcgcttggtttttcagagtgactcccggttccaccttgtttgccaggctttccagttttctggtcaacccgtccaaaggacctggattgggttctggaactaattgggggcaaatatattttgtatagtcctttatgtcatatgtagacaggtttccggtcaataactttttggcagattcctctgcatcgggatgaatttctttaggtgcgccgggcatcgaagtgttccccattttctctagagacttaacaacgtcgatcatcacatcatcgcgaaaaccatatggatcatagatctccttgatacccagtacattgtacaaactttcgttgcgcacacagctctgcagaatttctgaggttcttaccatgggcatggatcgaaaggtggttacgttttctgggagaaacttattcggattaatagatttattgtctaccggctgtgggaatttcctattaataatatggaactttagtttgggatcgcacaaatgctttgcgaaatggtaaagcacacctcgagcaaaaggcttgatatatcaaagcgccgtgaaccagatagaagagcaccaggataactccaacggaaaacaggatgaaaagagcaaccaagacggcacagagaagccaactggcgacttttggactaaacaaagcaatcagaagaccaaagagcagaagaaggggtaccagcattaataaaacaattaagcacaacgtagttccgaaccacgaggatccgagctttctacgcaagtcagctgctggagtagatctagatctaggattggtcttgaccaccaacggcatatccttcttcatctcctcaaccacttgtcgcaagactttcaaggatgcttcgtacctctcttgcagcttcttggctaaggagattatcacgctttaagtaatcttcaaagatgtttcatcttacctcctttattcagatccttattgacggagtctaatatgtcactcatgcgattttttattgccgaagacatccgtcgcaattgaccaactgcttgtagtgggtagtctataaacttgctgtctattacttcctgaacagattcaagaagcggttcaaattcgggtaacttggaggtggtataaaatggtaatagttttgcttttgatatgtaaaaactgatcctcttacactatcgtaatgcaaacaccccatgtccagcatcttgatctcattcgcacggtagaaatcttggcactcgctatgcgtgcagtccgcgattagaatcaccataagatcgcgtttgacgccacgtaatgctaatgaagattgtctgctaaacaagcagttatgaaggcaataaaatcctcaccatcccggaactgagtggccaagcggcgggcatcgagcaacctattcttgatccttagcataactggcttgatccttcgcatattacgcaatacctcgatcagcctttcaatggctttagcatgaacttccagctccctattgggatatttaatactgggatcttggttgagagcacttttgatcctcttaactttctgatcatagttgatgacataaagatgacgcaaacgttcggatgctttttggaatatgtagtccgcacttgattggctagagttactgggataacaaccggacgctttaaggttcttcaagtttatattcagctgagtggccgccattatggcaagaatgagaaacaaactaagaataaatccataatcgcactatggggaaacatttcctctatactcacagcatcaacaatgccaaaatggccaatagaatgccacagcagtagcggcatcctctactggacctttcgttcttctcccaggccacacagcagcaggcatagagtagcctaatgggaatcagttcgctgaatataatctctccaaatatcaagcagctctcacccaaggatgagtatcagcagaaacagaagaaccagtagaaggactaatatcttcagtcctttctgggatgccaaatacgcctcccagtcgtcttcctgtaccttggaaccaatgtcattcccatctttggatatatatcctttgggaacttccttggcgtatgagaccacggatccagtaaaaacatgggataaatatgtgattggacacatagagtccgcatccccgttgttcgatctgctttctggttctgcatacctattttgagggctaagcctccgaaacctgaccaatgatccttggtcgattaacttagaagaggaatggaggggttgattggtctgggatttaacgacatggagccgaaaggctatgacccaaatccacatagtaacttttagttccattcttttcaaatatattatttataaataggattgattatgaaattcaagattactttggtatgaacaaggtgaaactgttgatccgaccaagaacatttaattttgctactcgcttattcgtacataaaaccacttgaagtttattgacaaaattttgcaaacgacagagacaaccatcaacggagctcgatgattgactggcaactgggtttcttgtgttttgtattttccgggatcttatacgataatctttacttgcgctgggcaatattgatacatggttacttgacttaagcggaaatcatttaatgtacgtcaaatgtaaaatacaacatacatcttacttgtataataatactaaaaattatgtaattgtgttatccgtacaatatgctcgcaagtctgtatatttgtgtatggtgttgtttataggtttctggaaacatacagcttgagctcttagttcctagacaatacaattggaaacgtttaaatgcttagggggtttgttttgctgttgttttggttttctcttactaaactatgacaacgtgttaaaatacgtgttactttaaagtatttgtatctcgaacgtgtagctgattagggggttttatttgattggtttatcagtgtccgaatgcacaatttgtcggttttaaggaagagtgtagtatggtgtattgtttctaaaataaatacattaaatgcattgaataactcccaactctgtgctctgctcttttctaaattaaaatggcagttttggtattttggatcatattttctttaccgcgattttgat

SEQ ID NO: 36767 - DNA, 2661 bp, DROSOPHILA
atgtgtccaatcacatatttatcccatgtttttactggatccgtggtctcatacgccaaggaagttcccaaaggatatatatccaaagatgggaatgacattggttccaaggtacaggaagacgactgggaggcgtatttggcatcccagaaaggactgaagatattagtccttctactggttcttctgtttctgctgatactcatccttgggctactctatgcctgctgctgtgtggcctgggagaagaacgaaaggtccagtagaggatgccgctactgctgtggcattctattggccattttggcattgttgatgcttaactctagccaatcaagtgcggactacatattccaaaaagcatccgaacgtttgcgtcatctttatgtcatcaactatgatcagaaagttaagaggatcaaaagtgctctcaaccaagatcccagtattaaatatcccaatagggagctggaagttcatgctaaagccattgaaaggctgatcgaggtattgcgtaatatgcgaaggatcaagccagttatgctaaggatcaagaataggttgctcgatgcccgccgcttggccactcagttccgggatgcattacgtggcgtcaaacgcgatcttatggtgattctaatcgcggactgcacgcatagcgagtgccaagatttctaccgtgcgaatgagatcaagatgctggacatggggtgtttgcattacgatagtgaagtaatagacagcaagtttatagactacccactacaagcagttggtcaattgcgacggatgtcttcggcaataaaaaatcgcatgagtgacatattagactccgtcaataaggatctgaataaaggagccaagaagctgcaagagaggtacgaagcatccttgaaagtcttgcgacaagtggttgaggagatgaagaaggatatgccgttggtggtcaagaccaatcctagatctagatctactccagcagctgacttgcaaaacgtaaccacctttcgatccatgcccatggtaagaacctcagaaattctgcagagctgtgtgcgcaacgaaagtttgtacaatgtactgggtatcaaggagatctatgatccatatggttttcgcgatgatgtgatgatcgacgttccagaacccaatccaggtcctttggacgggttgaccagaaaactggaaagcctggcaaacaaggtggaaccgggagtcactctgaaaaaccaagcgattcatctgcgagcatatcaaaaacacttgtgtgtacctttggcagcgattgtccagcgactgataaagcgactaaagcaaatggattggctcttatcaggcggctacggtagctttgtcaagtaccttcatcatctgctggacaagattaagcaaggtgatgacttattgcggcaagattccaaaaaggaagccgacgaggtggcccgtaatatcagtaaattagtgaaatccgggttggatgattacgttcgagtggtcgaggaggcgaccaaagaggatatggagagctgtgaacccctcatccgagaggatgatgaagccatggttgagtacgccgacctctgcaatcggattgctaagccaatgaatgctatttggttttggctcttactgttttcctcgcttctcctgcccaccatttgctgcacccactttttaagaagtcgtctgaattctttgaaacattcggtggctacaccagtttcctatggagaaagcaactttatggcccctggtatattgcccttgggtttgccacaatgccaatgctacaggtacctccccgtatcagcagagaccaatgtggattatctggagggcatggaagactactatgtggatcaattgctatggtggaagtcgtttgtttggcccatgcccaacatcctgcctaattctttgtcctgggcagatgatatgaccaccttaagtatgcttaacgaaagtcgggaaatggtggacgggtccattggatgctgctccatagactggcttatgcagctccaacaaccctcgtgtccgctggtaaggctattgatactcggattgttagcgttgccaatttataatgcaatattgattgtggtgggatggcgtctacactgcagtgtttctagcagtgccgagcgtttggtggtggacagccaagggaacagacctgtcaagcgccaagctcctccacctccactagctcccaagccaccgccgcgtcttcgtcgacataaagtcacggagacttcatcttcgagtctgatattatggtatcaaaagccccatctcagccaagagaatctctttgatgaggacgacaagtacaaataccttagggagaatttggaaatggtgctaggtggcttgcagaatgatcctttgcctcttccgccaccaaagcccatctttgtcccacctcttgttgagccctcaacgccgtcggaatcactgactccaactgaatcccccagaagagagaaccaaaaacagcgctccaaacttttatcagggatcctcaagcatctgggcataaactctattcgaaagagatggaaaacacacgccagtcggaagaaaatcatgacttctgcaagcagcacttccttatctaattcctcgtgcattggtaacagctccttctatgtctattaa

SEQ ID NO: 36768 - protein, 886 aa, DROSOPHILA
MCPITYLSHVFTGSVVSYAKEVPKGYISKDGNDIGSKVQEDDWEAYLASQKGLKILVLLLVLLFLLILILGLLYACCCVAWEKNERSSRGCRYCCGILLAILALLMLNSSQSSADYIFQKASERLRHLYVINYDQKVKRIKSALNQDPSIKYPNRELEVHAKAIERLIEVLRNMRRIKPVMLRIKNRLLDARRLATQFRDALRGVKRDLMVILIADCTHSECQDFYRANEIKMLDMGCLHYDSEVIDSKFIDYPLQAVGQLRRMSSAIKNRMSDILDSVNKDLNKGAKKLQERYEASLKVLRQVVEEMKKDMPLVVKTNPRSRSTPAADLQNVTTFRSMPMVRTSEILQSCVRNESLYNVLGIKEIYDPYGFRDDVMIDVPEPNPGPLDGLTRKLESLANKVEPGVTLKNQAIHLRAYQKHLCVPLAAIVQRLIKRLKQMDWLLSGGYGSFVKYLHHLLDKIKQGDDLLRQDSKKEADEVARNISKLVKSGLDDYVRVVEEATKEDMESCEPLIREDDEAMVEYADLCNRIAKPMNAIWFWLLLFSSLLLPTICCTHFLRSRLNSLKHSVATPVSYGESNFMAPGILPLGLPQCQCYRYLPVSAETNVDYLEGMEDYYVDQLLWWKSFVWPMPNILPNSLSWADDMTTLSMLNESREMVDGSIGCCSIDWLMQLQQPSCPLVRLLILGLLALPIYNAILIVVGWRLHCSVSSSAERLVVDSQGNRPVKRQAPPPPLAPKPPPRLRRHKVTETSSSSLILWYQKPHLSQENLFDEDDKYKYLRENLEMVLGGLQNDPLPLPPPKPIFVPPLVEPSTPSESLTPTESPRRENQKQRSKLLSGILKHLGINSIRKRWKTHASRKKIMTSASSTSLSNSSCIGNSSFYVY

SEQ ID NO: 36769 - DNA, 4274 bp, DROSOPHILA
gatcgacggaggaggaggagcatgtaagcgaaccggatatgtatgataaatatgtaccaaccaatatatatgtatatatatttatatttgtgaatgtatccacacattttttcatttccttctgagttactcaaggtgtcaattcctgtttttatggctgcgctggcacctggtcctacggtgatcgactctaggttatatattttcaaatccgacaacatatctgagaatggggcgttttccagggggactcgtttacttctgcacttatttgtacataggcaatgtacatatagcgaagcgacgagatcggtgacggactacaagatacagatacgcaaacaaacgaaacttaaagataactcgtaaccacccaaaatcctaaacggagactgcagctaaaggcaaataggaaaccaaaacagaaacgaacacggaaggcggagatacgaacgattccggttttgaataacgattacgtatagtgtgtttttttaaacgattcatatgaatattgtactaatagagaactttttatattgtgtcaaggcatactaagaactaagcgtgatttgttagaagtcatagagtaacgtaaactttgataatggacttttattactgtacactcgcccacacgcatcatataccacgaaggatccctacgatcccaagccaacccgatccgatccgatcccagaccacagaaccactgaaaaatacgaaacaaccaaacagaatagatcagaacagaacacggatgaaacaatgcgaaaatagccgaaacaataagcaaatattactaactctgtttcctacaattgcaaagtaccaataactacgctagttatgtgtgtgttaaatatatatataaattatttaaatcagcgtaagtgcataaagaaccgattgtattataagttgcatgtaccataccaagtaatgcgcgccacaaacgaatccaatatcgcgatggaacgaacattctagactgtagtcgatgtgcaagaaacgaataaactttcaaaactacaacatactccacctgctcccctggcttcatttcacttttcccattcagaaggacacggttgcgaatagtttcaattgaaatgatttggaaatgatggacccaacatattcgcaatattcatatttcataatgaatcttgggcaaccgtatccacgctttttaggccggttcaaaaactaatcctttgacactattttcttacagaacccagtccggcgcatgctcctcatccgccacatcctccgctgggggctgcgagcagcagcagcggtggcagcggaagcttcgagcgctccttcagcatcggaggcgtcggatccgtcgaatgtgatccagatggtacgcccagttcgccagcggtgatgggcaccaagcgcaaccgggtgctcacccgtcagccgagggtgaagcgggacagtgacagcatctcgtccacgaatcagatatccccggatacggctgccacgacgctcgactttgatccattcaatgctgcgggcgccacgagtgccacggccagagattactctacgacgggctcgcatcatctgcaccatcagtcagctgtgcaccaccatcatcacctgctaaccgttccaccgcggatcgagcgccatgcctctgaaccggcacccagtttggccccctccacgccgcacctgctcagcgtgccgtccagcactccctatctcatcaagcagcactcggatccgttgctgcctcgccagtccgcactgcacatggccggatccggttctggatccagttccgcgatggcaactggcagcaatccgtttgccccgctgcaccgccaatactcgcatccgttgtcgggttcaaatgccagctatgtcactccggcgccgcttcaccatccgcaccacatctcactgcccgagtccatctacgcctcggggtctccgccgccggccggctcctcgcaatacctggtgcccacgcgcgtagtggcctgtccagtggtttctagtgaaacggcggcaacgcccactaatgccagtcccggctcctcgtcgacagtgtcggcggccgtgtctgtggttacctcacccaatgcggggctacagaacagcgccagtaggcatccgttgtcgcccactttctccattggatctgatgtggcacacgagcgaaggtctccgcactctccctccatcagcagatcgcaagtcgtggagcgggcggggaagaatccagcagaggccgccaacggaggcggttcgaggctgcggacttccaagtctgcctcgggctccatcactggcacccatctgcatcccggccaggccaccatgagcagttcgtttgagcatttgcccacgctgcgtgtcaagaacgaggaactgcagcgatcggtgtcttcacctcaggtgagttggatgtgtacccgaccgaaagatcactcacactgacttacctttgttgcagacccaacgggagatcatcactctcgagaatccgcgttctagtcattgtccggtcattcgaccgggtccggcgctgggctgcaacttctgttggaacaccatcgacgggcatggacgcattttgcgccgcaaaacgaaataccattgcccggagtgccagacgaatttgtgcattgtgccctgtttccaggagtatcacgagcggctgaacaacgaggcggccgctgcatccagtggagcggcagcgggcgataatcagctgagcagcagcacgacgggatcggggagcagcagcagtggcaaggcatcgccgtacgtctcctctgccggcagtagcagcagtggagcgggtgcagctcgtcattataccaagacggaatcgatataatctggagctgccgtgaccaagcccgcatatttgtatttgtgacaggacggccgccgaaaggttgacctccatcagactagaagccacgcattgctcgtccttcattctggaacatggtccacacatggccgtctgtcgaatttgtttttttgtcagcaggaagcgcgaaaaacgcgcgctcacgaactgcacccaaattttcatttgttgtcccagtcccactgtgcatccggcccggagtccgggcacatggactgcgagagagggcgccaggtggcgccagagaattgttttttgagccgtgcccagatgcacgctgccattgtaaagtaacgaaaatcttttggaacaccgtcggaatgcggggtgaaaacttttttaaatcgctaaatgtaataatatgtttatgtgtgtgtatctatgtactatatgtgtatgttcttgtacaaaaaaaaaaccgaactaaaatctaacaaaaataaaacgttgacgacggtgcagctcgaagctcgaattacgataaggttttcaccaagtacaactatcactaccactaccccaatccgctccggcctaaacttaagtacgtccttgcacctgtactttcgccgggcaccgctgcgcaggcgcacgaattgtctagtggcccacacttgttttacttaacgttttatatctatgtatgtatgtacgtatatgcacatggccctcgaggaggttttcggatgtgctagatccggcgaattcgtttaattctcagtgtaaactaccatgtatgtaaacaatacggaaatcaataaatacttgtgaccctctggtttgatacgaattgcgttttcatgtggaagtagtttaggaacgagccaagaaagctaaatagctaagtagaccgtcgtttccattatgtttaaacatctcatagtgatcacgttttattgatctaattaccatttaacaaaccgacttcggattacttcttggctggagcctgtggcggaactacctcggcggggggattagcgttgcggaagttggggaactgttcccaaggcgccgacaagtcaaacttcctgaactcctgggccaactccaagggctcgcagacgactcgcttcttctcatcatcgtagcgcagctctacgtagccggacagcgggaagtcgcggcgctggggatgtccctcaaaaccgtaatcggtcaggatgcggcgcaagtcgggatggttggcaaagaacacgccgtacatgtcccagatctcacgttcgtaccagttggccgccttatgcacctcgcaggcggagtccagaggagtcagctcatcggtgtaggtcttaacgcggatgcgcgaattgtagcgcagcgagagcaaattgtagaccacctcgaatcggttcttgcgacagggcac

SEQ ID NO: 36770 - DNA, 2079 bp, DROSOPHILA
atgtgcaagaaacgaataaactttcaaaactacaacatactccacctgctcccctggcttcatttcacttttcccattcagaaggacacggttgcgaataaacccagtccggcgcatgctcctcatccgccacatcctccgctgggggctgcgagcagcagcagcggtggcagcggaagcttcgagcgctccttcagcatcggaggcgtcggatccgtcgaatgtgatccagatggtacgcccagttcgccagcggtgatgggcaccaagcgcaaccgggtgctcacccgtcagccgagggtgaagcgggacagtgacagcatctcgtccacgaatcagatatccccggatacggctgccacgacgctcgactttgatccattcaatgctgcgggcgccacgagtgccacggccagagattactctacgacgggctcgcatcatctgcaccatcagtcagctgtgcaccaccatcatcacctgctaaccgttccaccgcggatcgagcgccatgcctctgaaccggcacccagtttggccccctccacgccgcacctgctcagcgtgccgtccagcactccctatctcatcaagcagcactcggatccgttgctgcctcgccagtccgcactgcacatggccggatccggttctggatccagttccgcgatggcaactggcagcaatccgtttgccccgctgcaccgccaatactcgcatccgttgtcgggttcaaatgccagctatgtcactccggcgccgcttcaccatccgcaccacatctcactgcccgagtccatctacgcctcggggtctccgccgccggccggctcctcgcaatacctggtgcccacgcgcgtagtggcctgtccagtggtttctagtgaaacggcggcaacgcccactaatgccagtcccggctcctcgtcgacagtgtcggcggccgtgtctgtggttacctcacccaatgcggggctacagaacagcgccagtaggcatccgttgtcgcccactttctccattggatctgatgtggcacacgagcgaaggtctccgcactctccctccatcagcagatcgcaagtcgtggagcgggcggggaagaatccagcagaggccgccaacggaggcggttcgaggctgcggacttccaagtctgcctcgggctccatcactggcacccatctgcatcccggccaggccaccatgagcagttcgtttgagcatttgcccacgctgcgtgtcaagaacgaggaactgcagcgatcggtgtcttcacctcagacccaacgggagatcatcactctcgagaatccgcgttctagtcattgtccggtcattcgaccgggtccggcgctgggctgcaacttctgttggaacaccatcgacgggcatggacgcattttgcgccgcaaaacgaaataccattgcccggagtgccagacgaatttgtgcattgtgccctgtttccaggagtatcacgagcggctgaacaacgaggcggccgctgcatccagtggagcggcagcgggcgataatcagctgagcagcagcacgacgggatcggggagcagcagcagtggcaaggcatcgccgtacgtctcctctgccggcagtagcagcagtggagcgggtgcagctcgtcattataccaagacggaatcgatataatctggagctgccgtgaccaagcccgcatatttgtatttgtgacaggacggccgccgaaaggttgacctccatcagactagaagccacgcattgctcgtccttcattctggaacatggtccacacatggccgtctgtcgaatttgtttttttgtcagcaggaagcgcgaaaaacgcgcgctcacgaactgcacccaaattttcatttgttgtcccagtcccactgtgcatccggcccggagtccgggcacatggactgcgagagagggcgccaggtggcgccagagaattgttttttgagccgtgcccagatgcacgctgccattgtaaagtaacgaaaatcttttggaacaccgtcggaatgcggggtgaaaacttttttaaatcgctaaatgtaataatatgtttat

SEQ ID NO: 36771 - protein, 556 aa, DROSOPHILA
MCKKRINFQNYNILHLLPWLHFTFPIQKDTVANKPSPAHAPHPPHPPLGAASSSSGGSGSFERSFSIGGVGSVECDPDGTPSSPAVMGTKRNRVLTRQPRVKRDSDSISSTNQISPDTAATTLDFDPFNAAGATSATARDYSTTGSHHLHHQSAVHHHHHLLTVPPRIERHASEPAPSLAPSTPHLLSVPSSTPYLIKQHSDPLLPRQSALHMAGSGSGSSSAMATGSNPFAPLHRQYSHPLSGSNASYVTPAPLHHPHHISLPESIYASGSPPPAGSSQYLVPTRVVACPVVSSETAATPTNASPGSSSTVSAAVSVVTSPNAGLQNSASRHPLSPTFSIGSDVAHERRSPHSPSISRSQVVERAGKNPAEAANGGGSRLRTSKSASGSITGTHLHPGQATMSSSFEHLPTLRVKNEELQRSVSSPQTQREIITLENPRSSHCPVIRPGPALGCNFCWNTIDGHGRILRRKTKYHCPECQTNLCIVPCFQEYHERLNNEAAAASSGAAAGDNQLSSSTTGSGSSSSGKASPYVSSAGSSSSGAGAARHYTKTESI

SEQ ID NO: 36772 - DNA, 2412 bp, DROSOPHILA
aggatggggaacaggccactacagtaactatttaagagccacgcggagctcttatgcttcagaaagcaaaaggcagtgcggttaagctaatcatgtggctgcgtataatgtttttactggtgaggtctttaaaaatatcttttacctgtgctaatgaaatatatgtacatatatattttagttgctggctcattgcctcacggctttgccagctccagagtttgacgaccacaactcgaagacttggagtgcggaagaagcctgcagcgaagttacaaccaccaccataatggaaaaccaggctgatccaacttgtagaacgtaggtcacgtctatggcgtacaataaccaaaattatattatatttaaattatacattatcagctacgtttattgttacgtggtcaatggatcagttttgtcgttgattaagagctgcaaagtgaaccagtactttgatcccaatttgaaaatgtgccggtctgaagttccagatgaatgttctgcaatggcaccaaccaactaaatcccacggcatctttcatgccactttgaacttctgcagcgccaataagctagagctatatctgaatttcttggaacccaaagcttataaatgtttcaaatcttgatgccaataaaaagtaataataaattatagcattgcaatgcttttgtaggaagttttatggtttatacgttatatggttttcagcgaatagattcatttctacatattcaaaacatccggattattgttcttgacaacacccagagtttacccagaaatttgcacatatctgagaagtccataaacaaagtacatacgagtacgagaacgggtgacaaaacaaattaataaacctacgcaataaacattaattacattgccaaagcgtaccgagataaacgatgctacagattaaatcctgtggtatttaaaggccgctttggcgctccaaggtttcagtgtgcgaagtgtagcaaggttaaattgacaatgtggacgagtctaattgtatcactggtaactatgcaaggactgcacttggatctatatcccaaatcaaaagaatccaccccataatagctcctggtccactgcctgcttgccggggccgcgcctgcgctaaaggatctggacgcgggcacctggagtgcggatgaggcgtgtcagaatgtggataaatcggtcataatagcgaaccagaatgactccacatgcgtcaggtaagcaactcggcggattatacggattatcacctactaaatggaaattcactttcagctacgtctattgttataaagtcaatgactcaacgagggctctaatcaaaagctgcaagaccgggcaattctttgatgccgatctcaaattctgcactatcagcaaaccagcgggatgtgtctaatatgagaaagtcttagttagaaatacgtttgaatagtaattcactagattttacatatgtattattaatttattacattaaaacccaaaaattaaatatttttcgattacctaagcaaccagtggcaaattcccaatcaaaatcctagacagaatcgtttggatcattctttatggttaactggatataaaatgcatgaactttctttaatcgttgaggctcagcagttgctcggtcgtgtggattgacaggactctgtatccgaattgtagtattcattggtgttgcaatagtatagccagcccaggtaatcctgactcaatttatagcagtagacatacctagaaagtctaaaacttaaggccaacgcatcttgaagttgataataatatacttgcatttgacacgttgtatcagtctcaactcggaaatatcctttgctcttcaactttgcacaataggcattgggatctatttccgaaggtactgtagtttgaacgctggtagatggttcagttgttgtgggcgaagtactcgaatcagtggtagtggcagatgtggtggaatctgtacttgaatctgtggtaagttcagatgtagttgattctgtactcgaattggtagtaacttcagatgtagttgagtccgtactagattcggtactaattgcagaggtagtagaatccgtactcgattcggtactaatttcagaagtagtagaatctgtactcgattcggtactaattgcagaagtagtagaatctgtactagattcggtactaattgcagaggtagtagaatgcgtactcgattcggtactaatttcagatgtagtagaatctgtactcgattcggtactaaattcagaagtagtagaatctgtactcgattcggtactaatttcagaagtagtagaatctgtactcgattcggtactaatttcagaagtagtagaatctgtactcgattcggtactaatttcagaagtagtagaatctgt

SEQ ID NO: 36773 - DNA, 291 bp, DROSOPHILA
atgtggacgagtctaattgtatcactgctcctggtccactgcctgcttgccggggccgcgcctgcgctaaaggatctggacgcgggcacctggagtgcggatgaggcgtgtcagaatgtggataaatcggtcataatagcgaaccagaatgactccacatgcgtcagctacgtctattgttataaagtcaatgactcaacgagggctctaatcaaaagctgcaagaccgggcaattctttgatgccgatctcaaattctgcactatcagcaaaccagcgggatgtgtctaa

SEQ ID NO: 36774 - protein, 96 aa, DROSOPHILA
MWTSLIVSLLLVHCLLAGAAPALKDLDAGTWSADEACQNVDKSVIIANQNDSTCVSYVYCYKVNDSTRALIKSCKTGQFFDADLKFCTISKPAGCV

SEQ ID NO: 36775 - DNA, 2543 bp, DROSOPHILA
cgattcggtactaatttcagaagtagtagaatctgtactcgattcggtactaatttcagaagtagtagaatctgtactcgattcggtagttagctcagatgtagtagaatcggtactggaatctgtagaaaattcagaagtggttgaatctgtggtgaactgggttgttaggatttcagtcactgtggaatcggtagtttcagctgtggtggttgctgttgactccgtagtttctagggtactcgaatcttggagttcaaagtacaagagttcaaagtacaagataatgaaaaccgaaggcaataaacccattaaaaggagatatgtgctatatataccaacctgttactatatccgttgtggccgttgacgtgactgtgacacaagccggctgtggaaaaagaagtgtgagaatcgacaagtcgccacggagctaactaaatctcacttccgctgaggccatgggtgcacagatcccgtcgaggacgcagtagtacccatcgcgacagctttggatcgcactttcatccacggtgccttgatcgaagcaaaacccataaacggtttcactgacacacgcatattgtccatttgtcaaggagcagtcggagcaaccggactgcccaagagcaccattcgaaatccagaggagcaggagaacctggaatatgcgaaatgggtcactttcttctggctgagtgctatcttgactcacctttaggctaatttgtgctggcatagtttgtctgtttgccgggaagagcaacttacttgtgatggctggccaagtgccaattctctttatagagcctaagccggaccacaccctcagttagcgtttgcttggcgcccataaaaagataaccagctattcttattacccaaggctcccaaattttacgatgccatagaacataattcggcacggctgccaaaatgtacaaataagactgacactttggcacttgatcattcgcaccagatccccgcagttgttaagatgtacaaattactcggtttggtaagttaaagaaacccttaaaacagttcttaaaccaagttgcctttggattttgaaggtttgtggccacaaagtcgtatctcaacattccttatatcatttcagattgccttggtggcctttccaatcgcttggatccaggcagactgtaatgtatgccagtcaaatggagcctcctgcatcaaccagaccgcatacaatttgtgcttcggctccactcagccgaataccaaccaaaccttcgtctgcacggatggcctggtgtgcacggaccagccagtgatctgtttccagaggggcgagaatcccgccagttgcggcgacactgatagctgtggccagtgtgctcccaactacaccttcgcctgcacctcgcgctcaaccttcgccttctgctttggcgccataacgcccacaaatgtgacgggcagttgcccggatggttacttctgtgacgcctccacccaggagatctgcgtcaccaaggccactgatgactccatcatctgccacttgaattagcctcgctaattattggatataaataaatgattttgcctaataatatattgcttttgttattaaataaaattcgttttgggtaaatggatttaaaagcgttttttatatacacctactttattagatgcatcggaactgatgttatgcttaaaactaatatataaaataatttatcagtaaaataccccttatattgccaagtctataatggcaaaataaactataagtctagaaactcttccgaattttccgtattttttttctccagccaggagcgtgcaatccgcatcgagggcaggcggaagcgccactcgtcgcaacagtacttgtacacctcgtcgcccagttgaagtagttcggtggcaaactctcgctcgtcatccttccaagtgcgttcctcagagccgccgaacatttccatgcgcagcaatgcggccatcgtgggccccacgtatttctttattgccatgtatagctggggtttgcttagagaaagagcagtgggtttgattgcagctgaagtccacggggactccgcttgcagtcgttttagtttggcattctcctcagacagcttttcaaactcggcctgcagtttatcgtactcctgaagaagcttatcgcgatgggcatcttccgatgaagatggtttttcatctggttcagactcgtcctcactgtcagtactaagtggtatgttctcttcaaggtttagaaaagattcagataaggtttcggaaatggaatcactctgactattttctttgctagaactaagattaatttggatggattgggtgggtttctccaacatcggagtcttctgctcatcccagaatttctcttgcaattgtgtatatcggttcaatatcgtaccgttctcaggtgaagcgtgggagtcagtcttttgtgcttcttggggtagcttccttttcttagcctgctccttggtggattcatcttcgttcagtctatcagcatctgcctcctgcatcccacg

SEQ ID NO: 36776 - DNA, 438 bp, DROSOPHILA
atgtacaaattactcggtttgattgccttggtggcctttccaatcgcttggatccaggcagactgtaatgtatgccagtcaaatggagcctcctgcatcaaccagaccgcatacaatttgtgcttcggctccactcagccgaataccaaccaaaccttcgtctgcacggatggcctggtgtgcacggaccagccagtgatctgtttccagaggggcgagaatcccgccagttgcggcgacactgatagctgtggccagtgtgctcccaactacaccttcgcctgcacctcgcgctcaaccttcgccttctgctttggcgccataacgcccacaaatgtgacgggcagttgcccggatggttacttctgtgacgcctccacccaggagatctgcgtcaccaaggccactgatgactccatcatctgccacttgaattag

SEQ ID NO: 36777 - protein, 145 aa, DROSOPHILA
MYKLLGLIALVAFPIAWIQADCNVCQSNGASCINQTAYNLCFGSTQPNTNQTFVCTDGLVCTDQPVICFQRGENPASCGDTDSCGQCAPNYTFACTSRSTFAFCFGAITPTNVTGSCPDGYFCDASTQEICVTKATDDSIICHLN

SEQ ID NO: 36778 - DNA, 2753 bp, DROSOPHILA
ttcaactggtgtcagctgcatattgaggaaaatcaattagcagagatgattactgcgaaacagaaacatccggctgacgatggttgatgagtgagtcagtccaaagtcttggccgcgtgggtttggcatgtaaattgcgtctaagcctcgtctggttggtttggtaatgagtcgaaagcccactttaaccagttgatgaaggaaggaaaagatatggccaagtttggcattttgtttacagaatttcataactagcgtgtggcttgatatctttttatattcttcttcaagcgattccaaaacaagttatttatttaaagtgttaaaataagtagctatgttgtgaggcctgaatttctttactgtaccatccacaaatgtatttattatttaatacccgttgaataatgtaaaataccctaattcaacatattgtagcttacttccatttcgactgattttgttttctttctttaagcccgctccccgttttagccatgtgccggccataaaccgaagacacgcttcctaattgaaaacagagccagctaaatggatgcgtagcaagaggccagaagagcgagcgagagggcgagtgtgtgcgacagagagagcgagtgcgagacgatcgtgatttggattttcagcgtgatatcaaaacggagcggacagcagtcgagcggtcggtcgagaaaacaaaacaaaaaaaacaaaaatcacgccaaaatgttcaacaccacaaaaatggtttacagttatagaattttatggctttccggcgttttactaggtgagtagtggcctcaataaagacttcaatttccagtcaagtcgagacacggagacacaaattaaatgctaagtgcgtcgattaagccactcggttaacgctaacagtctgtcatcggtcattgttttgtttttctttttttccctccccattttggcccactcggagtgtttgggccatgcgtgagccaaataacttaagaaattggccatggtcaatgtgggcgaaagaggaggaagaccagcgaaaaaggcaaacaaacacctggccggccaactgggggaattgcaggtgcaaaagggtagctttggcttcaatttacaagtagcttttaaggagcttcctctgcagtgaactatgttaactcatcaagtattcaagttaaattgaatctatgtatttccaggtcctattttgctggccgccattgcggttcaaggccaagagccagccagtccagtatttcaaaatcacaagacgaaggaatggacgaatttagataatataacattctcattcgattgcaagaggcgttctgtgggcttctatgccgacatggagtacaattgccaggtgagaaaatgtggaagtatctctctctctctctctctctcaggaaaaagaagggaaagaagcttaatccaagctttgaaattgagttttcctatagcctaaaagtatactatatatatatgcactcaattcaacagatctttcacatgtgcgacgaggagggcaatcggattccccatctgtgcgccaatgagacgagctttaaccaggagtacagaatctgtgattgggactacaactttaactgcacagagtcacccgtaagttatgaaatacctcgattccttggaacatatacttatgagctatctcataccctagaaatggttctacctgaacgaactgacctatgccacagatccgccagatgaagatgacgaggattactgaacgatttgcacttaattaaatatttattgtgtgtctccaaaagcaaacaaactaattaaattaaacgccgtatgcaaaacgctgagtaattgtaactgaaagcaaaaaaaaaaaaaaaaaatagtgtgaaaaccagtaaaattccatccaaatgagataaactaatttaagcgccttgttgacgattttgttgagtttcgttttgtacatttgtattgtagtctaattaattgagtcgtgcgagaggagtcgtgttgtgtatataatgtatatagagatggtccccagttccatttccattcaaactacaaatccattctataactataactttccattcgatatgcccgaaacaacctcggatgggtccgccacattattatataatttacaaataatcttcgtatttgtaagcaatcttaaatcgaaataataaaaaacaaatcaaattgctacgctaatgcttgaccaattaattgacttaacaaaatgttttcacaattttcggtaatttcaattcgtttattgttgttgttgcacacgtcacggaatccaccgcgcaccatcatctgaatttgtacctatctatctatgggtaaacaaccccccagaattatggttgctggtaccgcacgtaacccggatgagtcaagttcaatgacgaaagttctggcccagaaaaaacaaggtttatttaattgcgaaaattggcatctgtcagcggggcgtaaaattgtcgcctctctcgcgtcaaatttttaataaattggaatgcccgatttcagaagagttagtttgcaaacgattctctatcaaaatgtcacactatatgagctatttttcactgctgctcattgcagtcctgctggcggtgagtcctacataaaatattttctaatttctatgatacatatataattttttttaataatttgtagctggcatctgctcaatactatacacaatataatccctactacacaccaagccccacattctc

SEQ ID NO: 36779 - DNA, 450 bp, DROSOPHILA
atggtcaatgtgggcgaaagaggaggaagaccagcgaaaaaggcaaacaaacacctggccggccaactgggggaattgcaggtgcaaaagggtcctattttgctggccgccattgcggttcaaggccaagagccagccagtccagtatttcaaaatcacaagacgaaggaatggacgaatttagataatataacattctcattcgattgcaagaggcgttctgtgggcttctatgccgacatggagtacaattgccagatctttcacatgtgcgacgaggagggcaatcggattccccatctgtgcgccaatgagacgagctttaaccaggagtacagaatctgtgattgggactacaactttaactgcacagagtcacccaaatggttctacctgaacgaactgacctatgccacagatccgccagatgaagatgacgaggattactga

SEQ ID NO: 36780 - protein, 149 aa, DROSOPHILA
MVNVGERGGRPAKKANKHLAGQLGELQVQKGPILLAAIAVQGQEPASPVFQNHKTKEWTNLDNITFSFDCKRRSVGFYADMEYNCQIFHMCDEEGNRIPHLCANETSFNQEYRICDWDYNFNCTESPKWFYLNELTYATDPPDEDDEDY

SEQ ID NO: 36781 - DNA, 4242 bp, DROSOPHILA
ctcggctgttgcatcactggagaaagactttcttctttgttttcccgcatgcacaagaaattcaaaacaattttctcgctcagttaaatttgaatcaaggccatgcttaaatagatttccttttacagttttacccaaatccaattggacacaaaggcacatggcctactaataaaaaagcgaatcattcacaacaaagaggcctcacaaagggccatcaatcgcattttattaagaaaagcaaagcgaacgcaaatcatgtcgaaaattcttggcatctgtattttggcatgcaaattcttttgggccagttaattaaagcatcgccaacgttttgacgaatattttttttagggaatgaagccaaccgttagctccacataatttgtttaccttttgttggggttattgttttggaaataacatagttccattcccatggcatcttagtgattaggtataacaattatatttttggtttcttaaagttctgcaggtgaattgaaaatggaaagcttgtgagcaatgacttttcgctttttggtattcgtagctaagatattttatgggcttatatctaaatttcactaagtagaagtgaaggttgcttaccttgtttttaaagaaattcggtgggaatgttaaagactcaatgatttgtagctttggtgtgttgccattatgcttttaaattacatactatgttataatgtgaactatttaggtaaatcacatttaactcatattaacttgtcaccaaacataaagaattatccaaagatattattggttaaacgtccaacaacataacctgcttaaatttcactttgtctctatccggctgactcgttagtatataaatcaccattttatacaatgcgacttatttttgcaaccttttaaatttacatataaattgctatctgcggcacactaaaaatatctttagcgctaaaaaattttggattacacaatagtggggttcagcttaaaatgggaaatgctttcgcaccaagacgagaccataaaacattttacggctcaagccgttgaaatggttcaaagtggattctaaagtgcgtttcacgactcgacaaggtggcaacaggttcgtttcctaagtcttttgtttacgcaacatccgcacctcgctatgatgaaatggcctttttacttggacaatgagagacaaacactggcacatactgatataatttctctgttggttccactttcagtttctcacaaagagttcaagtgcgcggcactcgttgctgctgcttctgttggccttttgctgcctgagcaatgcctttgcagccaagataacgaagaaggtcgaaaaaacgtcggaaaagccagaggtggaggctgctgcatcgccaatcgaggaggaaaatgacgatgaagatgctggcgaggatggtgatgacgacgacgacgacgaggaggaggagacgggggaacctgcggtggatgcggctgacaaagaagctgcagtaggggcatcgagtaacaagaaccccaatgcagtgcaggcagccacggatcccacagatctcagtgtctggggcatggttcgcactctgtggggctggcttcgtagcgatctgagtgaaagcctattcggcgatgacgacgacgggaagcccgcgtccggcagctcagctgtgggtgagtccccctcaagaaaacaaaagattaaaaaagcaaataccgaacaaaacgcagtttaaagaccgatacaccgaaaaaaaacaagaccgagccaattgcatttacatataaagtcaatttagtcattttgacaaagtaacagatgttttctaaataataccatattaaaaactaattaggaaactgtttgtcttcatacctctatcaagtacttacttgtaaaattacgaagctgtcatacagtttacgtttggtatgatgtaattgaaatttcaattccacatgtaatttcatttgatgtaagccagattaagaccttttttctctttgtggacacagcaattagtgtggtcatttaataacagttcagtgcgtatctcatttaggctgattgcatctgcccctcgaatgattagcggcttttcaaatcaaatccgatttcccagagccctgactctcttgactcactttcgttttcaatgaaacctgtagccgctaagcaaacagcaaaaagccgctaaaaggtgttagcaccaaagagctgagaaaaaatcatcttggagtgcgagttgtgataaatgtatatgccggacgacgattgtaatttcactttccgcatcttttctagagccgctcaaattatttattaaataagacagctcatctttgagcgatgagaaaatatttttgctgcgtttttttttttcgttgtttgcgaattgttttttattggactttcgcatagctgagcgttcagctctgtttattgatgaaattatagcagttgagggagataaacccaacggaatttcattgggccagtagcgccactgacactttacgaattaatgcgtttttttaatgaactttagctaaatgaattctcagaattttttattaattaacctatttcatttatattataccttcaggcataccttcagaaattaatattattaattcttttacatattttatttatactggaatttattttgtgtctttcagagggtcgtacctttggcaaaatccgccgtcttcaaatggctttgatacccattatctttaagtttggcgtcctttcggctatggttgcctttctggtcgccattggtatgaagtctctgttcctgctcaaggtcttagtggttatgaatgccattgccattctgggaaagttcattaccctgaagtccagtctatttggacagtatgagaacacggcgccgtccttcaattacccgggctggaatcctcatgccaaggagtcgtggggcaccactggattgagtggtcatggcgctggtcatccacccagcaaggagattcacctgcacatccacggaaatgcccagacccaggctcagctcgccggtcagggctatcagtatgaatcgcagtcgggtggatgggccagtcgatcggatccctatggagcctatgcacccacgggccaattcaccgatagccagcccgtgggagcagtggccggagaggtgcccaacaatacggatcccatgtccctgctgcccacgaaatatcgggcgagacaactcatccgctgagcaagagctgttccacatgatgggagttccacatggaagtcaacgaccaccgcgtttaattagctagcacacatttagtcagcgactttacgaggacgcagctttacttacacctaaaactatagttacgagcctagtgtttaattaaattatttgccccaagtagacttaaaatcaatgataatttgtaataaatagtcgtaatgcaaaagatgtgtgccaccgtttgtttgagctagccgaaacaattaccgctaaagacgcagaaggtcgtgattgatgggtctgcgaagaaagtcgattggttcgttttgggttgtttttggctgagctttttcgggggtctgtgattaattggccatttgacgggtgagtctgccaccgcagagatttctttggcaacatcttggggcgtgtgccgcgcctaatcatcggctttatcgcgaacattgaaatggaagtccaagtcatgtcttgacattgcggatttcgtgttttgttgttttttattttgcggtagcctaaaggctgaaaaacgattccccaagcttaagccagacatatccaattatgctcaattattatagagtggataagccgatttgcttattagcaactacccatttttgagcttcgcttcatttgttacaaatatttgaacaaagtgaaagattgactgacttaatatggcatggaacggttaggtttgagtaattgcaggcatttctataacgctatttagttgattgagttattatatcggttaacatgagtgatgattgatggaatacagcttggagtgtgaatggtgttgatagaaaaacatatttagatattcacatgataaacgatagccgttgacaaacgatatagataaaagtttaaaagtaatacacaacattttctaaaatctacagaaaattaaaaaataaattacaaattataaattgaaaatttaatcactgatgtgaaaaaccttagcagttgccagatgagtaga

SEQ ID NO: 36782 - DNA, 1050 bp, DROSOPHILA
atgctttcgcaccaagacgagaccataaaacattttacggctcaagccgttgaaatgtttctcacaaagagttcaagtgcgcggcactcgttgctgctgcttctgttggccttttgctgcctgagcaatgcctttgcagccaagataacgaagaaggtcgaaaaaacgtcggaaaagccagaggtggaggctgctgcatcgccaatcgaggaggaaaatgacgatgaagatgctggcgaggatggtgatgacgacgacgacgacgaggaggaggagacgggggaacctgcggtggatgcggctgacaaagaagctgcagtaggggcatcgagtaacaagaaccccaatgcagtgcaggcagccacggatcccacagatctcagtgtctggggcatggttcgcactctgtggggctggcttcgtagcgatctgagtgaaagcctattcggcgatgacgacgacgggaagcccgcgtccggcagctcagctgtggagggtcgtacctttggcaaaatccgccgtcttcaaatggctttgatacccattatctttaagtttggcgtcctttcggctatggttgcctttctggtcgccattggtatgaagtctctgttcctgctcaaggtcttagtggttatgaatgccattgccattctgggaaagttcattaccctgaagtccagtctatttggacagtatgagaacacggcgccgtccttcaattacccgggctggaatcctcatgccaaggagtcgtggggcaccactggattgagtggtcatggcgctggtcatccacccagcaaggagattcacctgcacatccacggaaatgcccagacccaggctcagctcgccggtcagggctatcagtatgaatcgcagtcgggtggatgggccagtcgatcggatccctatggagcctatgcacccacgggccaattcaccgatagccagcccgtgggagcagtggccggagaggtgcccaacaatacggatcccatgtccctgctgcccacgaaatatcgggcgagacaactcatccgctga

SEQ ID NO: 36783 - protein, 349 aa, DROSOPHILA
MLSHQDETIKHFTAQAVEMFLTKSSSARHSLLLLLLAFCCLSNAFAAKITKKVEKTSEKPEVEAAASPIEEENDDEDAGEDGDDDDDDEEEETGEPAVDAADKEAAVGASSNKNPNAVQAATDPTDLSVWGMVRTLWGWLRSDLSESLFGDDDDGKPASGSSAVEGRTFGKIRRLQMALIPIIFKFGVLSAMVAFLVAIGMKSLFLLKVLVVMNAIAILGKFITLKSSLFGQYENTAPSFNYPGWNPHAKESWGTTGLSGHGAGHPPSKEIHLHIHGNAQTQAQLAGQGYQYESQSGGWASRSDPYGAYAPTGQFTDSQPVGAVAGEVPNNTDPMSLLPTKYRARQLIR

SEQ ID NO: 36784 - DNA, 4801 bp, DROSOPHILA
ttgaaagaaaagttactttttctgtgagtaggcaatatctgttttaaaatattcccccttaccaatttgaccttattggtggttactttaagtgcagaaagaagcaaaagtacttcacattaacctttaccttctttccgaattcgagtgctccgagtgttcgccaaatgctcgccaaacttcgattgcgcaagtttgcctgaccagcacccccaaaaccaacaaatgcgaatccgtcagcccattggggcgccgatctcgagctgctcctcctccagtggagcagttcaacgtctcggccggatttcaagttcaaaccagctgccaatggagcggcgactccgaccttccgacaattacatgaaaatgctgcactcaccatttacggatgccatcgaaattcgcagtggagatcaggcggagaaaaaccaaactgatgagctggagcgaaattaaagatctctattggattagcttcttttacccgaaagaacttttcccaaattttcccaagaaattattttaataaaatcgcatattaaatgatatatctgtgatatatgaacgaacttaggccccttttctctcagtgctggtgcgtgccacacaagtgtgaagcgatgacagcaatttgttgaatgcatcatcgctcaaatgcgatcgctcgaatgcctttaattgtagaactaggttaagcatctgagactcatccctaaacagtttggcccaggtcagtagcgaagctatcgaagctattgtcgccatagtgtgtatgcattgctattcccagtgctgcagttgactttgacactgatcgcgatcgcgattgcgaatgcgatcgctcccccaattttgattccgaatccacccaaaatccgtataaatatgcggagcacactccactatcgatcagacagcggtcagctttggtggtggtcagcagtgattggacacacagctaggatttttgacttcggattggtaacaggattagaacaggatgttccgaggagtgctggtgctcctgctggtggcctgcagccaggtggatgcggccacccatgtcaacatctcgattgcacagcaaccggccacaaatccggcggatgtgaagtacgtcgatggtatggctccggccgagctgagggcgggtcctcagagggatgaggatcagcagtttcaacgcatccaggagcgacagcagcaggtgctatcccagtcccagcaacaacagcagcaacaggtgtctcaaacccagcagcaacagcagccccagcagctgtctcctcgccagggattgggattgcagccgccagctcagggtcagtcacctatgtccaagaacggacgactgccccgtcgccggaatcacagccgacgcccctccatccaccagcagccgccgagtcctcatagtggccagtttcgacagcgcaaccagcagctccgccagaaccaggagttcgagcggtacatccagtcctaccacagccatggtcccaccgtggagacggtaaatggaaagaaagtaacatgttgagccagcaagttaactaccttaccttccaggtctacgagtcatcgaatccgtccccgcagcgctatactcaaaccagctccggaataagttcgtcctcgtcagtggacgatgctgctccccagaaactggtgacgattggaggacatcggtcgcagcagctccgcatgttcgagcgccaagttgctgctcccgttgctacccaaggacagagtgcaaatgtggaggcggcccaggacagcaagcccatctacgagccccagcaggctcccattcaaacggccaacattgcgccggcggtgagctccagttcatcctcctcctctagctccgtctcctccgcatcaagtcaacctgctgccccggcgcccgctctgccatctgatacttcatctgcctacgactccgccaccagctataatcgcccaagctacgatcccaatggcttcagctacgaagatggacaggaagtggaataccaggatcaatatccgccagaggtggatgatggccaggggtacgaggactatgccgatccgtcgggctaccagggaggttcgggctacctgccgcctgctcctgccagaggctatgctcctccacagcgtccccttgtcaccaagaccattcaaatagtgcagccagctctgaaggccaagaagtacgaagtccgtcatccagccatccaaaaggagttctacgacatcgaggagcgagtggtgatcaagccggcgggaactctggtagtcgagctggagcatccggttgccaagattcccaagggagaaaccctgctgcctttgggacatccccatcctgcagtggcttccgcctacagcaacagcaataatggtcaaatccagtcgtcgacatataacaacaatgtgcccgagtacaggccgtcctatgatgcagctccagctcttgccaaggatcagcagcccaccaccatcggctccagtgtgaccacaatgccttcctacgatcagcagcccaaagatgatttcgtggagtcccggctgcaacagcagcagccactcggagatgtcaccgatggtggaaagagctcaccctccttcatatccggagtggatgctaatggaaacgccgtcaagatcaacgccaagcacctctcacccaagatgatccagcgtgcggaaccggagcaggattactcccgatcgggccagagagtctatcagcagaggaacaacttcaaccgccagccatacaaccaggacgacgactacttctccggcgaatatctgcccaatgtgagtgccggcagtgtggaggccaaaccagcgcgactggagctggcggaggagaaggaagacgagcgacctacccagataatcaagcacgagcacaagattcacttgccgccctcgcagcacaacatttacctgggacgcaccagccaaacgcccctcaaggagcgaaggatccaggaggtgcccgcccaggtgaccgagataaagccctacctcaggaaccacgttggacccactgtgttgtattcaaagtcacaaactcccaggacgtactacagccagccatcccggcagcgcgttgccgaggagctggactacagtgctccctactcccagatgagattcagccccgacaaccactcctccagactcgtccagtcgccccaggtgcgatacagtacggagagccagtcctcgcggctggttgaggcacccaaaccagaggagcagaagcaggagccaaagaaggagcagcaaaacacccacatccaaatccagatagccagtgaccaggagaagtctgcagtggtggccaccactattgctccggactgcgacaggggacagcagagagcagagctgcggcagcagaagtcccagcgcctggtggaagcacccagttccgaggtatccgccacccaggctactccgtcccaatcgaagccccagccggatgtggacgtctcgcttaatggagccgctggccatctgaaacccaacgagagggtcatcgcagcaacagccgcgccaacagatgcctccgccaccagcgagaccttccacaagcgccgcatcgttgtcaatcatccattccagacggtacgcgaagtggtcgagcacgagcccttcaccaactaccatcagattcaggtgaacgagccggctccgccctcgcactaccaccaggcctactaccaaccggcgctgcagacccacgggagtttggtccatttccagacctcgtccgcccatggcaatctatacggataaggaattaggattagggaaggatccgaagtcgaccaacgaacgaacccggccaatgcacttcctctgctaatcgttatcttagtgttaggctagatgctaaacttatcatgtacgcaaatccggtggaagggccctttccatgatgacatgaccctgatcttctttcgcattaatttgttataaacgcgtaggcttaagtgcagttttacttgccaacaataaagtgcatatataatgctaaaaatgattttctcgtcttgatttgccatgtatatatatataatatatcacatatgtatatggctatacaattgttatataagtgttttgtttttggttaggctcaaggcaatatatagttatatatgagaagcatagaagataataaaattcgaaaatccttgaaatgctttgagctttgcttctctagtttcttcaaatttaaaaaacattcttcttacgctgatatcgaaggttcctctaatgaacgcttttgattttgttacgcgcgtttgggcttttcaagaggctcatcgtcactggagtagtcggatgcgggactgtgagcaacctttttccccctaggaggttcttcatcactggactcgtccaacaggtgtgttccagcaccgatcaatacattggcgatcttttctgttcgggcggagattgcaacaggatcctctgttgaagtggacagcacggcagccgtgataagcgtcgacgtggagggcgcgtccagttcaggttctaaaatgccaaaaatcagaatatgggcttaaccaatgacgatctttcctaccctgctcattgagcaagccatgattggcctcccgccgcttggtcactacaactgccgtaatatagaaggtgaaaatgggcagcaggacaactacgccaacggcgatgagaaaattggtcagcttcacctcgcgttgacagcatttcagcgttttcgaccaattcagacgagtccggttcatctaagcaaaagtaaagg

SEQ ID NO: 36785 - DNA, 2745 bp, DROSOPHILA
atgttccgaggagtgctggtgctcctgctggtggcctgcagccaggtggatgcggccacccatgtcaacatctcgattgcacagcaaccggccacaaatccggcggatgtgaagtacgtcgatggtatggctccggccgagctgagggcgggtcctcagagggatgaggatcagcagtttcaacgcatccaggagcgacagcagcaggtgctatcccagtcccagcaacaacagcagcaacaggtgtctcaaacccagcagcaacagcagccccagcagctgtctcctcgccagggattgggattgcagccgccagctcagggtcagtcacctatgtccaagaacggacgactgccccgtcgccggaatcacagccgacgcccctccatccaccagcagccgccgagtcctcatagtggccagtttcgacagcgcaaccagcagctccgccagaaccaggagttcgagcggtacatccagtcctaccacagccatggtcccaccgtggagacggtctacgagtcatcgaatccgtccccgcagcgctatactcaaaccagctccggaataagttcgtcctcgtcagtggacgatgctgctccccagaaactggtgacgattggaggacatcggtcgcagcagctccgcatgttcgagcgccaagttgctgctcccgttgctacccaaggacagagtgcaaatgtggaggcggcccaggacagcaagcccatctacgagccccagcaggctcccattcaaacggccaacattgcgccggcggtgagctccagttcatcctcctcctctagctccgtctcctccgcatcaagtcaacctgctgccccggcgcccgctctgccatctgatacttcatctgcctacgactccgccaccagctataatcgcccaagctacgatcccaatggcttcagctacgaagatggacaggaagtggaataccaggatcaatatccgccagaggtggatgatggccaggggtacgaggactatgccgatccgtcgggctaccagggaggttcgggctacctgccgcctgctcctgccagaggctatgctcctccacagcgtccccttgtcaccaagaccattcaaatagtgcagccagctctgaaggccaagaagtacgaagtccgtcatccagccatccaaaaggagttctacgacatcgaggagcgagtggtgatcaagccggcgggaactctggtagtcgagctggagcatccggttgccaagattcccaagggagaaaccctgctgcctttgggacatccccatcctgcagtggcttccgcctacagcaacagcaataatggtcaaatccagtcgtcgacatataacaacaatgtgcccgagtacaggccgtcctatgatgcagctccagctcttgccaaggatcagcagcccaccaccatcggctccagtgtgaccacaatgccttcctacgatcagcagcccaaagatgatttcgtggagtcccggctgcaacagcagcagccactcggagatgtcaccgatggtggaaagagctcaccctccttcatatccggagtggatgctaatggaaacgccgtcaagatcaacgccaagcacctctcacccaagatgatccagcgtgcggaaccggagcaggattactcccgatcgggccagagagtctatcagcagaggaacaacttcaaccgccagccatacaaccaggacgacgactacttctccggcgaatatctgcccaatgtgagtgccggcagtgtggaggccaaaccagcgcgactggagctggcggaggagaaggaagacgagcgacctacccagataatcaagcacgagcacaagattcacttgccgccctcgcagcacaacatttacctgggacgcaccagccaaacgcccctcaaggagcgaaggatccaggaggtgcccgcccaggtgaccgagataaagccctacctcaggaaccacgttggacccactgtgttgtattcaaagtcacaaactcccaggacgtactacagccagccatcccggcagcgcgttgccgaggagctggactacagtgctccctactcccagatgagattcagccccgacaaccactcctccagactcgtccagtcgccccaggtgcgatacagtacggagagccagtcctcgcggctggttgaggcacccaaaccagaggagcagaagcaggagccaaagaaggagcagcaaaacacccacatccaaatccagatagccagtgaccaggagaagtctgcagtggtggccaccactattgctccggactgcgacaggggacagcagagagcagagctgcggcagcagaagtcccagcgcctggtggaagcacccagttccgaggtatccgccacccaggctactccgtcccaatcgaagccccagccggatgtggacgtctcgcttaatggagccgctggccatctgaaacccaacgagagggtcatcgcagcaacagccgcgccaacagatgcctccgccaccagcgagaccttccacaagcgccgcatcgttgtcaatcatccattccagacggtacgcgaagtggtcgagcacgagcccttcaccaactaccatcagattcaggtgaacgagccggctccgccctcgcactaccaccaggcctactaccaaccggcgctgcagacccacgggagtttggtccatttccagacctcgtccgcccatggcaatctatacggataa

SEQ ID NO: 36786 - protein, 914 aa, DROSOPHILA
MFRGVLVLLLVACSQVDAATHVNISIAQQPATNPADVKYVDGMAPAELRAGPQRDEDQQFQRIQERQQQVLSQSQQQQQQQVSQTQQQQQPQQLSPRQGLGLQPPAQGQSPMSKNGRLPRRRNHSRRPSIHQQPPSPHSGQFRQRNQQLRQNQEFERYIQSYHSHGPTVETVYESSNPSPQRYTQTSSGISSSSSVDDAAPQKLVTIGGHRSQQLRMFERQVAAPVATQGQSANVEAAQDSKPIYEPQQAPIQTANIAPAVSSSSSSSSSSVSSASSQPAAPAPALPSDTSSAYDSATSYNRPSYDPNGFSYEDGQEVEYQDQYPPEVDDGQGYEDYADPSGYQGGSGYLPPAPARGYAPPQRPLVTKTIQIVQPALKAKKYEVRHPAIQKEFYDIEERVVIKPAGTLVVELEHPVAKIPKGETLLPLGHPHPAVASAYSNSNNGQIQSSTYNNNVPEYRPSYDAAPALAKDQQPTTIGSSVTTMPSYDQQPKDDFVESRLQQQQPLGDVTDGGKSSPSFISGVDANGNAVKINAKHLSPKMIQRAEPEQDYSRSGQRVYQQRNNFNRQPYNQDDDYFSGEYLPNVSAGSVEAKPARLELAEEKEDERPTQIIKHEHKIHLPPSQHNIYLGRTSQTPLKERRIQEVPAQVTEIKPYLRNHVGPTVLYSKSQTPRTYYSQPSRQRVAEELDYSAPYSQMRFSPDNHSSRLVQSPQVRYSTESQSSRLVEAPKPEEQKQEPKKEQQNTHIQIQIASDQEKSAVVATTIAPDCDRGQQRAELRQQKSQRLVEAPSSEVSATQATPSQSKPQPDVDVSLNGAAGHLKPNERVIAATAAPTDASATSETFHKRRIVVNHPFQTVREVVEHEPFTNYHQIQVNEPAPPSHYHQAYYQPALQTHGSLVHFQTSSAHGNLYG

SEQ ID NO: 36787 - DNA, 3167 bp, DROSOPHILA
tgaagtgcaaaactggctgggattcgtcggaggagtcctgcgcagcgccatatggtggttggtgatgcagtgcgccctccactatttctatatacactacatgtcgcgggatgtgcgaatggtggagatgatggactcggtgttttggcagcactccgccggctatttcatgggccagttctttttcctgtactacgtggtgacatacggcttgggaatagcttttgctgtgcaggatggcatcccagcgcccaatagaccgcgctgcatcggacgcatccacttctactcggacatgtggaagtacttcgatgagggtctgtacgaattccttttccagaacatttacgcagagctgtgcggcaagcgatcatcggcagcggccaagttcggtgccaccgcattgaccttcgcctttgtgttcgtctggcatggatgctacacctatgtgcttatctggagcattctgaacttcctctgcctggctgcagagaaggtgtttaagacgtttaccgcgatgccggagtaccagcggtggacacagcgtcatctgggagccgtgggtgctcagcgcttgtacgcaatgctggccacccagctcttcattccggccgccttctccaatgtctactttatcggcggacaggagattggagactttctaatgcgtggcgcctatcttagtggagtgggcaactatgtggcactctgcttctgcagctattgtttttttcaatgctctgagttgctcctgaccaagtcggatggtcgctccaagaccaaaactttttgacctcgccaaaagtctgtctagatttacgtgaatctgactacttatgaacgaacttgtattataagacggctttagaattgttttgtgttttcacagaataataatttacttaattttcactttaacaaataataaatatataattgtatataatacaatgagttttttatctgttcattctaccttccgccttctcctagtatcctttcagtccagccacctggtttgcgtgcaagtggactgaaagttgtcggggaagagttcgtccattatttcatcgcatgtctgcgtgtgctgcgtgttgtacagaccatctggccagtgagtttgggtttggatgtgggacagccccagttcctcaaacaaatcgtcgcaagtttgggtgtacatgtgggcagaggtttgcaagtcaaacataggttcagtttctgaatacgcgtggaaatggcttccgaccgcaacaggctcctgttcctctgggaaatcatcggtcatcgttcctatgtcgcctctggtgtcgggcgtttgggtttctatatcgcgtaacaagggcgccagcacttcgttcctgatttcattcagatcgtcctcctccgtttgtgtttccatatctagtttctgggatgacatctctagcgcataggacacatccataatgggcaggaaacaaagaatatgttcctctgcagccggtaaattggtatccagttcaagagtggagggcatattggcctccggattgggtatttcagcatatagttcagtaacccccgccaagttggaaggcaggttgttaatatattcctctgacggatgtaaatcactgcctgttttcaaactgtgggcggttaaggaatctgcagaaacgggaattggctgtggattcagccttttccatgtggccagcgagggtatgggaaccttgtcggattcgtgatgcaccaaatggttcttgcgccgcatgtgggtcctgaggccagccttgctgttgtaggtcagttcacacactggacacttgtgttttgagcactgatgcttctccagatggtgctgcagcaggaatttcccgccgcacgccaggcacttgtagttcttgtccaggtggctcttctggtagtgctgtcgcagcaagcgcaagctggtgaagctgcgggctcccttggtagccacatggtagatgcacttttccacggggcaatggaatgcgacaattggcccgatcacagagggtgggataacctcctggtggcgccgtcgcaggtgcagctgatagtgactgaggttgccaaagacaagactcggacatctctcgcacctgtgctccctaacgggcattaattcccgaatatccggcgtgtgtttttcgctgtgcatttcgatggcacttctattgtatgggaacggaatgcaatcgatacaagaaaaatcgaaagttatcgattgccttgctacggtatttctgaacgatacttgtaacggtcactctgcaacgtatctctctcggggtagtaaaatacgaggtaacgatcactttcgaaagaatatttgtgcaggtgcgacaagctaaaaataacaaccaaatatgggcagcgaagaaaacgggcccaaacatatttagataaaactcaaatcagtttaaagtggaccctcgtatgtgcacttatacttatgccgagatgtatctgcgtgtgcgtccgaataaaaagtactttaaatttaagcgcaaattaaatcggaatatttttctgtggttatatgtgctatatggtgtaatccatcgcatggtgtagtgtgataatatcgagatatttaattaccaacgaatgcaacaagctgtttcaatccaatccacccacccacaccaacacacacacacctgtaaacccgttgcctgttgctcttgttttgccacgccccccgcgtccttgccgcgccctgaagtggttatttttggcgcgactacgtcatctgtgacatctgaatcggtcgaaaacatctggcggtgcgaaagatagtgtgcggaatacacatcatccaaagcaacttcatcatcatcacgatcgttattgaatggagggctgggtttacaaaaagcgatcttaaaagggcgtacccaaggtcgtccaaactcgaatccagttctatccacaaacagtgcttagattccatagtaattgtgcgcaatttcaccacaatttacctacaaaatgtgtacaattattccattttctggtttacctacaatagtaattggatttacgttaatttcgttggatgaatacggccggtgggccttaagttcgattcataaaatttgcatgcggcacagagaaatacatgaaaacgctgcctgaaattaacacaaaggctaaaa

SEQ ID NO: 36788 - DNA, 1167 bp, DROSOPHILA
atgcacagcgaaaaacacacgccggatattcgggaattaatgcccgttagggagcacaggtgcgagagatgtccgagtcttgtctttggcaacctcagtcactatcagctgcacctgcgacggcgccaccaggaggttatcccaccctctgtgatcgggccaattgtcgcattccattgccccgtggaaaagtgcatctaccatgtggctaccaagggagcccgcagcttcaccagcttgcgcttgctgcgacagcactaccagaagagccacctggacaagaactacaagtgcctggcgtgcggcgggaaattcctgctgcagcaccatctggagaagcatcagtgctcaaaacacaagtgtccagtgtgtgaactgacctacaacagcaaggctggcctcaggacccacatgcggcgcaagaaccatttggtgcatcacgaatccgacaaggttcccataccctcgctggccacatggaaaaggctgaatccacagccaattcccgtttctgcagattccttaaccgcccacagtttgaaaacaggcagtgatttacatccgtcagaggaatatattaacaacctgccttccaacttggcgggggttactgaactatatgctgaaatacccaatccggaggccaatatgccctccactcttgaactggataccaatttaccggctgcagaggaacatattctttgtttcctgcccattatggatgtgtcctatgcgctagagatgtcatcccagaaactagatatggaaacacaaacggaggaggacgatctgaatgaaatcaggaacgaagtgctggcgcccttgttacgcgatatagaaacccaaacgcccgacaccagaggcgacataggaacgatgaccgatgatttcccagaggaacaggagcctgttgcggtcggaagccatttccacgcgtattcagaaactgaacctatgtttgacttgcaaacctctgcccacatgtacacccaaacttgcgacgatttgtttgaggaactggggctgtcccacatccaaacccaaactcactggccagatggtctgtacaacacgcagcacacgcagacatgcgatgaaataatggacgaactcttccccgacaactttcagtccacttgcacgcaaaccaggtggctggactga

SEQ ID NO: 36789 - protein, 388 aa, DROSOPHILA
MHSEKHTPDIRELMPVREHRCERCPSLVFGNLSHYQLHLRRRHQEVIPPSVIGPIVAFHCPVEKCIYHVATKGARSFTSLRLLRQHYQKSHLDKNYKCLACGGKFLLQHHLEKHQCSKHKCPVCELTYNSKAGLRTHMRRKNHLVHHESDKVPIPSLATWKRLNPQPIPVSADSLTAHSLKTGSDLHPSEEYINNLPSNLAGVTELYAEIPNPEANMPSTLELDTNLPAAEEHILCFLPIMDVSYALEMSSQKLDMETQTEEDDLNEIRNEVLAPLLRDIETQTPDTRGDIGTMTDDFPEEQEPVAVGSHFHAYSETEPMFDLQTSAHMYTQTCDDLFEELGLSHIQTQTHWPDGLYNTQHTQTCDEIMDELFPDNFQSTCTQTRWLD

SEQ ID NO: 36790 - DNA, 2786 bp, DROSOPHILA
tatagagtgtccttcaagctatcactaaacatgctaaccactttaaaggaagtcgaggtcacgagaaaacgttatgcagaggaggagctggaggtcgccaccaaagtgaaatgtgtttgatacaatagatacaataaagctgtgatttccaaacaattaaaaagagtctccttgtatgcatacttacagatgggtcgcaacaaggcaaacaacaagaaggttactcctggggccgccaagccaaagtcggctctgaacaagtccaaaaaggccaagaacgtattcaaagtgggcgacggtaacaagggcaagggcaagaagcccaaggaagtgcagggcaagctcaagcaggtgagtggattggctcctgctggatagaatcccatcacgtacgggcttaaattgcagatcaaggaatctgttaaagctaagcaggagaaattggacgccagcctgaagactctacacaaggatctggtggtgaagaagccaaaggcacctgtggcacccatcaagagctacaagaagaagggggtcgatgcccagaaagtgtccgacacactaagcaaactcaagttctaagcaactccgccggagaccatgtttcacgtatagatgcatatacgtattacgcatagatgtagttagtccccattgattgttaataactttggtgcaatgttgccagcagtggcaatgattatccaaaatatacgttagctattccgacagtgatgggaagtcctcagccaggtggagactacgtagccaaatacctcttgacctcttttaaagctagcataaattcagaatttcattcctgataagtataatatccaatgaataggcttggaaaataacagttgatccccaatttatttttacaaatattgtgcaactcttaccatacgagtgcgctttatcttacgtaattggtaagttgttatatgttgaatccttcctaggaatgggtgactccccatcactgtgctatggcagcctagacaaccacactaacagtgttaactgggggcaaaactgcacccggaatcgcggtaggtgcagcgggagttccaccagtggaggcttctaccgtaccattcacagcattccagccgaggagctctcggatgatgccatccaattgcacggtatcaatgcccgccttctgaagttcagccagaacctgtgtagtttccactgtagtcagccaacgttcatacatgactcgcaacccctgtaatctcgaccagaactgggcgaaaattccctgctgcaacaccttggcatcgatgtgggctcggatggcatacagtggaaagtagagctgaacttcgtttagaaatccttgccagccgaaaacggtgccggaccagtagggaaactggttcaatagactcactttgagcctctgctcctccaactcaaaggaaccgcccgaggccaggagctgctggtccgtccactgcagaaagagaatgagctccggctgcgagagcagacgccagcgggcagtgactgcggcattgctgttgataatccgcacgaaggcctggaactgggcatcgttgattaggtagcgcaccaagagctggtttaatggcttcgactgtatcagacgctggatttcttccagatcctgggatagagtgggtggtggagccaaggtagctggcgggcccggcgccaacagaccaacagttggaggcaccaactgaggagaccacagtgccagggatccactggccagggtaatcaggagaagccagtccagagcgatggccatatctgtaaggtggtgaccgaaagacgactaccaaaattaaagtcgcagaagcttttatatccagccatcaagatttgttattactgtctactgatagcgtcttcctgaatttggcgcagcatttctgttgaccattgtcgtcatctgataagcgcttttcgatctgtttatgggtctacccaattttaaatcccccacggaagtcagtgttttgggataaactggcgggttggtaaacatttggagagaaagtatgcgaaattataacatgctaagctttattttccaagtgaatcaccaacaatccggatggaccacatagaaccgcaaacgaacacttaataacattaggatttacatagctcctcatacatacacaaagcaaaccaaaactggggatttataggattaatcttttttcgattttagagaagttagttatccttgcgaaatgggctttggaaaacggatgatcgcagttaaaggttaatgttaatgaaagttaggtggtgttgatgattaatattcatggtttggttaataaactttggttttttcttagttcagggattttacgtatacagattctagtacgatgtactcggggggataccttcttctttaccttaagacgtatatataagtcgtatgtaataaaaactaacttaaccgataaacgcatgtgagtgtgggcaggagatgggatggctaactgggtggtctagctaccattcccggtgaacctgcggcgcagccagccgggcacataaccccgcactgcctcgcccagctgcctgtagatgataaggcccagaatgggcaggaccaagcgtgcgtccttgaacaagtacacatagcaggcgaccaggaagaggaccagatctgtgcagtagctgagagccgagcgaaccttctcgtgcgcctgctcctccgactggaggatggccagagtggctgccttctgcagcaagtccctgtcggcggcggagaggaccaagga

SEQ ID NO: 36791 - DNA, 786 bp, DROSOPHILA
atggccatcgctctggactggcttctcctgattaccctggccagtggatccctggcactgtggtctcctcagttggtgcctccaactgttggtctgttggcgccgggcccgccagctaccttggctccaccacccactctatcccaggatctggaagaaatccagcgtctgatacagtcgaagccattaaaccagctcttggtgcgctacctaatcaacgatgcccagttccaggccttcgtgcggattatcaacagcaatgccgcagtcactgcccgctggcgtctgctctcgcagccggagctcattctctttctgcagtggacggaccagcagctcctggcctcgggcggttcctttgagttggaggagcagaggctcaaagtgagtctattgaaccagtttccctactggtccggcaccgttttcggctggcaaggatttctaaacgaagttcagctctactttccactgtatgccatccgagcccacatcgatgccaaggtgttgcagcagggaattttcgcccagttctggtcgagattacaggggttgcgagtcatgtatgaacgttggctgactacagtggaaactacacaggttctggctgaacttcagaaggcgggcattgataccgtgcaattggatggcatcatccgagagctcctcggctggaatgctgtgaatggtacggtagaagcctccactggtggaactcccgctgcacctaccgcgattccgggtgcagttttgcccccagttaacactgttagtgtggttgtctag

SEQ ID NO: 36792 - protein, 261 aa, DROSOPHILA
MAIALDWLLLITLASGSLALWSPQLVPPTVGLLAPGPPATLAPPPTLSQDLEEIQRLIQSKPLNQLLVRYLINDAQFQAFVRIINSNAAVTARWRLLSQPELILFLQWTDQQLLASGGSFELEEQRLKVSLLNQFPYWSGTVFGWQGFLNEVQLYFPLYAIRAHIDAKVLQQGIFAQFWSRLQGLRVMYERWLTTVETTQVLAELQKAGIDTVQLDGIIRELLGWNAVNGTVEASTGGTPAAPTAIPGAVLPPVNTVSVVV

SEQ ID NO: 36793 - DNA, 6644 bp, DROSOPHILA
gcgggcagtgactgcggcattgctgttgataatccgcacgaaggcctggaactgggcatcgttgattaggtagcgcaccaagagctggtttaatggcttcgactgtatcagacgctggatttcttccagatcctgggatagagtgggtggtggagccaaggtagctggcgggcccggcgccaacagaccaacagttggaggcaccaactgaggagaccacagtgccagggatccactggccagggtaatcaggagaagccagtccagagcgatggccatatctgtaaggtggtgaccgaaagacgactaccaaaattaaagtcgcagaagcttttatatccagccatcaagatttgttattactgtctactgatagcgtcttcctgaatttggcgcagcatttctgttgaccattgtcgtcatctgataagcgcttttcgatctgtttatgggtctacccaattttaaatcccccacggaagtcagtgttttgggataaactggcgggttggtaaacatttggagagaaagtatgcgaaattataacatgctaagctttattttccaagtgaatcaccaacaatccggatggaccacatagaaccgcaaacgaacacttaataacattaggatttacatagctcctcatacatacacaaagcaaaccaaaactggggatttataggattaatcttttttcgattttagagaagttagttatccttgcgaaatgggctttggaaaacggatgatcgcagttaaaggttaatgttaatgaaagttaggtggtgttgatgattaatattcatggtttggttaataaactttggttttttcttagttcagggattttacgtatacagattctagtacgatgtactcggggggataccttcttctttaccttaagacgtatatataagtcgtatgtaataaaaactaacttaaccgataaacgcatgtgagtgtgggcaggagatgggatggctaactgggtggtctagctaccattcccggtgaacctgcggcgcagccagccgggcacataaccccgcactgcctcgcccagctgcctgtagatgataaggcccagaatgggcaggaccaagcgtgcgtccttgaacaagtacacatagcaggcgaccaggaagaggaccagatctgtgcagtagctgagagccgagcgaaccttctcgtgcgcctgctcctccgactggaggatggccagagtggctgccttctgcagcaagtccctgtcggcggcggagaggaccaaggatgtttgctgactgccctctacttccgcaatcgcaggtctggtgagtgaggcgtctcgtgatcgagtgctcgaaggcacccttcgcctgatcaccctcttcaccttcaccaagcgagtccggcccctggcatccggacgagcctccaccatctcgctcatgacgctctcagtctcagattcgttcttgttctttgatttgggtggcggcaccaccagaacagtggggtactctggttcctcatcctgttgcgatttcggtgactcgtgctcctggtcagattctggcttttcgggcgatcggtggaatgccagactgctggctgcatcccggacgtggacaagttgctcccgctccgagatggagagccgtctctccctgaccactggaggagccagaaacaggtcttcgctgccaccggtggcacgtctcttcttcagttcctccgcatgggtgagcatgtcctcctcgtcagtttccgctgctgccttagcagccgctcgcttcagttcatcccggtccaggtatagaggcgtatggtatttgtgggaactacccacctccttcaccaaatcgctgtagtgatccactgctgcatgggcctcctcctgcatgaggcgctcctcctccttgcgacgcagttcttcctcctccttagcttttctcttgacttccaagtccgcggcaatggcagcagcattggtcctttccaacggattggatatctcttcgttggcctctgtgttcttctccgtggcggatctcttgtcgcggctgaaaaaggacttaatacccttagccaggtccattttaagggtgcttggattgctatttgctacagttgcagttggcggcactatgatagtcggtgcttcgctggcaaaactactcggcaagggactaacagcttgctccatatgctcattagaggatctcttaaggatcggcttggggacaaagtctggacttggcagaggcactggtcggttgagcacaacggcagcctgctctggagtgggagccctgtatggtgtaaaggttccagcacccatggtacgcggatgataggtctccagatcccgaggactgggcgatcgggtgcgggccagcagttccatcttgaacttctcgatggagtcctgctccgaggatgcagtgctctctgtgtaatccgaaccgaggtcgttgctggactgctgctgcagtttcttttgaggcggataatccacgtccaaatcctcatcgtaatccagatccatatcctcgctatcatcagccgtactctcagttaagtgttcttcctctccctcttcatgttcctcttccgcttccgactcgcgaagatcctttcgcgtctcaaagggcaattgtccagtggtgtggatacgtgtcaggtttcccatctcgttgacgttctccctggagtcccatttccgggaaatggataccacatcggccgattgacgtcgcatctcgcttcttctttcgaaagacaagcgttcagcctctgatatggaacccagacgcttgcggagattagcaggcgtttggtggggaaccggagtgaccagtttgtcccgcgacgtcttgcgggacttggaagcctgctcgagttccactgcttcgtagaacctggccatggccctttcatacaagagttccgtggagctgacagagcgacgcagtgggaaggtggtgtgcaagtttgtaaactctaggaaggccagatccggcgcagaaatcgaaattggtggtggctggatggcgtcctccaggtccagctcgaaggaatcttgttctgggaaagagaattatggcatgggtttagtcagaatataaggtgatttagtgggtaatccttagtcctgaaatccttatcaccgaaaacttactgtccttatccttgaccttgctattcttgtcgaaaacgaccagcataaactcattgcttgtgtggacgtcgtcgtgtttgtcggctgacctggagaaccgccttgcgttggactgggactttggagctggttctggagacggactgcgctccagtactggaggctcttcctcctggggcgttggtggagcacttatttcgatagtgggcagcttctcgccaattacagctgacacaccggaagccactgccaacgccagagttggcacatttctggccgggcttagggtttgtccagagaatcgccttacattctggttgactcccagttgaacgggctccgcactcctcaacagagctggggtaacctttataggttccggaggcgtgggactcttgcgaagaggcggtggttgtctcttgttgggtggacttaagcttctcttcgggttgggtgatgccttatccggcgtttccatgggtggagtaggcaatggctgtggctttggctgcactggtgacctatctttaggggctccagagggtttcggattgaaaagtttcaagggagatgtagctggagtccttggtgccttgggggatggtacagacttgtccagcggtgccagtgttgtggtcaccagggtgaggttaagctttggattggaactatctgtcgtgggtttattagccgaatcggcgctattaagcgaaggactcttgcgcacgtccatctttagagcatgatccgaagttccgtaggacatttcgtgggtcagttgctcgttgtctatgagctgaggcttcggcttccgcttcgcactgggcgactgtttgggtgacatgcccgtggaggcatctgcttgaggccgtggaggagataaagtcttcctgcgcggtggcacctgcatccctccagctcctgtcttgggcttgtccttctcatctccggctatccttgtagctgatttcggtttggtgattccccgcttgggatccgggatgaagagcagctccgattcacccgacggttcgctcaggccatatggattttctgcctttacacgaaatttgtactcggaaccctctatcagatcgtgaagtgtggtgctcagtgcccgagtggtggccgccttcagccagacgttccagcccactcggaaatattcaactatgtagttgccaatcttacagcctccgtcgtcgagtggagccgtccaggaaagagtggcggacttgccaaaggacatattcagcttgggagtacccggtggattgggcctggctgtcactgtaaccaaaaaggaggtactgtcctcacccaatcgattccaagctttcaccatatactcgccgcgatcttctcgaagcacattgtcgatcttaagcagggagttcttctccgtgttggagacctgcaatgggaagcgagttacttatgcagtgggtgaaaaaagaccggtaagatgacccacctcaaagcgtccacccggagcaatgacctcgccctcatgaagccacgtaatagcgggcggtggctgtccagccacgccaaccttaaggcgcaacacttcgtccgcctcaacaatcagtccatcctcgtaggtgcggggtaatcggatcttgggaggagcctgcaccatcaaccttgccttggtaatcacatgtcccgctcgattggtggccgtgcattttatctcgccctcgtcggtcagcgccacttggtggatcaccaggacactggcctcgttgtcgttgacgatctttgtgcgccgactgctgaagatctcgtagccgtccttgaaccagttaatctccggcggcggttcgccaagaatgcggacgcggaactcgattcgctcgtcttccacggcattcgtgtccaccagttcgtcgatgaaccggggcacggttatggcatttcgctgcagcgtcaccgtcagcggatcagatagctcgctggcatcggatcgccccacaatgttctcagcaaagcaacgaaactggtaacgccatcccggctccagtccactgatgcacacatcgcagcggtccacgggagtgggcgtggctctcacccagtggggtgaccccatgcgcctgtgctctaccgtatagccagtgatgggtgaacctccatcgtggagtggccgatcccagcgcaggttcaccacgtccggttgctgctccggtagtgccactggcgtcaggatgggtcggccaggcggagaaggtcgctctgattgggaaacaaatataatgcaatttaaggattaaaagatctaaaaatcttctacgatgcgagaaaaaaagttaaactttaaaggaaatagagaaatatttgattttttaattaagataacctacgatttattcctaaatataagttgcatagttttagagaatcaatttcgattcacaaagattgcattgctaagttattacggtgtgggtgactttcctgtcccagctccatattgtagcccttaaagggctttagaaattatgcacctacaaaagattctatctcagcataatgattcttccgcttctcaaacgacaacattactttgacgttgcgagattttggggccaaacagacgaacacggcaaccactgagtgtgcgagtggctaaaaatagacccatttctagcgctcccaccagccagacagctatgtggggcctcctctgatatcttgaaattcgggtaggaattgtactgggactgggaccctgatggtatatggagttactacttttctacttgcctgcggacttccagtggacattcttcttggggcgaccgccttgtggatgcgtgtgcagctttcccggctgatttcccatttcgagatatttagatatttaacctatttgcaatattgtgcttgcctatacagaggatctatatatagacagtcgaaattaacttaacttaacccgtcgttttcgaatcgccaataacaacactttgcactccaactatttcaacttcaggtcggttagtttctagtaatgtaactttcgtagcgttcgcaggcttttgtttgcaagcgttgccatttttgcggcgcgttaaataatccgttccgttcggttcgtcagcccagcatcctcctcctcatccaccgatccacgaaagctttctgctctctttcaaatttgaattctgatgggctcgacagcagttatcgacatcgataggagctgcaatcggttagcaagtgacctaccttctttctggctacttttcaggaacttcgtttgacagataacccttaattaaccacaacaaggctgatcacattgtaaaataagtctcatttacaatgcatttagataccatcaacgatagcatcgattcattcgataagctttagcatcattcaaagtcaattaactatctctgtgatttgtggaatttagctatttctagctagttagctacttgtcgcaaagttccatcactagacc

SEQ ID NO: 36794 - DNA, 4146 bp, DROSOPHILA
atggagctgggacaggaaagtcacccacaccagcgaccttctccgcctggccgacccatcctgacgccagtggcactaccggagcagcaaccggacgtggtgaacctgcgctgggatcggccactccacgatggaggttcacccatcactggctatacggtagagcacaggcgcatggggtcaccccactgggtgagagccacgcccactcccgtggaccgctgcgatgtgtgcatcagtggactggagccgggatggcgttaccagtttcgttgctttgctgagaacattgtggggcgatccgatgccagcgagctatctgatccgctgacggtgacgctgcagcgaaatgccataaccgtgccccggttcatcgacgaactggtggacacgaatgccgtggaagacgagcgaatcgagttccgcgtccgcattcttggcgaaccgccgccggagattaactggttcaaggacggctacgagatcttcagcagtcggcgcacaaagatcgtcaacgacaacgaggccagtgtcctggtgatccaccaagtggcgctgaccgacgagggcgagataaaatgcacggccaccaatcgagcgggacatgtgattaccaaggcaaggttgatggtgcaggctcctcccaagatccgattaccccgcacctacgaggatggactgattgttgaggcggacgaagtgttgcgccttaaggttggcgtggctggacagccaccgcccgctattacgtggcttcatgagggcgaggtcattgctccgggtggacgctttgaggtctccaacacggagaagaactccctgcttaagatcgacaatgtgcttcgagaagatcgcggcgagtatatggtgaaagcttggaatcgattgggtgaggacagtacctcctttttggttacagtgacagccaggcccaatccaccgggtactcccaagctgaatatgtcctttggcaagtccgccactctttcctggacggctccactcgacgacggaggctgtaagattggcaactacatagttgaatatttccgagtgggctggaacgtctggctgaaggcggccaccactcgggcactgagcaccacacttcacgatctgatagagggttccgagtacaaatttcgtgtaaaggcagaaaatccatatggcctgagcgaaccgtcgggtgaatcggagctgctcttcatcccggatcccaagcggggaatcaccaaaccgaaatcagctacaaggatagccggagatgagaaggacaagcccaagacaggagctggagggatgcaggtgccaccgcgcaggaagactttatctcctccacggcctcaagcagatgcctccacgggcatgtcacccaaacagtcgcccagtgcgaagcggaagccgaagcctcagctcatagacaacgagcaactgacccacgaaatgtcctacggaacttcggatcatgctctaaagatggacgtgcgcaagagtccttcgcttaatagcgccgattcggctaataaacccacgacagatagttccaatccaaagcttaacctcaccctggtgaccacaacactggcaccgctggacaagtctgtaccatcccccaaggcaccaaggactccagctacatctcccttgaaacttttcaatccgaaaccctctggagcccctaaagataggtcaccagtgcagccaaagccacagccattgcctactccacccatggaaacgccggataaggcatcacccaacccgaagagaagcttaagtccacccaacaagagacaaccaccgcctcttcgcaagagtcccacgcctccggaacctataaaggttaccccagctctgttgaggagtgcggagcccgttcaactgggagtcaaccagaatgtaaggcgattctctggacaaaccctaagcccggccagaaatgtgccaactctggcgttggcagtggcttccggtgtgtcagctgtaattggcgagaagctgcccactatcgaaataagtgctccaccaacgccccaggaggaagagcctccagtactggagcgcagtccgtctccagaaccagctccaaagtcccagtccaacgcaaggcggttctccaggtcagccgacaaacacgacgacgtccacacaagcaatgagtttatgctggtcgttttcgacaagaatagcaaggtcaaggataaggacaaacaagattccttcgagctggacctggaggacgccatccagccaccaccaatttcgatttctgcgccggatctggccttcctagagtttacaaacttgcacaccaccttcccactgcgtcgctctgtcagctccacggaactcttgtatgaaagggccatggccaggttctacgaagcagtggaactcgagcaggcttccaagtcccgcaagacgtcgcgggacaaactggtcactccggttccccaccaaacgcctgctaatctccgcaagcgtctgggttccatatcagaggctgaacgcttgtctttcgaaagaagaagcgagatgcgacgtcaatcggccgatgtggtatccatttcccggaaatgggactccagggagaacgtcaacgagatgggaaacctgacacgtatccacaccactggacaattgccctttgagacgcgaaaggatcttcgcgagtcggaagcggaagaggaacatgaagagggagaggaagaacacttaactgagagtacggctgatgatagcgaggatatggatctggattacgatgaggatttggacgtggattatccgcctcaaaagaaactgcagcagcagtccagcaacgacctcggttcggattacacagagagcactgcatcctcggagcaggactccatcgagaagttcaagatggaactgctggcccgcacccgatcgcccagtcctcgggatctggagacctatcatccgcgtaccatgggtgctggaacctttacaccatacagggctcccactccagagcaggctgccgttgtgctcaaccgaccagtgcctctgccaagtccagactttgtccccaagccgatccttaagagatcctctaatgagcatatggagcaagctgttagtcccttgccgagtagttttgccagcgaagcaccgactatcatagtgccgccaactgcaactgtagcaaatagcaatccaagcacccttaaaatggacctggctaagggtattaagtcctttttcagccgcgacaagagatccgccacggagaagaacacagaggccaacgaagagatatccaatccgttggaaaggaccaatgctgctgccattgccgcggacttggaagtcaagagaaaagctaaggaggaggaagaactgcgtcgcaaggaggaggagcgcctcatgcaggaggaggcccatgcagcagtggatcactacagcgatttggtgaaggaggtgggtagttcccacaaataccatacgcctctatacctggaccgggatgaactgaagcgagcggctgctaaggcagcagcggaaactgacgaggaggacatgctcacccatgcggaggaactgaagaagagacgtgccaccggtggcagcgaagacctgtttctggctcctccagtggatgaggaaccagagtaccccactgttctggtggtgccgccacccaaatcaaagaacaagaacgaatctgagactgagagcgtcatgagcgagatggtggaggctcgtccggatgccaggggccggactcgcttggtgaaggtgaagagggtgatcaggcgaagggtgccttcgagcactcgatcacgagacgcctcactcaccagacctgcgattgcggaagtagagggcagtcagcaaacatccttggtcctctccgccgccgacagggacttgctgcagaaggcagccactctggccatcctccagtcggaggagcaggcgcacgagaaggttcgctcggctctcagctactgcacagatctggtcctcttcctggtcgcctgctatgtgtacttgttcaaggacgcacgcttggtcctgcccattctgggccttatcatctacaggcagctgggcgaggcagtgcggggttatgtgcccggctggctgcgccgcaggttcaccgggaatggtagctag

SEQ ID NO: 36795 - protein, 1381 aa, DROSOPHILA
MELGQESHPHQRPSPPGRPILTPVALPEQQPDVVNLRWDRPLHDGGSPITGYTVEHRRMGSPHWVRATPTPVDRCDVCISGLEPGWRYQFRCFAENIVGRSDASELSDPLTVTLQRNAITVPRFIDELVDTNAVEDERIEFRVRILGEPPPEINWFKDGYEIFSSRRTKIVNDNEASVLVIHQVALTDEGEIKCTATNRAGHVITKARLMVQAPPKIRLPRTYEDGLIVEADEVLRLKVGVAGQPPPAITWLHEGEVIAPGGRFEVSNTEKNSLLKIDNVLREDRGEYMVKAWNRLGEDSTSFLVTVTARPNPPGTPKLNMSFGKSATLSWTAPLDDGGCKIGNYIVEYFRVGWNVWLKAATTRALSTTLHDLIEGSEYKFRVKAENPYGLSEPSGESELLFIPDPKRGITKPKSATRIAGDEKDKPKTGAGGMQVPPRRKTLSPPRPQADASTGMSPKQSPSAKRKPKPQLIDNEQLTHEMSYGTSDHALKMDVRKSPSLNSADSANKPTTDSSNPKLNLTLVTTTLAPLDKSVPSPKAPRTPATSPLKLFNPKPSGAPKDRSPVQPKPQPLPTPPMETPDKASPNPKRSLSPPNKRQPPPLRKSPTPPEPIKVTPALLRSAEPVQLGVNQNVRRFSGQTLSPARNVPTLALAVASGVSAVIGEKLPTIEISAPPTPQEEEPPVLERSPSPEPAPKSQSNARRFSRSADKHDDVHTSNEFMLVVFDKNSKVKDKDKQDSFELDLEDAIQPPPISISAPDLAFLEFTNLHTTFPLRRSVSSTELLYERAMARFYEAVELEQASKSRKTSRDKLVTPVPHQTPANLRKRLGSISEAERLSFERRSEMRRQSADVVSISRKWDSRENVNEMGNLTRIHTTGQLPFETRKDLRESEAEEEHEEGEEEHLTESTADDSEDMDLDYDEDLDVDYPPQKKLQQQSSNDLGSDYTESTASSEQDSIEKFKMELLARTRSPSPRDLETYHPRTMGAGTFTPYRAPTPEQAAVVLNRPVPLPSPDFVPKPILKRSSNEHMEQAVSPLPSSFASEAPTIIVPPTATVANSNPSTLKMDLAKGIKSFFSRDKRSATEKNTEANEEISNPLERTNAAAIAADLEVKRKAKEEEELRRKEEERLMQEEAHAAVDHYSDLVKEVGSSHKYHTPLYLDRDELKRAAAKAAAETDEEDMLTHAEELKKRRATGGSEDLFLAPPVDEEPEYPTVLVVPPPKSKNKNESETESVMSEMVEARPDARGRTRLVKVKRVIRRRVPSSTRSRDASLTRPAIAEVEGSQQTSLVLSAADRDLLQKAATLAILQSEEQAHEKVRSALSYCTDLVLFLVACYVYLFKDARLVLPILGLIIYRQLGEAVRGYVPGWLRRRFTGNGS

SEQ ID NO: 36796 - DNA, 3701 bp, DROSOPHILA
caacttacttgtgatggctggccaagtgccaattctctttatagagcctaagccggaccacaccctcagttagcgtttgcttggcgcccataaaaagataaccagctattcttattacccaaggctcccaaattttacgatgccatagaacataattcggcacggctgccaaaatgtacaaataagactgacactttggcacttgatcattcgcaccagatccccgcagttgttaagatgtacaaattactcggtttggtaagttaaagaaacccttaaaacagttcttaaaccaagttgcctttggattttgaaggtttgtggccacaaagtcgtatctcaacattccttatatcatttcagattgccttggtggcctttccaatcgcttggatccaggcagactgtaatgtatgccagtcaaatggagcctcctgcatcaaccagaccgcatacaatttgtgcttcggctccactcagccgaataccaaccaaaccttcgtctgcacggatggcctggtgtgcacggaccagccagtgatctgtttccagaggggcgagaatcccgccagttgcggcgacactgatagctgtggccagtgtgctcccaactacaccttcgcctgcacctcgcgctcaaccttcgccttctgctttggcgccataacgcccacaaatgtgacgggcagttgcccggatggttacttctgtgacgcctccacccaggagatctgcgtcaccaaggccactgatgactccatcatctgccacttgaattagcctcgctaattattggatataaataaatgattttgcctaataatatattgcttttgttattaaataaaattcgttttgggtaaatggatttaaaagcgttttttatatacacctactttattagatgcatcggaactgatgttatgcttaaaactaatatataaaataatttatcagtaaaataccccttatattgccaagtctataatggcaaaataaactataagtctagaaactcttccgaattttccgtattttttttctccagccaggagcgtgcaatccgcatcgagggcaggcggaagcgccactcgtcgcaacagtacttgtacacctcgtcgcccagttgaagtagttcggtggcaaactctcgctcgtcatccttccaagtgcgttcctcagagccgccgaacatttccatgcgcagcaatgcggccatcgtgggccccacgtatttctttattgccatgtatagctggggtttgcttagagaaagagcagtgggtttgattgcagctgaagtccacggggactccgcttgcagtcgttttagtttggcattctcctcagacagcttttcaaactcggcctgcagtttatcgtactcctgaagaagcttatcgcgatgggcatcttccgatgaagatggtttttcatctggttcagactcgtcctcactgtcagtactaagtggtatgttctcttcaaggtttagaaaagattcagataaggtttcggaaatggaatcactctgactattttctttgctagaactaagattaatttggatggattgggtgggtttctccaacatcggagtcttctgctcatcccagaatttctcttgcaattgtgtatatcggttcaatatcgtaccgttctcaggtgaagcgtgggagtcagtcttttgtgcttcttggggtagcttccttttcttagcctgctccttggtggattcatcttcgttcagtctatcagcatctgcctcctgcatcccacgttttctaaccacagtccctttaattggtcggtactcttttctagttggcacttgcttttcttgacatttatcggcaagctttggcattttcataacgtcaataatacaactttttgatttaatttgcttttctgattccttggtgactgttcgcatcttgcttgtatcatcagtttgttcttttgggagctgctcttcaagctgaaacaactcattctcgcttcctgattgacgctttactggtcttttaatcaatttgatgcccaatgaaggctgaagttgacttatgatatctagaatgttttgaggcatagccgaagcgcttgttgatgttgtagaactcttatgcgccaccgttgttttctccgtgtgtacaaccggctgttcctgctccgtagccagcacttcgtcggcttcgtctttcccttgcggttcctcctcttctgtcaactctactgtatttcgtttcttaacaacatccaaattctgtgtctcaccatccacgaatcccagaggacactcgaaatctttaggtggtattaggtgttgctgctttggaggcgtcaacttcacgagaagagcttcaccgttctggtcgagattttcatagtctagtgccagatccctgttgatcctgaacaaagtgggcgtctgcattgggatgagtctgtccattttgtagttcatgaagcattccgctcgaaagtgccgggcacaaactgttttggctgccagtttggacggcggtgcatttgaaacgtcagggtttgaacaattcctgacccaatctttcaacctcttcggatccttaacggggaacttgaagaagtgcatattggggttgcggctagaacccaccggacaatcacgaaaacaacacttagtgccgcccatttgtttaaatataagcaaacaacttttatgttattagtggtggaagtgttagcgtcagctggtgatatcgatgggaggcatcgataacagaattgaccgaaaccaaatgatcgatatgacacttcttaattaatgagagattttttacttgactgggcttgtagcaggttttgcacagaagcaattattttccggaatgtgaaatgtctgctttttagctaattacaacaaaaactttccaatttttgttccccaaacccactcaagtgatttcaaattttaccgtccgcttaaaatggaactagtttattccagaggaaccagcttgcaccaccaagtctctgaaactctggaaatatcgatagtctggtggagaaaagtattcataaatataaataaaaattaacaggtcataagctgatttgtttattatttactgttaaaacaagtaaaataatattgggaacaattaaattttccattttcctaattacagtataagcctagtgggcgttttgatatccaattgtaatgttttaagcaatcccagtgggctttgctcaatcgttcggaccacttagacgaatttccaccaaacttagttcagtataatttttgaattcgcccgcacaggttgcgcacttttcgaccgtatcacaacactgatctaccctagtattcacaggaagttgcatccctggcatccagaagcctctagaagtttctagagacttccagttcgggtcgggtttttctataaaagcagacgcgcggcgtttgccggttcgagtcttgaaaaaaatttcgtacggtgtgcgtcgtaacaacaagcagcgtctgaaaagttttgtgaatttccaattctatacaaagcaaagtgaaaatatctgtatttttacctttattctgtgaatagaacgaaaaacatacatacaaggtgagtaatgcaaattacaagaaaagagtgaatagtttatcagtggctatggccaaaatgtgcattttgcgtggtcctgtgcatctcgaa

SEQ ID NO: 36797 - DNA, 1701 bp, DROSOPHILA
aaaagttgtttgcttatatttaaacaaatgggcggcactaagtgttgttttcgtgattgtccggtgggttctagccgcaaccccaatatgcacttcttcaagttccccgttaaggatccgaagaggttgaaagattgggtcaggaattgttcaaaccctgacgtttcaaatgcaccgccgtccaaactggcagccaaaacagtttgtgcccggcactttcgagcggaatgcttcatgaactacaaaatggacagactcatcccaatgcagacgcccactttgttcaggatcaacagggatctggcactagactatgaaaatctcgaccagaacggtgaagctcttctcgtgaagttgacgcctccaaagcagcaacacctaataccacctaaagatttcgagtgtcctctgggattcgtggatggtgagacacagaatttggatgttgttaagaaacgaaatacagtagagttgacagaagaggaggaaccgcaagggaaagacgaagccgacgaagtgctggctacggagcaggaacagccggttgtacacacggagaaaacaacggtggcgcataagagttctacaacatcaacaagcgcttcggctatgcctcaaaacattctagatatcataagtcaacttcagccttcattgggcatcaaattgattaaaagaccagtaaagcgtcaatcaggaagcgagaatgagttgtttcagcttgaagagcagctcccaaaagaacaaactgatgatacaagcaagatgcgaacagtcaccaaggaatcagaaaagcaaattaaatcaaaaagttgtattattgacgttatgaaaatgccaaagcttgccgataaatgtcaagaaaagcaagtgccaactagaaaagagtaccgaccaattaaagggactgtggttagaaaacgtgggatgcaggaggcagatgctgatagactgaacgaagatgaatccaccaaggagcaggctaagaaaaggaagctaccccaagaagcacaaaagactgactcccacgcttcacctgagaacggtacgatattgaaccgatatacacaattgcaagagaaattctgggatgagcagaagactccgatgttggagaaacccacccaatccatccaaattaatcttagttctagcaaagaaaatagtcagagtgattccatttccgaaaccttatctgaatcttttctaaaccttgaagagaacataccacttagtactgacagtgaggacgagtctgaaccagatgaaaaaccatcttcatcggaagatgcccatcgcgataagcttcttcaggagtacgataaactgcaggccgagtttgaaaagctgtctgaggagaatgccaaactaaaacgactgcaagcggagtccccgtggacttcagctgcaatcaaacccactgctctttctctaagcaaaccccagctatacatggcaataaagaaatacgtggggcccacgatggccgcattgctgcgcatggaaatgttcggcggctctgaggaacgcacttggaaggatgacgagcgagagtttgccaccgaactacttcaactgggcgacgaggtgtacaagtactgttgcgacgagtggcgcttccgcctgccctcgatgcggattgcacgctcctggctggagaaaaaaaatacggaaaattcggaagagtttctagacttatag

SEQ ID NO: 36798 - protein, 537 aa, DROSOPHILA
MHFFKFPVKDPKRLKDWVRNCSNPDVSNAPPSKLAAKTVCARHFRAECFMNYKMDRLIPMQTPTLFRINRDLALDYENLDQNGEALLVKLTPPKQQHLIPPKDFECPLGFVDGETQNLDVVKKRNTVELTEEEEPQGKDEADEVLATEQEQPVVHTEKTTVAHKSSTTSTSASAMPQNILDIISQLQPSLGIKLIKRPVKRQSGSENELFQLEEQLPKEQTDDTSKMRTVTKESEKQIKSKSCIIDVMKMPKLADKCQEKQVPTRKEYRPIKGTVVRKRGMQEADADRLNEDESTKEQAKKRKLPQEAQKTDSHASPENGTILNRYTQLQEKFWDEQKTPMLEKPTQSIQINLSSSKENSQSDSISETLSESFLNLEENIPLSTDSEDESEPDEKPSSSEDAHRDKLLQEYDKLQAEFEKLSEENAKLKRLQAESPWTSAAIKPTALSLSKPQLYMAIKKYVGPTMAALLRMEMFGGSEERTWKDDEREFATELLQLGDEVYKYCCDEWRFRLPSMRIARSWLEKKNTENSEEFLDL

SEQ ID NO: 36799 - DNA, 2423 bp, DROSOPHILA
ctggagctgcctgaggatgagagcgagaagaagaagcgcgaggaggacaaggccaagttcgagagcctgtgcaagctgatgaagtccatcctggacaacaaggtcgagaaggtggtggtgtccaaccgcctggtggattcgccctgctgcattgtcacttcgcagttcggctggtccgctaacatggagcgcatcatgaaggcccaggctctgcgtgataccgccacaatgggctacatggccggcaagaagcagctggagatcaaccccgatcacccaattgtggagactctccgccagaaggccgatgccgacaagaacgataaggccgtcaaggatctggtcatcctgctgttcgagacctctctgctgtcctctggattctcgctggacagcccccaggtgcacgccagccgcatctaccgcatgatcaagctgggcttgggaatcgacgaggacgagcctatgactaccgacgatgcccagagcgccggagatgccccctcgctggttgaggacacagaggacgcttcccacatggaggaggtcgattaagcgaccagtcgaaacaaacaaccaaaattcattctatcactcgcattcacatacacaatttacttgcgtttcgaacttttatactgagtttactacggccgagttaaattttgtattcattaacattttgccgcgttataagcgacagacatacgcttaactcataaaaaagcaggaataactcgttaaatggttaggttctcacagaacattcaagagcagttgtcgttttaagaacttataatttagaatccaagtaatttatgtaaaaaactaaagactacatacgcgccctagttggtagagctatataaagaatcgagtatatatataattaaggtttgatgacccgatcgatgataaacataaaaccaaataaacaacaagcaaatgtgttttaaaaatctaacttctgagcgagtatttattggggggaataaacaatctatgaatcggattctttgcgcagcagctgctcaatggcctccaccgtggacactcccttggttatcattattatcttgtttcgcgatcgagatcccttgtccaaagaaacgtcgctctttcgaagacctagaactttcgacagaaacttgaccagttcggcgttagcttctccctcgctgggcggagcggcgatttggacgcccactccttcaaagccaattcctgtgattccgttctgcttagcccccggcttggcaaggatttgtatgcatatattgccgctcttatcgactgaaatcggactggcttccttagccggcatcgcttttgcatcgtttttcgcactttcaacgccggcctttgatttccccttgctcttcgacattatttgggcgttgaccgatgtaaacaagcggcgcattagcttcttggcaattattttaaatattttgtgtttttaaatgcattttaatagcaactagtgtttaattttgcgaggtctactggcgtctatcagctgattcgtggagaaaaccagggatgcgcacatatagggatgagcatatctcgtgagttctcactcacgaaacgaagataaaactacatttttacattccatgtaacttacagattggacatgaatagtacgattcaaaaatgtatttttattttcctgttgagtattatttaacggttttctaaacacattccccccgaagtcaccacaacatgtaaataaaagtattaaaacaaaatatgattaggtaaaaaattatcatatattcatcattgttatgtactcatagtttcttctctactcgtctttgcattagaaaacaacgctttaacactttgcactatttaaaactgcgccgagaagcatcttaaaaatgcatttatcgcctataaatgatcggggatcattattcagttgcttaggagagaattgcaggaatgcacattgcagagcttacagttaaatcaattaatgcaaaatgctttaaatggacttaaattttgtatgtgttttataggagttgatattgcagaaacgataataaagccaagttgtttggggtcatcctctggttgcacatgttgccggggactattaagctagggaaggtgttagtagtagcaagtgaaggttccggaaaggtctattatcttcctccagatgcacctgctctctgtgtatcttatgcgaggtgaagcctttccttacgcggcgcgtatcgactgaacaatctggaaaatggcagagccgcagaccacaaagatgaacagcgccaggagccagggacccaccggatattgaccctctttcgttttctgcgaaaaagagaagttcagattagtcttgtcacatcttgtatggtgaatatattgtatattgcattaagagattactggaaatcgtc

SEQ ID NO: 36800 - DNA, 423 bp, DROSOPHILA
atgcgccgcttgtttacatcggtcaacgcccaaataatgtcgaagagcaaggggaaatcaaaggccggcgttgaaagtgcgaaaaacgatgcaaaagcgatgccggctaaggaagccagtccgatttcagtcgataagagcggcaatatatgcatacaaatccttgccaagccgggggctaagcagaacggaatcacaggaattggctttgaaggagtgggcgtccaaatcgccgctccgcccagcgagggagaagctaacgccgaactggtcaagtttctgtcgaaagttctaggtcttcgaaagagcgacgtttctttggacaagggatctcgatcgcgaaacaagataataatgataaccaagggagtgtccacggtggaggccattgagcagctgctgcgcaaagaatccgattcatag

SEQ ID NO: 36801 - protein, 140 aa, DROSOPHILA
MRRLFTSVNAQIMSKSKGKSKAGVESAKNDAKAMPAKEASPISVDKSGNICIQILAKPGAKQNGITGIGFEGVGVQIAAPPSEGEANAELVKFLSKVLGLRKSDVSLDKGSRSRNKIIMITKGVSTVEAIEQLLRKESDS

SEQ ID NO: 36802 - DNA, 9444 bp, DROSOPHILA
aaaatctacacgttggagggcaatccttctgctgtgcccattttcggggtcttctgcattcgctggcgacgagccaattgcaaggaggagaacgagtcgaagtttgttatccgtggcttagacattgcggagccgccgctgaacatctactgcaccatcgaggagaagatgttcgtgaaaatgcccatggcttttaaggttgtgctgaaaaatcccacgacgcatgtgctccatctgatagccaacctgagtatcagcaagacggataacttcatatgctcgggtcacaagcaggttcgtcctttctatagcaccttttgtctttcccaagttaaacaatttatcgttccagctggacatttccataatggcctacgaggaaaaggaactggtctacaacctgtatccgctgcaagtgggctggcaagagttgccagtgctgagtctggagtacaataccaaggccgatccgcagaagaaagacagccagaatgccttgctcgacgaattggtgcagcgtgcactgcccaaacgagtctttgtgctggtaagtgctcattagagtgtttagactacctccgattctaattttattcaatcccacagccacctctgaagcaacagaacaagtagggatgatactgatataatgccgctttagtttaagtgttttaaagtttacaaaatactatcactggtgtttaaaaatttactacgcctactccctctttattgctaacaacaaacatacatacataaataactatatatttagagagttgcatagcgtaatacttgagagtgtgtgtgattgtattgtataatgtattgttaaatgggccaagacgcactagacattattgttagttgattacggcgttttagataagcagtgctaagtcctggtcagtaccgcaagttgcacatattttcgtacatcctttgaacgtacagtaataaatataaagcatacaaatatcgttgaaagaacacaagcgtctcaatcatttcccgatctctttccgctcgaggcaaacttgaacacaccctttttctggttacggttttcattctgcgaatacacaaatcattggaatatagtgcctcattatcatccagatgtagttaacttaccaataggcgatttccgaacaacattacagccttatcctccgcttcttgcggggtcgctcgttcgcctgcggatagaatcggttgccgctggtggatatgtagcttctgtttgatggcctgcgagaatatcacccgccggctcaccgacttcatggccagaagcaaatccagccacgtccacgtcacattgtgatactccagcgtaggtatgactagtgagtagtctgtgatgtcctctagattcttctctttgttgcccttgtagctgacgcgcacaggcacttcgggaatcttgatgtagataaacagcttgtttttctcggcgcgctccttcatcttctccacgtcatctttttcaatctttacatagaactcggagtccttggcccctttctttcctttacccgagcgcttggtcgacgaagatgttgatgacttggcctgtaaattcgttgtagacgccgaactggttgaggcattgtcatccagctcgtcactgacctccgtttcggaggcatcgcggtccgggaaacagaacttcagcatggtgctgtagaattttttcgttatggctattgtaataggagccacattaatctcgaaatgctccttaacggatatgccacccactggagctttttcccgacagaagatacgtagcacccgcttgtgggtgtccacgggcatgtctttttggatttcagtggccagcaaaacatcgcgatagatttctcgcggcaaaaggttttccatgcgtatgttgcccagctccagcaaatgctccaccgaatcgtcgctcttggacttcttggtgtacagaaaagcactaaggacaagatcagctatgccaatctgtccatccgtttccgtaagcctccactgggcacgcttgaagcagatctcattggtccgcaccatcgtaaccgactcgtcggagcgcacgtttgatatcttgctgagctgcgacaactgagtctccttatagcagagcaacatcatgtccaggtcctcgctaaatgtgttcagctcctccttgctctcccggatcatctgctggacatggtcgtactcttggcgcagctccagcgagtcgccatcctcaatacgctctttgctgatcatgtgtgtatccttttccagcgaacgaatcttcatgagtagacttcggattaccgtctgcttctgctggatgggtcgcttttgatcctccgtcgaatgcagctgaagctggaaacgcattcttgtcagcttttctgccgcctgctttcgctggggttcgacgtaaagcaatagattgtttacaatatccagaatcatggcgtactgcagcgagttggtgcacacatccagatcgtgatgcataagtgtgaaggcatctacgggatcgtcttgtttttcccatggcgattgcaattcctctgaagggggcggcggcacctccgtaatgctattcggatcgatggcatcgccgtagctcacatagaaaaactcgcacttacacttggacacgatgcgctgcagttgcacgggttgagcccctcccgaattgtcgctcaagaaagctccaacagtctctgagactacaccgcccacactgcgtccactgcccaccaaatgtgatatgtccggcaggttgtttatcacagtctcgtccttgtcctgaatgttgtccaccgtcagccacatgatctccttctccaacagggaattattatcccccgcgctaactgttgcatagtactgcatgcactccaacaatcccttccatgtggttttcgagatcagcgagcgctcgcgccaaactggccgatgttcccgctgcaaaatttcagctttggcagcactgataattacgtagccagaggtctcacagcccttaagcagtacttgtgagttcaccagactgatggaccagttctcgtggataatatcctgggcggaacatgcctgcaggccctggagctgcagttccctcgactgggtgctatgatcatcactatacacattgaatttgtggtccgcctctgcgatgagctgctgcaacatggctgtggcatgaatctgggcgggggcttttttcatcgatgcatttggattggaaactagaaaaaaacgttttttagaaaagaaaacttaaaagttatccttccacaactcacttggcaaaacctcgttgttggtgctggacaaggtaattgtgctgtcacttcgcttatgtttcaaaacggcagagtttggaccctccttgcgatagctctttaccgcctccgtggacaaattgtttttcagtttctgtgacttcatgaaggaatcaaagagagcaaaagccacatctcgattgctctttgtccaggcaccctttaggtcatagaccaccaacttatgcgtaggcgtcgtggactgggccttaacatcctcttccgtgcttgtagccgtcgtgggtatcagtgcctcgcgtccataggaaaccttggccacgcttaggaagtagaatctcacgattttgaaggcatctgctgcactggccaaattctcagagctactgtccatcttctcggtgagaatactcttaagccagatctcggcgtcattgagctcgcagttcatgtagattgttgaccaatccgctcgtggccgatggatgagcccatcgtcaatgggattcagtgttagcgagtgctcagaactaaaagatactcggcggccgttcaactggaatcccttttggagggcgtgggacatccagtaaagaacttgaaacttatgcaagcacatctgcaagttcgcctttttgtagtgtcgactaaggggtttcttacgcggtctcacattgttaaagaccggaccccgtcgcgtgggcctcgtcacacctgataaaatgagctgcagactctcaaaccatcgcaacgtgctgccgtacagcaccaggctgggtatgtccacttccaaatcttcgcccgccttaggcttcgtctcaaatgatatccaaatgttgagatttagcgagcggaaggcgcggaaggagtcatggacttgattactcgagtactccggcagcttgtcgggggcacagggcatcacagcatggtggtcgttgggattagccaggcacacccatttcagcttaatcgtcaacttaagattgggaaaatgaagcagacgacaatcgtcgtagcgggacgctgttcgtacagtcacctaaaagaaaagcatatttaaattcgtgcaaaaaactataaaattataagctacacactcacattaagttcccctttaaacatgatcttggcatttgtgagtacaatgccgcaattattccaggtcaactccatttcctctgttgtgttatacggatcgagcgatgcgtgcaggagtatggtaaattgcttggctatcagagttaaccgaccatgcagaagcaatcgcagcttatcccaaaatggcaaagggggagagggatcctttgagggcgccgatatcttctcgaaacttagattgcactgggccattacaggttcccagcaagctccaaaggcgtagctacagctctccagttcgcaatcaaagtcatggtagaattttagcgagggcatgctgcgttgaatcacatccgtaccaaagggttcacccacgtcaatgaacacatctcgcttggctcgcttggagcccatttgctcggctccacaaaggtttccgtacagtcgcatgctttttacgcagaacattggttgcgggaagtccctgaaaatttaatcaatagattataaatattgaatcaactcgtcacaaagattcccacttacctcagcatgaatttccattcagtgcagctgatgttgacaccgcggcaccaaagtgtagagaactcgagaccctcctccggccacggactctcgtgatctatttcgcgcataatgcgcgtcacattattgtagccatgaatggaggtgtccgccattgccataatattcacgtccgtcatgatccaggccagcaatcgggtgcgtactggtccactttctcgtattttcttcgagcgctgaatgtagatctccgagttcttcttcaccaggttggcgtagagaccctcaatggttccagatggcaacaagagacgttctgagcagagctcgccgatcttcttgtcaaaaagcgctttgcgcttcaagctctccaagtattcatccactaatagaacatagttatcacgaagtttcacctcaaagggatcgtcgctaatttccagcaagaactccttgatcttaataaccaaatcacagggtagcggtgagtccaccgtaaagggtttctttttgtagttgtgaaccatttttagccatttaaagtgcgatgtgcactctccattgactgcgttataaaagtcgtggtcatacgggaaaatggctttaaaggatccaattgtggtgacccacaccttgttggagggcagttgaaaaccaggaaagttttgtctttcttgggtgagtacctcgagacgtggaactgattgtagatccagctccttcactgtgaatatgtgctgatcatcgatcttgacaaacacattctccgcataaatgatgcatcgttccttttggctaaagaagaggctttccacaaagatctgaattgagtgacgatcagaaaacttaatttcgaagatggtgctacgttctgcagacaactccactatgaatccttctttaggagttgttttcttaacagacgaagcaggaatagccagctctgtcttcaagtcctgcatatcgcgcaccaatgtcaacaggtgcatgtgcaaattagagttccacgtggcctccatgttgccgggtatgtaaatggacaacttgcccatcgtaccctccacttgttcatgctccagtcgtatcattttgcatgtagcaaaaacgtcagagaagtcggtgaggcaaagcgaagaagccgtcattgagcgcattatagccatctgaaactcttcgagctttagggtggtcaggctttgagaccgtgataaattcagctctgagaaactgagcagcgaataaacattgtgatgattgacaaagtaagccgtaatatccttgaccttaacagacacccgcagtgaggtagatgattgtgatggctgcacggacaatgtaaggcctgcatttggtctggcgtgagattgtcccgacatattctttggttttatgccccggtactgccgaaggcactccattgacttgaccacgaattccgcaagctgcatgctgtattccgtgcgaaatgtgtgcactgatatgtccagtttagtggtgtttgcatacgagcagagcttgaccaagctcactccgaggaaaaacggcgagcctggcgaatgagtctttttcaagttgttggtgtcgttgatggagttacctagatttgaccaaagagtttccaccatgagttccatgctccattgtcgttgattcaacaacaaattgaggaacttgttctcatagagattacttcgcttttcctcgatctgctccaagaggaatcttgtgtgactcacactcatggcaatatgctcatcttccagtttcataagaagagagacattaaacagttccgcacagcctttaacaacaattcgctgcataatccactctagaactccgccctcccgtcgctgattcgctcgcagattactctgcacagccgtgtccagatccaagtgatccggcagggacttctgcttatgtatcaactgcattggctgcgcttcgctcgatcgctggcgggccagaaaattgttgttgacaaagtcatagatctcgctgtgattatatatgatttggaatgtcttcagttttacatacaagttgaatatgtctttttccagctgaaaggtatagtattataatattgcactaattgggccataatgtgtttacttaccacagagtctatggtaaattgttctacaaagaggagcttttcatatttggtgtcaatgtctagatgatgaaaacccaatttggcaagcattgacggtaacaacgtcttttcatcggtgactttcgagttaaactttcccgagatctgtgcagattatgtattattatagattagctcatagtagtggtattaacctacttgaaacgactgcagtttggcactaaaatcgttctgtgagttttctttgacggccgaaaacgttgccgccttaatgctaaagttaaagttctttggtataatgggcgccagcttctcgtagttgtcattgtcgtaggaccttttcgagggagctaggccttgagtggagcgccgagatggctgaccggtcgatgtcctccgcttggcctcactaaggaactcgtacagtccgccgtggatgacggatttggcattgttgatgaccagacttagggtctgcaaacgggaattaataaaaggaatactaaggagtcaaaaagtcacttacatccatggacagagggccttgggcaaagagcgacgcatccagggtcatgtcaaagctgacctcgcctaggcaaggacgaatcttgttcagattctccagcgattgacggcgagagctgcagtgcctcagcatcttggcctgtgcttcgctaagggctgcattgaccaacagaacacgagcattttgcactatactcccgtccaaatgaagctccttcgccgtggcatggatgaaccaccccggatcaaagtcattgttcatcagaaccactgatatgttgttcacgtgcactgccataaattgggcaaaggtgataatactcgccggcaccttagtttgccggaagtctggcacacccttcgcctccgaggctttgcccgccaacgtctgagtccgccggagttcgtaagagtcctggtcgtaggagtcatcctgtcgactgtgaatgtctttgttgatgcgaatgtcacggatataaatggagagcagcttggtcacctcggtggtgaagaaactgctgcgcagacacacctcctcgatttgctgtaaaattaggagtgtttatcgcttggtaaccagagttcgaaggttatccataccaccgagaatccactcttgctgatgtgcacattcttcagggacaagtagggcagcgaaatgcgaccgatccgtactttgacccgaaacctcttcaccaaataccaactaatgcccgtgggcaagaccctaaaatggaaagtgatcaattttttatgtttataacgatgatggatcaatcatggggccacggaacaggcaaaactaaccaataaacgaagatgaagagcgccaggcagaatagaagtagctgtagcatcatgttgttgcctaaataccatagtgtcccaacatttatgttgtgctatttatgttttgaaattttttgactaaatactgaacaatttactagttgcggcaatagagtgaccaatgcatactattcaaaaataccacaataagctatcagtttttcaaatacttagcccttgcaagacaagcttgttcgcaaaatgcataacttaaacaattaccgcaattaccaaaattttagttacagtgtataaaaagaaaatgcattctcaattagaaattaataatgcaaagaaatgcatccctgttcatgtgcgactttgacttgtcgcatcaacaaagctcgtcaggggttcaggctttattaaatttcggctttccccagacggtcacactgtggctttatatcttttaaaaataacaaaatcaaaaagttatcttatcgctgctcccgcgcccgttattccattgtaagcatgcgaacgtgaaaattggccaaagaagtcgctatgttgctgctggagctgaacattctgaccctgaatatatggtgagagcaggcatctccttctaaggctgctggagccccacttcccttgacaccgatctgcacaggctaatcatgtgcactttcaggggcattccgtatgtgtcgagtgatcgcagaccccgcatcgatgccatctgcaaggagctggctagcgggaagtatgacatcgtgtccctgcaggaggtgtgggcgcaagaggacagcgagctactccaaaagggcacggaggcggtcctgccccatagccactactttcacagcggcgtgatgggcgccggtctgctggtactgtccaagtaccccatcctgggcactctgtttcatgcgtggtccgtaaatggctacttccaccgtattcagcatgccgattggttcggcggcaaaggtgtgggcctgtgccgcatactcgtcggcgggcagatggtgcacctatataatgcccacctgcacgcggagtacg

SEQ ID NO: 36803 - DNA, 6819 bp, DROSOPHILA
atgatgctacagctacttctattctgcctggcgctcttcatcttcgtttattgggtcttgcccacgggcattagttggtatttggtgaagaggtttcgggtcaaagtacggatcggtcgcatttcgctgccctacttgtccctgaagaatgtgcacatcagcaagagtggattctcggtgcaaatcgaggaggtgtgtctgcgcagcagtttcttcaccaccgaggtgaccaagctgctctccatttatatccgtgacattcgcatcaacaaagacattcacagtcgacaggatgactcctacgaccaggactcttacgaactccggcggactcagacgttggcgggcaaagcctcggaggcgaagggtgtgccagacttccggcaaactaaggtgccggcgagtattatcacctttgcccaatttatggcagtgcacgtgaacaacatatcagtggttctgatgaacaatgactttgatccggggtggttcatccatgccacggcgaaggagcttcatttggacgggagtatagtgcaaaatgctcgtgttctgttggtcaatgcagcccttagcgaagcacaggccaagatgctgaggcactgcagctctcgccgtcaatcgctggagaatctgaacaagattcgtccttgcctaggcgaggtcagctttgacatgaccctggatgcgtcgctctttgcccaaggccctctgtccatggataccctaagtctggtcatcaacaatgccaaatccgtcatccacggcggactgtacgagttccttagtgaggccaagcggaggacatcgaccggtcagccatctcggcgctccactcaaggcctagctccctcgaaaaggtcctacgacaatgacaactacgagaagctggcgcccattataccaaagaactttaactttagcattaaggcggcaacgttttcggccgtcaaagaaaactcacagaacgattttagtgccaaactgcagtcgtttcaaatctcgggaaagtttaactcgaaagtcaccgatgaaaagacgttgttaccgtcaatgcttgccaaattgggttttcatcatctagacattgacaccaaatatgaaaagctcctctttgtagaacaatttaccatagactctgtgctggaaaaagacatattcaacttgtatgtaaaactgaagacattccaaatcatatataatcacagcgagatctatgactttgtcaacaacaattttctggcccgccagcgatcgagcgaagcgcagccaatgcagttgatacataagcagaagtccctgccggatcacttggatctggacacggctgtgcagagtaatctgcgagcgaatcagcgacgggagggcggagttctagagtggattatgcagcgaattgttgttaaaggctgtgcggaactgtttaatgtctctcttcttatgaaactggaagatgagcatattgccatgagtgtgagtcacacaagattcctcttggagcagatcgaggaaaagcgaagtaatctctatgagaacaagttcctcaatttgttgttgaatcaacgacaatggagcatggaactcatggtggaaactctttggtcaaatctaggtaactccatcaacgacaccaacaacttgaaaaagactcattcgccaggctcgccgtttttcctcggagtgagcttggtcaagctctgctcgtatgcaaacaccactaaactggacatatcagtgcacacatttcgcacggaatacagcatgcagcttgcggaattcgtggtcaagtcaatggagtgccttcggcagtaccggggcataaaaccaaagaatatgtcgggacaatctcacgccagaccaaatgcaggccttacattgtccgtgcagccatcacaatcatctacctcactgcgggtgtctgttaaggtcaaggatattacggcttactttgtcaatcatcacaatgtttattcgctgctcagtttctcagagctgaatttatcacggtctcaaagcctgaccaccctaaagctcgaagagtttcagatggctataatgcgctcaatgacggcttcttcgctttgcctcaccgacttctctgacgtttttgctacatgcaaaatgatacgactggagcatgaacaagtggagggtacgatgggcaagttgtccatttacatacccggcaacatggaggccacgtggaactctaatttgcacatgcacctgttgacattggtgcgcgatatgcaggacttgaagacagagctggctattcctgcttcgtctgttaagaaaacaactcctaaagaaggattcatagtggagttgtctgcagaacgtagcaccatcttcgaaattaagttttctgatcgtcactcaattcagatctttgtggaaagcctcttctttagccaaaaggaacgatgcatcatttatgcggagaatgtgtttgtcaagatcgatgatcagcacatattcacagtgaaggagctggatctacaatcagttccacgtctcgaggtactcacccaagaaagacaaaactttcctggttttcaactgccctccaacaaggtgtgggtcaccacaattggatcctttaaagccattttcccgtatgaccacgacttttataacgcagtcaatggagagtgcacatcgcactttaaatggctaaaaatggttcacaactacaaaaagaaaccctttacggtggactcaccgctaccctgtgatttggttattaagatcaaggagttcttgctggaaattagcgacgatccctttgaggtgaaacttcgtgataactatgttctattagtggatgaatacttggagagcttgaagcgcaaagcgctttttgacaagaagatcggcgagctctgctcagaacgtctcttgttgccatctggaaccattgagggtctctacgccaacctggtgaagaagaactcggagatctacattcagcgctcgaagaaaatacgagaaagtggaccagtacgcacccgattgctggcctggatcatgacggacgtgaatattatggcaatggcggacacctccattcatggctacaataatgtgacgcgcattatgcgcgaaatagatcacgagagtccgtggccggaggagggtctcgagttctctacactttggtgccgcggtgtcaacatcagctgcactgaatggaaattcatgctgagggacttcccgcaaccaatgttctgcgtaaaaagcatgcgactgtacggaaacctttgtggagccgagcaaatgggctccaagcgagccaagcgagatgtgttcattgacgtgggtgaaccctttggtacggatgtgattcaacgcagcatgccctcgctaaaattctaccatgactttgattgcgaactggagagctgtagctacgcctttggagcttgctgggaacctctgcgattgcttctgcatggtcggttaactctgatagccaagcaatttaccatactcctgcacgcatcgctcgatccgtataacacaacagaggaaatggagttgacctggaataattgcggcattgtactcacaaatgccaagatcatgtttaaaggggaacttaatgtgactgtacgaacagcgtcccgctacgacgattgtcgtctgcttcattttcccaatcttaagttgacgattaagctgaaatgggtgtgcctggctaatcccaacgaccaccatgctgtgatgccctgtgcccccgacaagctgccggagtactcgagtaatcaagtccatgactccttccgcgccttccgctcgctaaatctcaacatttggatatcatttgagacgaagcctaaggcgggcgaagatttggaagtggacatacccagcctggtgctgtacggcagcacgttgcgatggtttgagagtctgcagctcattttatcaggtgtgacgaggcccacgcgacggggtccggtctttaacaatgtgagaccgcgtaagaaaccccttagtcgacactacaaaaaggcgaacttgcagatgtgcttgcataagtttcaagttctttactggatgtcccacgccctccaaaagggattccagttgaacggccgccgagtatcttttagttctgagcactcgctaacactgaatcccattgacgatgggctcatccatcggccacgagcggattggtcaacaatctacatgaactgcgagctcaatgacgccgagatctggcttaagagtattctcaccgagaagatggacagtagctctgagaatttggccagtgcagcagatgccttcaaaatcgtgagattctacttcctaagcgtggccaaggtttcctatggacgcgaggcactgatacccacgacggctacaagcacggaagaggatgttaaggcccagtccacgacgcctacgcataagttggtggtctatgacctaaagggtgcctggacaaagagcaatcgagatgtggcttttgctctctttgattccttcatgaagtcacagaaactgaaaaacaatttgtccacggaggcggtaaagagctatcgcaaggagggtccaaactctgccgttttgaaacataagcgaagtgacagcacaattaccttgtccagcaccaacaacgaggttttgccaatttccaatccaaatgcatcgatgaaaaaagcccccgcccagattcatgccacagccatgttgcagcagctcatcgcagaggcggaccacaaattcaatgtgtatagtgatgatcatagcacccagtcgagggaactgcagctccagggcctgcaggcatgttccgcccaggatattatccacgagaactggtccatcagtctggtgaactcacaagtactgcttaagggctgtgagacctctggctacgtaattatcagtgctgccaaagctgaaattttgcagcgggaacatcggccagtttggcgcgagcgctcgctgatctcgaaaaccacatggaagggattgttggagtgcatgcagtactatgcaacagttagcgcgggggataataattccctgttggagaaggagatcatgtggctgacggtggacaacattcaggacaaggacgagactgtgataaacaacctgccggacatatcacatttggtgggcagtggacgcagtgtgggcggtgtagtctcagagactgttggagctttcttgagcgacaattcgggaggggctcaacccgtgcaactgcagcgcatcgtgtccaagtgtaagtgcgagtttttctatgtgagctacggcgatgccatcgatccgaatagcattacggaggtgccgccgcccccttcagaggaattgcaatcgccatgggaaaaacaagacgatcccgtagatgccttcacacttatgcatcacgatctggatgtgtgcaccaactcgctgcagtacgccatgattctggatattgtaaacaatctattgctttacgtcgaaccccagcgaaagcaggcggcagaaaagctgacaagaatgcgtttccagcttcagctgcattcgacggaggatcaaaagcgacccatccagcagaagcagacggtaatccgaagtctactcatgaagattcgttcgctggaaaaggatacacacatgatcagcaaagagcgtattgaggatggcgactcgctggagctgcgccaagagtacgaccatgtccagcagatgatccgggagagcaaggaggagctgaacacatttagcgaggacctggacatgatgttgctctgctataaggagactcagttgtcgcagctcagcaagatatcaaacgtgcgctccgacgagtcggttacgatggtgcggaccaatgagatctgcttcaagcgtgcccagtggaggcttacggaaacggatggacagattggcatagctgatcttgtccttagtgcttttctgtacaccaagaagtccaagagcgacgattcggtggagcatttgctggagctgggcaacatacgcatggaaaaccttttgccgcgagaaatctatcgcgatgttttgctggccactgaaatccaaaaagacatgcccgtggacacccacaagcgggtgctacgtatcttctgtcgggaaaaagctccagtgggtggcatatccgttaaggagcatttcgagattaatgtggctcctattacaatagccataacgaaaaaattctacagcaccatgctgaagttctgtttcccggaccgcgatgcctccgaaacggaggtcagtgacgagctggatgacaatgcctcaaccagttcggcgtctacaacgaatttacaggccaagtcatcaacatcttcgtcgaccaagcgctcgggtaaaggaaagaaaggggccaaggactccgagttctatgtaaagattgaaaaagatgacgtggagaagatgaaggagcgcgccgagaaaaacaagctgtttatctacatcaagattcccgaagtgcctgtgcgcgtcagctacaagggcaacaaagagaagaatctagaggacatcacagactactcactagtcatacctacgctggagtatcacaatgtgacgtggacgtggctggatttgcttctggccatgaagtcggtgagccggcgggtgatattctcgcaggccatcaaacagaagctacatatccaccagcggcaaccgattctatccgcaggcgaacgagcgaccccgcaagaagcggaggataaggctgtaatgttgttcggaaatcgcctattgaatgaaaaccgtaaccagaaaaagggtgtgttcaagtttgcctcgagcggaaagagatcgggaaatgattga

SEQ ID NO: 36804 - protein, 2272 aa, DROSOPHILA
MMLQLLLFCLALFIFVYWVLPTGISWYLVKRFRVKVRIGRISLPYLSLKNVHISKSGFSVQIEEVCLRSSFFTTEVTKLLSIYIRDIRINKDIHSRQDDSYDQDSYELRRTQTLAGKASEAKGVPDFRQTKVPASIITFAQFMAVHVNNISVVLMNNDFDPGWFIHATAKELHLDGSIVQNARVLLVNAALSEAQAKMLRHCSSRRQSLENLNKIRPCLGEVSFDMTLDASLFAQGPLSMDTLSLVINNAKSVIHGGLYEFLSEAKRRTSTGQPSRRSTQGLAPSKRSYDNDNYEKLAPIIPKNFNFSIKAATFSAVKENSQNDFSAKLQSFQISGKFNSKVTDEKTLLPSMLAKLGFHHLDIDTKYEKLLFVEQFTIDSVLEKDIFNLYVKLKTFQIIYNHSEIYDFVNNNFLARQRSSEAQPMQLIHKQKSLPDHLDLDTAVQSNLRANQRREGGVLEWIMQRIVVKGCAELFNVSLLMKLEDEHIAMSVSHTRFLLEQIEEKRSNLYENKFLNLLLNQRQWSMELMVETLWSNLGNSINDTNNLKKTHSPGSPFFLGVSLVKLCSYANTTKLDISVHTFRTEYSMQLAEFVVKSMECLRQYRGIKPKNMSGQSHARPNAGLTLSVQPSQSSTSLRVSVKVKDITAYFVNHHNVYSLLSFSELNLSRSQSLTTLKLEEFQMAIMRSMTASSLCLTDFSDVFATCKMIRLEHEQVEGTMGKLSIYIPGNMEATWNSNLHMHLLTLVRDMQDLKTELAIPASSVKKTTPKEGFIVELSAERSTIFEIKFSDRHSIQIFVESLFFSQKERCIIYAENVFVKIDDQHIFTVKELDLQSVPRLEVLTQERQNFPGFQLPSNKVWVTTIGSFKAIFPYDHDFYNAVNGECTSHFKWLKMVHNYKKKPFTVDSPLPCDLVIKIKEFLLEISDDPFEVKLRDNYVLLVDEYLESLKRKALFDKKIGELCSERLLLPSGTIEGLYANLVKKNSEIYIQRSKKIRESGPVRTRLLAWIMTDVNIMAMADTSIHGYNNVTRIMREIDHESPWPEEGLEFSTLWCRGVNISCTEWKFMLRDFPQPMFCVKSMRLYGNLCGAEQMGSKRAKRDVFIDVGEPFGTDVIQRSMPSLKFYHDFDCELESCSYAFGACWEPLRLLLHGRLTLIAKQFTILLHASLDPYNTTEEMELTWNNCGIVLTNAKIMFKGELNVTVRTASRYDDCRLLHFPNLKLTIKLKWVCLANPNDHHAVMPCAPDKLPEYSSNQVHDSFRAFRSLNLNIWISFETKPKAGEDLEVDIPSLVLYGSTLRWFESLQLILSGVTRPTRRGPVFNNVRPRKKPLSRHYKKANLQMCLHKFQVLYWMSHALQKGFQLNGRRVSFSSEHSLTLNPIDDGLIHRPRADWSTIYMNCELNDAEIWLKSILTEKMDSSSENLASAADAFKIVRFYFLSVAKVSYGREALIPTTATSTEEDVKAQSTTPTHKLVVYDLKGAWTKSNRDVAFALFDSFMKSQKLKNNLSTEAVKSYRKEGPNSAVLKHKRSDSTITLSSTNNEVLPISNPNASMKKAPAQIHATAMLQQLIAEADHKFNVYSDDHSTQSRELQLQGLQACSAQDIIHENWSISLVNSQVLLKGCETSGYVIISAAKAEILQREHRPVWRERSLISKTTWKGLLECMQYYATVSAGDNNSLLEKEIMWLTVDNIQDKDETVINNLPDISHLVGSGRSVGGVVSETVGAFLSDNSGGAQPVQLQRIVSKCKCEFFYVSYGDAIDPNSITEVPPPPSEELQSPWEKQDDPVDAFTLMHHDLDVCTNSLQYAMILDIVNNLLLYVEPQRKQAAEKLTRMRFQLQLHSTEDQKRPIQQKQTVIRSLLMKIRSLEKDTHMISKERIEDGDSLELRQEYDHVQQMIRESKEELNTFSEDLDMMLLCYKETQLSQLSKISNVRSDESVTMVRTNEICFKRAQWRLTETDGQIGIADLVLSAFLYTKKSKSDDSVEHLLELGNIRMENLLPREIYRDVLLATEIQKDMPVDTHKRVLRIFCREKAPVGGISVKEHFEINVAPITIAITKKFYSTMLKFCFPDRDASETEVSDELDDNASTSSASTTNLQAKSSTSSSTKRSGKGKKGAKDSEFYVKIEKDDVEKMKERAEKNKLFIYIKIPEVPVRVSYKGNKEKNLEDITDYSLVIPTLEYHNVTWTWLDLLLAMKSVSRRVIFSQAIKQKLHIHQRQPILSAGERATPQEAEDKAVMLFGNRLLNENRNQKKGVFKFASSGKRSGND

SEQ ID NO: 36805 - DNA, 3275 bp, DROSOPHILA
cccatttacaaacgcgtctcaactgccgaacccgccatgtctaaggtgcaaacgctgcccgtaacggtgagcaaagtggatacagaagcgctgccggaaactgaatcccaaccggaagtccgggagcccaagatggacgcccgcaagcgacgtttcctgttccgcgccgatgccagctaaaaaggaaaacagggagatgcagcgaaggacagataacaatcctggcaaggattattcacccacttagcccgaaccggaaccccgttcacctcctagttcccaatacgctatcccactcatttgcacctaggcaaataaatttaataattttttgatttcctagttttatggccatttctcaaaggataattgcggacgagcgttgaaatttaagtttagaattgttgttccgaccagttaaagaaacaaactacaaaaaaaattgcaaaaaaatcttaaaataaaaatattaaaaattaaataacaaaattgtttgatgtaggtggggtaaaataggtaaggaacactttttggccagctaatcaactccatcgtgcagaggtttgagtgtcctgtgttttgcctaatcgcattcaatttctgaacggtagagatggtacgcttagaaacaacctaaaacaattttatcttatagttgaacttaaaataaagtaacaatatttaaaaataattctataatccttattttttttcaccacttgtaatatatgtgcttaaaaatcaaaagacttaggacacaaactgcaagtggcatatcaacaggttgtagcccaattcaaatagccaaacataccatattcgtaatttattttagaaaatcgtttacaaatcgtattaacacttaggctttgggtaattagctgtatgaggcaactaccaggtgagagaaccacaatttacagatacagtgaacactggacgttaagtaactaacacatcacatctcattgacggagccaacgcaggatcaccaggataactacgcctccgtttcctgctccagttcgccagcctggatttcctccggcgttcgcagatcgatggcgaacttgtgtcgcgtgggtgtaatagtgtcgctgggcgtggcctcgccctcctcctcaccggttgcctccttgacccgtcgcgagtaatcctggaaggcggcggccagggcaaaggtcaacttccgcgccatcgcacgactgtcgcacacgaaggcgtgaacctcaaagggatgcggactcgactcgtccttcaccacgatcatggcaaagacccttgtgtagaccaggtcctgaacgccatacgagatcgtgtcgatgggatagctccagtgattgatgctggcctttggcgatatgatctccagctggactccgtcggtggacaccttcagttcgcagttgggcagcaccttattgggcggcaggttcttggccacgcccaccattatgtccaccggacgacgcgtatacttaatgccccataagccacgtgccacttcggaaccaatgtacttcacctgcagggagaaaatgtatacgatatattaaaaaaaaaagattgccgattctacactgcatttagtcaaaaaaaaaaaaaattccaatgagtatataaccaaatattcctattttacgtgagtaaacaaatatatgttcatggacgatgtggtattattcatcggtggcattggtttccgctgcgcatgcgttgccgttagagtcgcttcatttgcatccgacctgcgaccggatgtccacagccaagccagaaagctgttgctgttgctcatgtggtgccactgccacgcccctttcccctcaccgcccccaaagtgaagttcagcagggcgtgacgcatgcgtgtctggctctttttttttggtcatgtctcatgtgcgggtggtattatgttcagatgtctgcttttgttcgtttatgcactcataaaaaaagagttcatcgagaaattaggatagacattttaacagtggattttgtcatatgtataagtagccaatatggaaccaatatactcatttcattttatcattaattttcagtgtacctaatttttttccgtgtattttcggtcatatacgtaagtggtcttaatggggattggtacctgaacttgcgccacatatttcacagcatttaaatttgaaaacgcatttcgccatgtgaacactcaccttgaacgttatgggcaaatcctccacattgacctggctgtccagatcggtggtactactgttgttggaggccattctgtagctgtatctgtatccgtatgtcgtctatcgcgaaaggtgcaagcgaagatccaccgttgaacgcattcaccgcaaaccaactgaaagggcgcaaaaaacacgagcttgagtaatgctcccattaaatgtatctcgcggatattttatgcgccatcttacggagttcacatccaccgttgcattaccatatctctaccgtaatcgctgaattttacatggtttactttgtgtgcgctttttgaacctatatatgttatattccgctgaatatcggtcgggtcgactaatggttctgtttgggcttgttgttgctgtcgccggctacggattgctactgaactagcgatcggcggcaaaaggtgtcgcaagttgtgcccccaggtagctccactccctctcactcgctcccaatgccacctggtccccctcccctcccctccctcccactcgagcgcaggtaaacagaaaagagcgcaggcaaaacaaatgggctaaacaaaagcagtgctcagataacttttttctctcacgcggtatcgctgcctaagcgcaaacaactgatattagaagcgacagcccggcactgagagaaataagtagtgaaaagaaatatcaaatgcttaatgagtcttttaaatagatgtcttatcttatcgtttcttaaaaggatgaatgcgttatattattgtctttatcttatctttcaaaaggatgactgagttacattgtgatttttagcactcctaacggcaacaattttttttaagtggatcagcggaaattcccgcaagtagtaaagcattttaaatctaatcataaaataattatgaggtaaaacgagtatgttgcaattgataacccagtcaacgccactcaagcagggtattcgatcaccaactttttaaatcactttttccacacgcacttttccatgctgcacactatttattagaaatgtattattaatatttcctcacgcagcccgctgaccact

SEQ ID NO: 36806 - DNA, 600 bp, DROSOPHILA
atggcctccaacaacagtagtaccaccgatctggacagccaggtcaatgtggaggatttgcccataacgttcaaggtgaagtacattggttccgaagtggcacgtggcttatggggcattaagtatacgcgtcgtccggtggacataatggtgggcgtggccaagaacctgccgcccaataaggtgctgcccaactgcgaactgaaggtgtccaccgacggagtccagctggagatcatatcgccaaaggccagcatcaatcactggagctatcccatcgacacgatctcgtatggcgttcaggacctggtctacacaagggtctttgccatgatcgtggtgaaggacgagtcgagtccgcatccctttgaggttcacgccttcgtgtgcgacagtcgtgcgatggcgcggaagttgacctttgccctggccgccgccttccaggattactcgcgacgggtcaaggaggcaaccggtgaggaggagggcgaggccacgcccagcgacactattacacccacgcgacacaagttcgccatcgatctgcgaacgccggaggaaatccaggctggcgaactggagcaggaaacggaggcgtag

SEQ ID NO: 36807 - protein, 199 aa, DROSOPHILA
MASNNSSTTDLDSQVNVEDLPITFKVKYIGSEVARGLWGIKYTRRPVDIMVGVAKNLPPNKVLPNCELKVSTDGVQLEIISPKASINHWSYPIDTISYGVQDLVYTRVFAMIVVKDESSPHPFEVHAFVCDSRAMARKLTFALAAAFQDYSRRVKEATGEEEGEATPSDTITPTRHKFAIDLRTPEEIQAGELEQETEA

SEQ ID NO: 36808 - DNA, 3492 bp, DROSOPHILA
atccagatagccagtgaccaggagaagtctgcagtggtggccaccactattgctccggactgcgacaggggacagcagagagcagagctgcggcagcagaagtcccagcgcctggtggaagcacccagttccgaggtatccgccacccaggctactccgtcccaatcgaagccccagccggatgtggacgtctcgcttaatggagccgctggccatctgaaacccaacgagagggtcatcgcagcaacagccgcgccaacagatgcctccgccaccagcgagaccttccacaagcgccgcatcgttgtcaatcatccattccagacggtacgcgaagtggtcgagcacgagcccttcaccaactaccatcagattcaggtgaacgagccggctccgccctcgcactaccaccaggcctactaccaaccggcgctgcagacccacgggagtttggtccatttccagacctcgtccgcccatggcaatctatacggataaggaattaggattagggaaggatccgaagtcgaccaacgaacgaacccggccaatgcacttcctctgctaatcgttatcttagtgttaggctagatgctaaacttatcatgtacgcaaatccggtggaagggccctttccatgatgacatgaccctgatcttctttcgcattaatttgttataaacgcgtaggcttaagtgcagttttacttgccaacaataaagtgcatatataatgctaaaaatgattttctcgtcttgatttgccatgtatatatatataatatatcacatatgtatatggctatacaattgttatataagtgttttgtttttggttaggctcaaggcaatatatagttatatatgagaagcatagaagataataaaattcgaaaatccttgaaatgctttgagctttgcttctctagtttcttcaaatttaaaaaacattcttcttacgctgatatcgaaggttcctctaatgaacgcttttgattttgttacgcgcgtttgggcttttcaagaggctcatcgtcactggagtagtcggatgcgggactgtgagcaacctttttccccctaggaggttcttcatcactggactcgtccaacaggtgtgttccagcaccgatcaatacattggcgatcttttctgttcgggcggagattgcaacaggatcctctgttgaagtggacagcacggcagccgtgataagcgtcgacgtggagggcgcgtccagttcaggttctaaaatgccaaaaatcagaatatgggcttaaccaatgacgatctttcctaccctgctcattgagcaagccatgattggcctcccgccgcttggtcactacaactgccgtaatatagaaggtgaaaatgggcagcaggacaactacgccaacggcgatgagaaaattggtcagcttcacctcgcgttgacagcatttcagcgttttcgaccaattcagacgagtccggttcatctaagcaaaagtaaaggtgtaaaaataggcaaatgtaaatataaatttttaaacttacattgtcctgcagatcgaagcacacacttccaccgactttcttttccatgctaaggtagaaatcatttagactcacgtaatcatttttgcacttgaagcaaactaaatccgaactagcagattctaagcaattttgcaactttgttgagttatcgctgtatacaatccaaaaattatccctgaagcaatctggaaagtaggaatagatcagtgattcccaaatgaacaaagtactgatgcacactttcgcagttggccttttgccacaggctagttaggattccttgggtggtagccactatattgatcctgtccgagttcagataacgcttggaacagttggcgttcgcaattaggtttccgtaatcattggtgagattgcggtagagatcgacgcagccctcacacaaattcacgggcactgattttgtggtggcgcagtagatgaacttgctctgtgcatcgccaagatcggcgagcaatttctcgcaggaatgtttcttcccggccagcagcatgttaaactgtccacttagagttaggataagccccaagagtgcaatgtaactccgcatcttttggtgtgctttgctcttcgcctacttgaacgagatgaaggaggaaaccaggagggcgagaagccggcgaatcccctggtgcttctgtttgttgatacgggtgctcccttttcgcacacccaagttcttctatgaaatatattctttctggagaggagtgtcgggtgagttgctgttggcattactaacgaaactcacattcttaccctctgcacactaaacaatatcacaatttaacaaatacttttataaaatcatatatttttgtattgtatttcggctggagacatcatccatcaatagttctgcatgcattcagttacctgcacaccaaattgttgtccaattgcaatagaagcaattatttggtgtaatttataaacaaaacaatagcaatcatttagatgtccaaaaatatcgggcctttgacacttcgacttttcttagtgaggaatcgctatgaaagcgtggaacatctggcaacgctaagaggttggcgcgaattttcaaattaacttttacagtaattgccagttttctcaccgaaattgtaattgtaaaatcaattgtcattgatttattttaattccctaaccaaattcctcttttccccattatgaagatcagctgctgtaagtatcatatcaaaaatagatcacgaagtttactttaaaattgcacgtttcatttaggcaactgctgatcaaactctgagcattgtttatcatttatttgcgaaaaatctgtaaacaacccttcacaatgagtatatttcaatgaaaggaagttaagtgtgttacataaatagatgcaaaaaaagcggggcagtagtaatgctaaaatacatcgttttggatatgaatgacccaaaacaaccccaacttggggtttttccattatcaatcgagttccgtatgatcagtaaaatatataaaaatttttatccatagataagaaagggttgtctatttattactccatgcacatgaatagactcttcttacatgtacatctttttttagcatccttcgcaccagcattttagactggggctgcagtgtccactggttcgcccttccctctggcagatatctacgcacttcttcctgtgccacacagcacaggaacccctatatcttccggaaaggcagtcggcatgtgattcttccgctcccaggaaaattatcatcaagacagcggacaggacaattaggaacttgatttccatagtttcggtaggaggtctggtaacttagtaattgttgaaatgcaatcctcaagaaattgatcgctctcagctcagaataagcgcttaaatacgttccgatctgtaagttttacactcagtacgacgacgctgtggtgaaatttatctc

SEQ ID NO: 36809 - DNA, 1139 bp, DROSOPHILA
aattacaccaaataattgcttctattgcaattggacaacaatttggtgtgcaggtaactgaatgcatgcagaactattgatggatgatgtctccagccgaaatacaatacaaaaatatatgattttataaaagtatttgttaaattgtgatattgtttagtgtgcagaggaaagaatatatttcatagaagaacttgggtgtgcgaaaagggagcacccgtatcaacaaacagaagcaccaggggattcgccggcttctcgccctcctggtttcctccttcatctcgttcaagtaggcgaagagcaaagcacaccaaaagatgcggagttacattgcactcttggggcttatcctaactctaagtggacagtttaacatgctgctggccgggaagaaacattcctgcgagaaattgctcgccgatcttggcgatgcacagagcaagttcatctactgcgccaccacaaaatcagtgcccgtgaatttgtgtgagggctgcgtcgatctctaccgcaatctcaccaatgattacggaaacctaattgcgaacgccaactgttccaagcgttatctgaactcggacaggatcaatatagtggctaccacccaaggaatcctaactagcctgtggcaaaaggccaactgcgaaagtgtgcatcacatggaaaagaaagtcggtggaagtgtgtgcttcgatctgcaggacaatatgaaccggactcgtctgaattggtcgaaaacgctgaaatgctgtcaacgcgaggtgaagctgaccaattttctcatcgccgttggcgtagttgtcctgctgcccattttcaccttctatattacggcagttgtagtgaccaagcggcgggaggccaatcatggcttgctcaatgagcaggaacctgaactggacgcgccctccacgtcgacgcttatcacggctgccgtgctgtccacttcaacagaggatcctgttgcaatctccgcccgaacagaaaagatcgccaatgtattgatcggtgctggaacacacctgttggacgagtccagtgatgaagaacctcctagggggaaaaaggttgctcacagtcccgcatccgactactccagtgacgatgagcctcttgaaaagcccaaacgcgcgtaa

SEQ ID NO: 36810 - protein, 253 aa, DROSOPHILA
MLLAGKKHSCEKLLADLGDAQSKFIYCATTKSVPVNLCEGCVDLYRNLTNDYGNLIANANCSKRYLNSDRINIVATTQGILTSLWQKANCESVHHMEKKVGGSVCFDLQDNMNRTRLNWSKTLKCCQREVKLTNFLIAVGVVVLLPIFTFYITAVVVTKRREANHGLLNEQEPELDAPSTSTLITAAVLSTSTEDPVAISARTEKIANVLIGAGTHLLDESSDEEPPRGKKVAHSPASDYSSDDEPLEKPKRA

SEQ ID NO: 36811 - DNA, 2522 bp, DROSOPHILA
aaaaatgtaaaactagaatggagcaaatagaaatgtagctacgattgtgccttgtatcttgtatctacgcccaagacggcgcacttccgtttccggcccttctgcgcatgcgtgcgttcactttgagttatgatttttttgtgcgaatcttgattgtttcattttttttttgttcttatatatatagttataaatttcaatactgtgataggtatatttgaatttgatctttcttttcccttgaactccaaaagtcacaaaagataacccatatatcacaatttaaaagggtttctctcctttccttttattaatcttcttgatattaacttgatccctcttgctgcccaaattgatcataattcatagatcgattagtcgtggactctatcctaaactgttttcgcctctacacaaacaaatttgatccccaaccaatttccatttttatatgcccgagaagatcgagggatctcaaaaagtgcccctcattagccgactccagcactttggctttgggaccttttcctgtcgacggagagtttcgattctcgaaatgccaaccatttcctgtcattgaaagccccacacggcaaaagttaaccaagctaaacaaacaacatcttgagctgtccgaccgaccgtcagttggatttcatccgccgaggttgtttgtgatttcaattattaacgcttcctggtgctcggatcgccatgtggctcgatccggtccgatcattaggccaactcttctccagacaggaagaccagcgacgactcgacagtgtcattatggttattgttattattattattattattattattatactcgttggttgcctgccctgcgtctctgcgattgcatatacttttaattgttttaaattaccgccgacgaatctcactcatctctctctacttatctccatcgcccgtcccccttaggtatgcaacgattctggcattcgacgtgaagatcgagcgggaggcacaggaaatggccgattccctgggcgtaaaaatattccaagcggacattatctaccatctcttcgacaagttcaccgcctatcgcgaggagctgaagcagaagaagcgcgaggagttccgatccgtagccgtctttccctgcaagttaagggtaagtatggtaactattatccattcaggataatagttccattcaggataatagttatgaagcaataagtattaatacctaaaagaagcaaattttccgccaagataaagattttataaggctgaaatgtaggtagatttttatttgggttttaatacaatatctttgatttggaatatacaaagtgaatataagttgcacaagtcgttctcatttccaagtgcacgtatcgggtgaacaaattaaagacggaaacccaaaagactcggtgtcattatgggcattattttaatgcgcccatgttcgtgttccatttaccgccttcctcccctgcaccaacagcctgactgcaattacccccgaaagctacaggtgtaaaatgcaatctgccgcgaactgaaaatgagaatgagaccgagactgcaactccgatttcaagtgagacccagaatggatctccagctgtggcttgtctcgtcttgacgctggcctaatgatgctggccaacaagaatggaacgggcttgaactcctgggggccgggttctgtgcgatatactccataagccaggccaagacaagcactcaacgagcgattaaagcaaagccttagatcccaacagacgcctgcatcacgtccacacttcctgctcaaataatgtttaaacagcgtatttgatttataggcaatcattagattttggtcgtatgcaatgtggcgactcaacacgccacactccactcggggccactttggtccactctggtccactctagaccacttctagccactgggctcccactgtgctggtaattggacacacatcgcacagctgttggatagcatttgttcgatctcttacactcgtacattaagcactacaactatgttgtataattttgagccagttatcttatatatatttgtgcatttatgtttgctgaatcgcttaatattatggaatctaataccttatttcagaaaagaataatataatttgaataatttttttcgagtgcacactgccagctggaacataacgattctctggagtggaagtcccagtcgcaggtcttgtaataacaatgacgttgtttagtttgagttattaactcgccttctgtcttaaggagttggctggtaggtgggggcataggcatgtgcatgcggagctggagaaacgtgttctctgggccacttttctttgttttttttttatccccggcaacgtacaatccattttctatgccggctgattcagattgggcctcatccgcaacttttgctgcaggcggcatcccatttgaggccttcttcaacagttgacgcagcggaaattaagttgttcttggtgcagtcagtgttgtttttggtcgag

SEQ ID NO: 36812 - DNA, 180 bp, DROSOPHILA
atggccgattccctgggcgtaaaaatattccaagcggacattatctaccatctcttcgacaagttcaccgcctatcgcgaggagctgaagcagaagaagcgcgaggagttccgatccgtagccgtctttccctgcaagttaaggcctgactgcaattacccccgaaagctacaggtgtaa

SEQ ID NO: 36813 - protein, 59 aa, DROSOPHILA
MADSLGVKIFQADIIYHLFDKFTAYREELKQKKREEFRSVAVFPCKLRPDCNYPRKLQV

SEQ ID NO: 36814 - DNA, 4558 bp, DROSOPHILA
attaggaaaaaggtgcagcactccgatatttttgctcacagctgttaacagaggttaacagtgctgattgtatttcaatgtaattgaattaaattaaaatacataacatacataactaaaaaacataattattataattattattattgcaatgtttgttttctactgaatatgacatatggaaatatttgccgcactgtatgtttcagcaagccaggaacggtcactctgacaactttttggtgcgactcgcacgtttttctttgtaaataaataaaaaaaatatattaatcaaggatgttccgcctgcagcagtcacaacccgatcccgccgaggagcagaagcgcgtggcagccgaagtccgcttcaatttcatcctatttggagccgtaatagccgctgttcgcttgggtacgtgaaattcttatgtaaagtcactaaagttactaatattttccatttgtttatcttgtgtaaatagctcccatagtcctgaagcatttaaatacggcgtagaagaaaaaatgatcgaagaagactaaaagctgtctacttatttaaaaacgttatcaattacctagttgttcaagaaattatagcaaaatcctaagcaactggcacgcgaaatgcatttatttaaaagcactctgacccatttgatgtcttttaaagtttaaatcgatgcattgtaaatgtttggtaactgtcgagcgaatggaagcgaataaaaaacaagaaacatgtaacttataagccaaggcttttaatgttaaaaaatactataaaaacatataagaatgtggatcttttaacgggcaatgggtatctagtcttaaaatgaaattaaaccataataaaacaaatcttattgtgaacaatccctgttcaaataattttaaagcttccgcaatcgatatatcgataacgcactcccattagccaccagagctggcacatctagcccaaatcgctgtactgctcctcccacgccagtcgattctggcgcaaaacaagccgggcgcccatcactgcctgtgtataaacagttggcaagaaacgaagtcgaaaaacagaagttttgctcgaaatggcagcgtaaaaaaccattaaagccactttcattactgcacggccgagtcggaatatatacatatatagaatagtgacagataacaggcggagaggcggaaaagcagcggaacacccggaacatattgatacatatggacgtagacttcaagataacgaaagaagtaagttgccgcgtcgcgttttccatacatttacctttcactagctgtttctttagctttcaggcatttccgataatatataatggtggcggccaagtacgagcggctgaataccagtggtgaggcggccgggaacggaaatgggaatgccagcgatgcagaagacgaggagatcgaactccatttggcgcagaagacgcagctgggtaatggccatcggttgcgccagagcaacttcaagtacgccagcggaaagtgcggatccggagaggcgccgtgcaccaacgaaacggccacgttggcccaggagaacatgatgatgcaaatggccgtgggtacgctggccattatcttcctgtatctggcattatccatatcgctgacattctaccaaacggacatcaaccggcagatgccctttcccctggccatcgtaacctatcatttggttgtgaagttccttctggccgccgcggcgcgcagaatctacaggatgcgagtgggccgatcgcgggttcagttggattggaggctcgccctgcggaaaatggcacccacgggagttgccagtgccatcgacattggattctccaactggggcctggccctggtgcccatttccctctacaccatgaccaagtcctcgaccattgtttttatcctgctgttcgccatcgcttttggactggagaagaaggtaagccaatgtgctatatgcaaatacatactgaaataattatatttaaaatcacgtaaacaagtttttatgagcgttatctacttaactgtataaaaagaccttacaggtgcaaaaatgtttacaacttttaaagcttcttatcaagtaatttgacttaaagggaattagatataatataagaacatactgcttaaacattttagtcattaacagttttcaagtaatggtattgatatccctcaacgattgcgaaacatttttggaaaccaagtaatttcagtattttatcaaatatatataagttctttgatcatatttttacctattgaaatcaaaacaaatgcacttaatgagacttgattattttccaacagcaacacgataaagaaaagataaaaaacattatctcggatattatttttgtagaccacaaatgttgcattattatcagtcaattgtaagcaatccatttacctagtcacttaacttgtagataacgaatttggcatatttataaacatgcgatgatgttgatattaactttagaccaaatgcttatcagttagataataaaaaaggaaataaaaatagcaccaaacaggttttatatgtgctaagtatttgaaacctgctagtgtagtttcttatgactagacctgaattggtaaaacccaagaagtgaataagaattatcaaaaattgcactttctttgtgtcaaaatggtattaatggcattatttactttcagagctggtatctggtctcgattgtgggcctgataggcactggccttctgatgttcacctacaagtcaacggacttcaatgcccttggtttcttcttcatccttttcgcctcgctgagcagcggactgcgatggagtttcgcgcagttcataatgcagaaatcgaagctaggcttgcacaatcccatcgatatgatatattacatgcagccgtggatgattgcctcgctggtgcccctcgtaattggaatcgaaggttagtttgtggcttattacttgaaaatatgttggtaatcacacccccaatcctctccaggtgccgggctcatcgcggtaatagaagatctgcacaaccacacttcgaatgagataacttgggccattgcgaggatatcagcgggcgctttgctggcttttctcatggagttcagcgaattcttggtgctctgcaagacctccagtctgacgctctcgatagccggcattttcaaggatatctgccagttggcactagccgtgactatcagaaaagaccacctgagtgtcatcaactacattggcttgatcatttgcctggctggtatcgtttgccacctactgcacaagtactccaatatgaaggagatgcagcggcagcaggagttgcagctcgataacgaccaggaggagtcgtcgccaggggagtacaaattcaacgatggcagtgccattgtgggtgtccatgtgaagtcgcactccacgctgacggtgccattgctggagcaaaccgactcggaggacgagtctggtgcaagcaacaaacagaacgcctccgatgtgatcttcgacgtgctgaagcgacgcgacatgcagcgatgaaagccaatccttgtacagatgtcctgtaaatgttgtaaattcaaactacttttatgtttaccagcaccttggcccacgcaactacttactacactgggattagcaatgcatgtttaagtaagctagttagtttgacactcttcattccttccgtcaccgattccctcaacttcctcgatgcattcccgccttgtgcatttaggggctaggctagatatatgagacgtacgtcaaattgaagtgtaaagagtaacatccatgtttaagttgattcgattgtaacgacacgaaatctaaggaacgaagagtattctttggacaatcaattaacttctaatagcagttagttttaatctttttgcatttgtgaagctgaaaatgtattgagaactgtccaaagtttgcttgagttccgaaatctatctcgtttcttttttgtaaaaactcgatcttaagtcatacaacctatgtaaaaataagaaagccttaatgaccctttcattgttccttaactgacatctttaatttggcattccaaattgaattgtaaacccttatagttataagaatttttaatttgaaagctcccgcaaacgtctgattaaattaaacaaggggcattgttctttagcgaattataaataatgtcttcgttgtttttagttaatgcatcatttttgttgagtttttgacatattgtatttataagtttataagataatttcaaatatatattaaatacatatatattaaagcataacatcacgattattatatgggtgaggttcaactcaattgaacaagaccatatctacgttatggatgtcatttcacttctaagctatttggatttcctccaaatggtaatagtttcgtttttcccttttactaatctttggctacactctccactttggcgtgtttcaatgggtgctggttttcggtatcgtcttcaaagcgcgatcgcttcaaattcgtttgctctttgggaaggaaagtc

SEQ ID NO: 36815 - DNA, 1690 bp, DROSOPHILA
ctggcgcaaaacaagccgggcgcccatcactgcctgtgtataaacagttggcaagaaacgaagtcgaaaaacagaagttttgctcgaaatggcagcgtaaaaaaccattaaagccactttcattactgcacggccgagtcggaatatatacatatatagaatagtgacagataacaggcggagaggcggaaaagcagcggaacacccggaacatattgatacatatggacgtagacttcaagataacgaaagaactttcaggcatttccgataatatataatggtggcggccaagtacgagcggctgaataccagtggtgaggcggccgggaacggaaatgggaatgccagcgatgcagaagacgaggagatcgaactccatttggcgcagaagacgcagctgggtaatggccatcggttgcgccagagcaacttcaagtacgccagcggaaagtgcggatccggagaggcgccgtgcaccaacgaaacggccacgttggcccaggagaacatgatgatgcaaatggccgtgggtacgctggccattatcttcctgtatctggcattatccatatcgctgacattctaccaaacggacatcaaccggcagatgccctttcccctggccatcgtaacctatcatttggttgtgaagttccttctggccgccgcggcgcgcagaatctacaggatgcgagtgggccgatcgcgggttcagttggattggaggctcgccctgcggaaaatggcacccacgggagttgccagtgccatcgacattggattctccaactggggcctggccctggtgcccatttccctctacaccatgaccaagtcctcgaccattgtttttatcctgctgttcgccatcgcttttggactggagaagaagagctggtatctggtctcgattgtgggcctgataggcactggccttctgatgttcacctacaagtcaacggacttcaatgcccttggtttcttcttcatccttttcgcctcgctgagcagcggactgcgatggagtttcgcgcagttcataatgcagaaatcgaagctaggcttgcacaatcccatcgatatgatatattacatgcagccgtggatgattgcctcgctggtgcccctcgtaattggaatcgaaggtgccgggctcatcgcggtaatagaagatctgcacaaccacacttcgaatgagataacttgggccattgcgaggatatcagcgggcgctttgctggcttttctcatggagttcagcgaattcttggtgctctgcaagacctccagtctgacgctctcgatagccggcattttcaaggatatctgccagttggcactagccgtgactatcagaaaagaccacctgagtgtcatcaactacattggcttgatcatttgcctggctggtatcgtttgccacctactgcacaagtactccaatatgaaggagatgcagcggcagcaggagttgcagctcgataacgaccaggaggagtcgtcgccaggggagtacaaattcaacgatggcagtgccattgtgggtgtccatgtgaagtcgcactccacgctgacggtgccattgctggagcaaaccgactcggaggacgagtctggtgcaagcaacaaacagaacgcctccgatgtgatcttcgacgtgctgaagcgacgcgacatgcagcgatga

SEQ ID NO: 36816 - protein, 469 aa, DROSOPHILA
MVAAKYERLNTSGEAAGNGNGNASDAEDEEIELHLAQKTQLGNGHRLRQSNFKYASGKCGSGEAPCTNETATLAQENMMMQMAVGTLAIIFLYLALSISLTFYQTDINRQMPFPLAIVTYHLVVKFLLAAAARRIYRMRVGRSRVQLDWRLALRKMAPTGVASAIDIGFSNWGLALVPISLYTMTKSSTIVFILLFAIAFGLEKKSWYLVSIVGLIGTGLLMFTYKSTDFNALGFFFILFASLSSGLRWSFAQFIMQKSKLGLHNPIDMIYYMQPWMIASLVPLVIGIEGAGLIAVIEDLHNHTSNEITWAIARISAGALLAFLMEFSEFLVLCKTSSLTLSIAGIFKDICQLALAVTIRKDHLSVINYIGLIICLAGIVCHLLHKYSNMKEMQRQQELQLDNDQEESSPGEYKFNDGSAIVGVHVKSHSTLTVPLLEQTDSEDESGASNKQNASDVIFDVLKRRDMQR

SEQ ID NO: 36817 - DNA, 2939 bp, DROSOPHILA
acaagttaataaagcagttgcagctgtagcacctcctcaatttcagttcactttctactctgctcattttcagcttcttgtttgcttgcacttggcaaaagtgcaacgttgccatttaggaaactatggacctttttcataaaaacaaacttaaaaggacttcaaactaatatctttcgaactactcgaaggaatccagctctcgatgcttttagactttaagaaataattgagtagcgattttttttgcaagtgtatctctttgggcaatgtcccactaattgtgtgcaacatggtctatcgctttgcgcaaacacctcgcccgaaacacgtaggacacctttaaaaggtttcccggccaaccccttcgatatgatgcgccgtcctgctttcccttcttgccatttttactgttttgcgttaattgaaaacttttttcgccagcagatattcgtatttttcgcagcagcatggcaaaaacaaaactgaattggaaaacttttctagtttttcccacgcaacaaactacaaaacgggctgtggaaagttgtcgtaagtagaagtgcaactctgagttttcaacgctttgccgcctttcatttgtttagacctggggccccctccccctcccagtggtctaccttcctcaccgtaaaaaaaaaaaaaatggaagaaaaaaacccaaattcacagccagacttaaaagtgtttgtgtttcctcttagaacttggcggccaattagttggttgcactgaaatccggacggagcggcgggtttttggggacttcaactggttgtggcagctgttaaattcgagacttggtcttggccacattggaaatccactctaagctgtttggactgccgcgtttttcggaatcccaaaattgtcatggaatggagcgatggaagtggcgctttttgtcaaacagctgggttgctacaaagtaacttttatggtgggtattcctttgagttcgttttaccttttcgacttttcatatcaagttagggaacaaatttcttaatgagttgggactttcgaacccgaagggctgtacaaagaaagaaaatattaactaaaggcgtttttaattcagaatttcacgataactgagagcaatcatcaaaaatgatttaaatgccaacagatttgctgtctcctcggagagataagaccaatgtgagatcactacaatgaattctctagaaagaatgtaacacaatatagttcattgcatacccctcaattgcgttctaattaaagttaaaatttcatagaagtaaattctgtacttacgatttccctctgcagcttggcgatgttgaagtttgcctgggcgagtcgcacactcaaagtggccacatcgctggtcaactgtgccctttcgccggcatttcgatccaccagcttgagcatcttgtcctccaggctctgattgaccttttgaacccgcttgtgcgattcgtagagccgatcgtacttatcctgccacgctatcacactatcctcgagctccacttgtcgttccgtttccctcaaacaggccgattccagggcatacagttgcgtttgtttctcgattaacgcctgttgcagctgctcgatttccgctgctgcgggggcggatgtggcaaggggcgtggcagctatagccggtgctgccgtcgccgtggatattgccgattttgcagttgatatctctgccgctttcgggttgcccgctgtggccgcctgcaaaacgagtaaacacgcaaaatgaaattatgagctgtaaatattttgtaattaattttgcttccggagagcacaaaacaacaacagcaacgcataccggacgcagagtgtcacacggtttcgactgcagtacccgcactgaaaacactgaaaaggcccggacaaagcgaactccgtagaatgctgcggacagcttcattattttgccagcggatctcctctccttgtgtgttgttattatttccatttttttttttttttttttgcttaattttaaaacctcattttaaaaagctttgagcgggctgtgtcataaaaatgctcgtcatgcccgggaatttgtgggccaggggtaaggggattcgacttaacccataacgtacagcatctgctgcagataaggtattaatcagtggtttggggtggggtgtaaggttatataccctagtcaaattagtcggaaatattttaattaccttgatttcattatatttcattttaatttatttgtaagtatcaaaaatagttaaaaagatcataatttgtaaatttttaattctgtaattactagtcatttgatgataagtgcattgttttcagtatattttatacaaataatttagagaatacactataactcatataccccacaagatacagggtaggctacatggatctggagctcttgacaactgataagcgcagtgtaattgtggattatacagcacgcaaacattgagagagtgaaatgaaacaagagagatcatttgaagagaaccgaaaaagagataatacctgagagctttggcttcgataagtttttaatcagtccaacgtatacatatatacgaatttattcaaagaacatggttagaaaatgaaaacatcattaaaacatgaaaaatagtttgtatttctagtatgtaataagagaactttaaaactaaagcaatttagtcggtaatatatacatatattgatatatatagacatgttggtatatgaaaaaggcatttaacaaaagaaacattccgttgcgttttgtcactaaaccaatattttgctggagataagacacagaaatattgaactgacaggtgttgaagaatttcctatttcgtctatctaaattagaattacgaaccactgtcgacccctataaaaacacggtgctaagctctgaagccattgtaaagtgg

SEQ ID NO: 36818 - DNA, 594 bp, DROSOPHILA
atgaagctgtccgcagcattctacggagttcgctttgtccgggccttttcagtgttttcagtgcgggtactgcagtcgaaaccgtgtgacactctgcgtccggcggccacagcgggcaacccgaaagcggcagagatatcaactgcaaaatcggcaatatccacggcgacggcagcaccggctatagctgccacgccccttgccacatccgcccccgcagcagcggaaatcgagcagctgcaacaggcgttaatcgagaaacaaacgcaactgtatgccctggaatcggcctgtttgagggaaacggaacgacaagtggagctcgaggatagtgtgatagcgtggcaggataagtacgatcggctctacgaatcgcacaagcgggttcaaaaggtcaatcagagcctggaggacaagatgctcaagctggtggatcgaaatgccggcgaaagggcacagttgaccagcgatgtggccactttgagtgtgcgactcgcccaggcaaacttcaacatcgccaagctgcagagggaaatccccttcgggttcgaaagtcccaactcattaagaaatttgttccctaacttgatatga

SEQ ID NO: 36819 - protein, 197 aa, DROSOPHILA
MKLSAAFYGVRFVRAFSVFSVRVLQSKPCDTLRPAATAGNPKAAEISTAKSAISTATAAPAIAATPLATSAPAAAEIEQLQQALIEKQTQLYALESACLRETERQVELEDSVIAWQDKYDRLYESHKRVQKVNQSLEDKMLKLVDRNAGERAQLTSDVATLSVRLAQANFNIAKLQREIPFGFESPNSLRNLFPNLI

SEQ ID NO: 36820 - DNA, 5991 bp, DROSOPHILA
ttttcgggcaaaaaggtacaatacttgtatatatcttcgatagacagatctggtttgataaatagcgctaagcttcggcggctggacaaaatgcttgaatagaaaatataaatcaaagatcagaaaactctcccctcgtttttggtcgcattttataaaaataaaaatcgtttttcgttactcacactaccaaaaaatattgcacaatcggaatgtagaaaatataacgcgcttatcaaatataaatcgtatatagcataattatctatatattcctataaatataattcatatatttccagtgtaacctaagtttgcttgggcaaagttttcgaattctcgtggtttacattaacatgcagacatcaaaaagttacgcgatttttagtttgtttataattttcggttatatcattaggggtgaccatatcatatgtcttagatttgcttttgatttcagctgcaatttctgttgggcttcagatttccagcgttggtttcaaaagaaagtggattcttcgatctcctcttaaaggaagacaccataagaaagtagacaaattaagttgtaatgaaaaggaagactttaaggggtaacatataatgaacatacatactaaataaataatatatatcagtagaattacatcagttgattatagaaaagaaatacatatgagaactattttaaaccaacgcctcggatatttgatcaccctttttagccagattatcagcttagtgatggctccaaagcaactttagctagcttagattgtagattgtgttttaagtattacatttatcgtacatatgtatagtatcattgctattaacacatttgtgtgtgtgttgcatttgagaatccctcacccaacttaagcattgctatatcgtatttatatagaccgcggagtacgaactaaagttagcaaaactaggctagaatacagtttggtttccttcgcggatgtgtggcgcattcctcgaccccgtttgcttataaattcgtttcagttctgtggggcgtcaggacgttggatgactggccggtggacttggtggccaccgctccgccgggcgtggccatcctgacacgctcgcccacgccaggacccaagatcctgcgctgcagcatgcgtgctgctccagatccttgtagcacagcaccgggacctgcgccagatgctcctccattcatggaccactcgttttgcttcagcaggaactgcttcacattgtactccatctgggctatgtccacattctgggtggtcgtgtgcagctccgcttgaacagatcgcgttttgtccgtgtcattgggatagtatttgtagttgagtatatcacacgtgggctgttcggggcagatgagagcctcagaaccggaggatgtggactcaccgggcgggctcgagtcgtctggggcaccggcaatcgtggtatatgccactggcagtccggatctggttgttctccggtagtaagtggtgcacatttccgttttcttgggcggcacaatggtagcagatgggttttctggcaaggaattgctagtgatatctgtcttgggtgagagggaatcctccgtagatttctccggatagccgttggttagttgttgcggtgtggtcttgtaaccggaatccatcgagagtttctctatggatatggagtccatgcgatctaacgtggagtacgaggattgtcgttcggttccagagttggaatcactggttggcggagcctgctgcaggttcctttgctccagctgctgggtattatgctgaacccattcagccaccctgctgagttgctggcgtctgagaaggacactttcctggtagtcgatggcatcgcttatggaactagaattagccgagtgtttgggggagttcacaccaggatttgccgcctggtcaccgggcttgatctccacttgctccagttctgcgttttccacttgaggttcgagcactggctgcagggcaacattctcgtgaggagctgcaggtccttgccaggcttcaaccaccgactgggcattgctctccttgctggtaatgatgtccttgccatcgttgagctcctcgtccagtagcttctctcgccgcttgtagatcactggtgtgtaggtctctatggactccagattgtccagcaggatgttgctctgaccattttgctgaattcgcatggcgcacagacgagggcctcggtacttgggattctccgcctgaggaaagaaaaacaaaacattagtaactgtgaatagaatgttatttaaattccactgcaattgtaatttcaattgcatccattataccttaatcgttttaataagattcctgttgaatgtctcaaacattttggccccctcgcagctgctggttttgttgctccacagactctgaacgcttccggagttcgtggacttcaactgagttcccgatgggactgcaggagcagtactacctggaggagccactggagcaactggtttactaggctgtggctcgcagacatcttccagcttagcaggaaccaccgattgctgaggaggagcctgctccgcttccagcagactaggttgcgagacacccgccagcagaggcttactcgactcatcctccagatctccatgaactactcccacggcacctgcttcatatttgtttagaagttgcagggcagttcctccgccgtccagaaacctcctttgatacccattcctcagctggcccagattactcgtctctaggagatacttttcagctgcataggcacccaaatgagtggtgggatacatcatcgtagaggtggtcagttttccattgccatattccgtattctgtcccgaaatcgcagttctttcgcagagtcgatgatgtcccagtatgggattaaccatcaggtcatcctttttggccgggataaacagcttgtccatgtcgttcagatccgaaacggaactcttggtctctgatattacggaatcgctggacttgaccatcttcatcagatatggactattggttcgcgacggggagttaagattgctatgacatcgcagacacagttgggtcagaggttcgttcaatcccgatccttggagctgcaactgatggggcgtttgggtggacaccgaataggaacgagacacatccgccaggacctgcagatcctgtttgctgcactgacacgtatcgcagtgtttcacctcattcgccttcagttcgtcctctagaaacttcgccattatggtgggcgatatcatatccggattggttgcatgattattattgctaatgctcgtattagtttgattgttgcaattgttattgctattattattaacgttattgttgttaagagtgtccttgttattgcttgtattgttattcgtgggttgattcgactgctgttgaggatttgtggtcgtgttcccattggcggcatctaaatacaagaattttgaaattaataagtgttctttggcacttgaaagtttcttgtaatattttgagctatttaattataagtatttggggataaacaaaatgttaagttacatgttaaattacaacatgtttcatttttacataaaagaaataaaatgctgacagaacaaatactttttataaaattaatattaagcagtttaatgcttttgtgagactgaaagttccaggaacaaaagcattttgtggcaaaaatgtttctcatcaaatatgcatgtagtaaaactaacaaaaattgcccaaatggatcaacaaaaagtttgcatcattctggccaaaaatatgtttacagcacaagcatgtaaatatttccaagaccgaaccgaaaaaaaaaaatgcaacccagagttatgtttaaaattgcaattatggtaacaaaaactgcaaacaatcaagcgaaaaaattgaaataataactacaaattaaaatgaaatgctggcaattaatgcaaatgaaccgaacagaaatgaatggcaatacagagcacaatgatgtggaatgtatgcaattactgggcagaaatcaaattgtaaactttcacagtctctcataaaatgccaatcaaaccaataaaatcaatgcgttcagttatgcttgtaagtagaactctttttttgcgtaaattaaaaaaaaatttatggaatttattgtaaaactattttaagcgaaataacaattttaaaatatttttttttgtagcaaataaaatgaatacaatgaacaataaataaaatatgtgatggctgaaagtgcaaaaaatgattgttaaatgcagtcaagggaacgaaatcatattgttaacttaacgcagtcttcgtgattgaatccgttgcctagaaaacgtaaatcaataaatcaaaaattcgaaatcaggcggaaatgagaaaaaaaatcataaggctcaacatggtctactaacacctaccgattcccctcatcgaatacaccatggccgtgggcgggaaggggcaggcggatgggggcggcgaatcggaggccggaagcactttgtaggaagctgtggtggccacgccaactccactattgctgcactcggaatcggagtgggagttcgtctccagtctcatgtacgccgacaccttcgactgaatatcaatgggtagctgtgcatagagaatacatcatttagcattttatttatatggacggtatacgacattctatactccacgtcggaggatacccaccgatgacactttctgggacacaaaactatccggcttgcactgcagcaattggatggccaggctaatgtcggccttgtagcgttcctgggcaggaagaaaggagagcagaaaggacacagataagaaggcgttacggaagtggcgtaaacgagcagcactacactgcgacaaaatgactaggcagtaggaaatgataggtatgcaataactaccatcacactgcagtaacttaaagtataaattcctatggctatatcccatcctaaccaaaaaatataggaaaataaatgtttttagtagctacttttagagaaacccaaaattgttctcagtgtgtttgtgcggtcgcttgcctgtctgtttgcatgggttagtttgggtgtgtagcttcttcgttcttttgacacttttcgtatgcaaatgtcaaatatgtttgcctttcgttttgtttcactcgactcctgccactgcaaaagttcacttgccgcgtctcctgccccaaaaacccttttacacattgttaagcaaacttttttcaatgggtactttcccgatttgagggtgtaatgggttagaaaggatttcttgggtcctggcaaagttatcatagattttgcacctacaatataataagtagtgtaatttaaagtagcctatgagaaaggtacctaagaattaaagaaaatacctttcaagctcacttttgctacatttgatgtcgaattgatctgagaattaagaatgattcgattgagaaattaaagcctagttttcttgtgcccttgaaagcctttgcaatacgaatttccaggatactttagtaaccgatatccttaggacagccatcttagttcgcttcgctgttgcttttgtgcattttggtgtcagcggcagagcctcaaaaagttcgctcctattttgactttttgcgcctttttccttttatttttgtggcacaacgcacacacatcgcatacaggagaaactttcagatgcctttttaaattttcacaaatgcgatgcactcgaacttgttaaacaagcaacaacagcatagaaaaactgtggaaactgcggggggggggggaaaagctacaactgcattggtgacccaaatacaacaacaccacaacaacagtaacaacaatggtggcaacaacggcttcggggaaaatggaaaatgcggatggcagtaacggcattttgcaccacgtttaccaacacttacacgccccaccgcccaaccatttttccagctctg

SEQ ID NO: 36821 - DNA, 2829 bp, DROSOPHILA
atgggatatagccataggaatttatactttaagttactgcagtgtgatggtagttattgcatacctatcatttcctactgcctagtcattttgtcgcagtgtagtgctgctcgtttacgccacttccgtaacgccttcttatctgtgtcctttctgctctcctttcttcctgcccaggaacgctacaaggccgacattagcctggccatccaattgctgcagtgcaagccggatagttttgtgtcccagaaagtgtcatcgctacccattgatattcagtcgaaggtgtcggcgtacatgagactggagacgaactcccactccgattccgagtgcagcaatagtggagttggcgtggccaccacagcttcctacaaagtgcttccggcctccgattcgccgcccccatccgcctgccccttcccgcccacggccatggtgtattcgatgaggggaatcgatgccgccaatgggaacacgaccacaaatcctcaacagcagtcgaatcaacccacgaataacaatacaagcaataacaaggacactcttaacaacaataacgttaataataatagcaataacaattgcaacaatcaaactaatacgagcattagcaataataatcatgcaaccaatccggatatgatatcgcccaccataatggcgaagtttctagaggacgaactgaaggcgaatgaggtgaaacactgcgatacgtgtcagtgcagcaaacaggatctgcaggtcctggcggatgtgtctcgttcctattcggtgtccacccaaacgccccatcagttgcagctccaaggatcgggattgaacgaacctctgacccaactgtgtctgcgatgtcatagcaatcttaactccccgtcgcgaaccaatagtccatatctgatgaagatggtcaagtccagcgattccgtaatatcagagaccaagagttccgtttcggatctgaacgacatggacaagctgtttatcccggccaaaaaggatgacctgatggttaatcccatactgggacatcatcgactctgcgaaagaactgcgatttcgggacagaatacggaatatggcaatggaaaactgaccacctctacgatgatgtatcccaccactcatttgggtgcctatgcagctgaaaagtatctcctagagacgagtaatctgggccagctgaggaatgggtatcaaaggaggtttctggacggcggaggaactgccctgcaacttctaaacaaatatgaagcaggtgccgtgggagtagttcatggagatctggaggatgagtcgagtaagcctctgctggcgggtgtctcgcaacctagtctgctggaagcggagcaggctcctcctcagcaatcggtggttcctgctaagctggaagatgtctgcgagccacagcctagtaaaccagttgctccagtggctcctccaggtagtactgctcctgcagtcccatcgggaactcagttgaagtccacgaactccggaagcgttcagagtctgtggagcaacaaaaccagcagctgcgagggggccaaaatgtttgagacattcaacaggaatcttattaaaacgattaaggcggagaatcccaagtaccgaggccctcgtctgtgcgccatgcgaattcagcaaaatggtcagagcaacatcctgctggacaatctggagtccatagagacctacacaccagtgatctacaagcggcgagagaagctactggacgaggagctcaacgatggcaaggacatcattaccagcaaggagagcaatgcccagtcggtggttgaagcctggcaaggacctgcagctcctcacgagaatgttgccctgcagccagtgctcgaacctcaagtggaaaacgcagaactggagcaagtggagatcaagcccggtgaccaggcggcaaatcctggtgtgaactcccccaaacactcggctaattctagttccataagcgatgccatcgactaccaggaaagtgtccttctcagacgccagcaactcagcagggtggctgaatgggttcagcataatacccagcagctggagcaaaggaacctgcagcaggctccgccaaccagtgattccaactctggaaccgaacgacaatcctcgtactccacgttagatcgcatggactccatatccatagagaaactctcgatggattccggttacaagaccacaccgcaacaactaaccaacggctatccggagaaatctacggaggattccctctcacccaagacagatatcactagcaattccttgccagaaaacccatctgctaccattgtgccgcccaagaaaacggaaatgtgcaccacttactaccggagaacaaccagatccggactgccagtggcatataccacgattgccggtgccccagacgactcgagcccgcccggtgagtccacatcctccggttctgaggctctcatctgccccgaacagcccacgtgtgatatactcaactacaaatactatcccaatgacacggacaaaacgcgatctgttcaagcggagctgcacacgaccacccagaatgtggacatagcccagatggagtacaatgtgaagcagttcctgctgaagcaaaacgagtggtccatgaatggaggagcatctggcgcaggtcccggtgctgtgctacaaggatctggagcagcacgcatgctgcagcgcaggatcttgggtcctggcgtgggcgagcgtgtcaggatggccacgcccggcggagcggtggccaccaagtccaccggccagtcatccaacgtcctgacgccccacagaactgaaacgaatttataa

SEQ ID NO: 36822 - protein, 942 aa, DROSOPHILA
MGYSHRNLYFKLLQCDGSYCIPIISYCLVILSQCSAARLRHFRNAFLSVSFLLSFLPAQERYKADISLAIQLLQCKPDSFVSQKVSSLPIDIQSKVSAYMRLETNSHSDSECSNSGVGVATTASYKVLPASDSPPPSACPFPPTAMVYSMRGIDAANGNTTTNPQQQSNQPTNNNTSNNKDTLNNNNVNNNSNNNCNNQTNTSISNNNHATNPDMISPTIMAKFLEDELKANEVKHCDTCQCSKQDLQVLADVSRSYSVSTQTPHQLQLQGSGLNEPLTQLCLRCHSNLNSPSRTNSPYLMKMVKSSDSVISETKSSVSDLNDMDKLFIPAKKDDLMVNPILGHHRLCERTAISGQNTEYGNGKLTTSTMMYPTTHLGAYAAEKYLLETSNLGQLRNGYQRRFLDGGGTALQLLNKYEAGAVGVVHGDLEDESSKPLLAGVSQPSLLEAEQAPPQQSVVPAKLEDVCEPQPSKPVAPVAPPGSTAPAVPSGTQLKSTNSGSVQSLWSNKTSSCEGAKMFETFNRNLIKTIKAENPKYRGPRLCAMRIQQNGQSNILLDNLESIETYTPVIYKRREKLLDEELNDGKDIITSKESNAQSVVEAWQGPAAPHENVALQPVLEPQVENAELEQVEIKPGDQAANPGVNSPKHSANSSSISDAIDYQESVLLRRQQLSRVAEWVQHNTQQLEQRNLQQAPPTSDSNSGTERQSSYSTLDRMDSISIEKLSMDSGYKTTPQQLTNGYPEKSTEDSLSPKTDITSNSLPENPSATIVPPKKTEMCTTYYRRTTRSGLPVAYTTIAGAPDDSSPPGESTSSGSEALICPEQPTCDILNYKYYPNDTDKTRSVQAELHTTTQNVDIAQMEYNVKQFLLKQNEWSMNGGASGAGPGAVLQGSGAARMLQRRILGPGVGERVRMATPGGAVATKSTGQSSNVLTPHRTETNL

SEQ ID NO: 36823 - DNA, 4428 bp, DROSOPHILA
gagctaataattgtctataactaattcaaaataatttttcaaggttcttagggtacatttttctactttattatttcaatatctaatagtatttacgcatttgcttttatgaatattcaaatatcgatttattgttatttttttcaccacatatcaaaatcaatgtgcccttacggcgccaatttattgaactatcgtaaaaatttgaatattttttagatatttatgatttatatttattgtcttgacaccttggcatatcgttacatttgcgtaagtaaatttattaaaattttccacaaaccttcagacgtcataaggtattcccttggttcatcattatggcgacggaggttttgttctccctttaatatacaaataaagttggaaatttgcataactgtctggtctggttttggactgggtgtcttcttcagtgttcccaaccgacacttctccatttctccctctctctggcggccacccattccattatcctggcggatattaaacattagcgcgtgctggacacatcctcggccacccgacgactcctgccaccaaaaataattaaggtgaaaattgctgtcgacacgcaaaccccaaacgaatcgaaaaggggaacaatggtatgaagccaaactgaggcaaaaaccaaaactgaaaatacatttttttgtggctcagagactctgagaaatgaccacaaaaaatgagagaaaaaagcagctgataaaccggacgattggagatgactaatgaaacctattagccctgtgacagatgagttaaatacgctgggagctgtgaccgcgatgatggataagctcattaaagacaaaggccccgggatcattaccgatcattcggtagcggctccttctatgctgacccccggattaattgaaatccgccggtggtcaagcattttcccctccagaatcaaagtgataagctcatttctgacattttctttatcagtctagtggagtcgaatcaatcaagtcagcagactgagtccattcacggcgtctgtgggcactcggaaattccactggcgcttcaaaggcttcggcatccgttggttgaggaagaaactccggccatagtcgacgggtttcagtctccgctcgtagccctctggaagatcatccacatggcaactgatctgcagatactccagggagtcgttcaccgtcagtttctctatggagcacttttggggggattaaagcaatacaatgatataaatagagtctagcttacattatctgccagatgcacaaagtcatcttggatcttttgaatttcttgacagagagtggccagaccggctgcttaaaacacattaacctacaatatagtaatacatttttgtttctaactcaaaacttacactcctttggacttctgtaactgtcgaaaaagccctgagctagaaaggataacgcaacgaatagcagcgcgaggcaccgtgaatttggattcattttggaatttcgttaaattgagaccaaagactgtttgtcttattgatgaaattgtaggcactagaaacaaggccactcagatgaaataaagtcaaaatattatttaagcgaatgatgtgttggatgagttttcgttgaaaagtgatatgcttagttgttcgttcaaattgctatcgctgtttaaaattaaaaagtatcttaagaatcttctaagattttgcatggttttctccagatatcaattcttatcaaaatcaaacgaaattagtttagagcgaattggcgctaatcaaaacctctcggcttttgctctagagctggtaaacttttccaattggtcataaaaatcggcagaaaatggtttgacgaagagcatcgtaaacgaaaacaaatagataagacattttataagcacttctcaacaaacgaatagtaagcaaatagaaaacgcaggcccttatatggaaatttggccagaatttgggttcaccaaacaagtttcataatttgcatgtcacattcgaagaaaagttctcggcattgataaacttttccgattcgccataaaaatcgatagaaaatcctatggaaattttcggctttctgtgtcagtgccgaatatcgaatatcgcataatgtctgaagtctggcctatgtctgcaatgtctgacgtgtgctggtgggtttctgggcttggccagattatggttacttttatgatttaatttcacacgaatttatattatttcggtgcaattgttttgtgcgtcgtcgcatttatggtgtatcagtggtttatggtctatggcttttggcttttggccaaggccaaggagagatttcacaatccgaaagccaaaaaccgagggacttgttagcccaattaataattattattggccggagttagagaagatgatgaagtctttggtgtgggaggccttggctttctctgcgcctgcccacagccgagatttaattaattgccgcgtaaaattaatttcatttcaattgtgcagtcgcatcattagcagttcgcaccccctcccgaaaatagttgggaccccgaaacctgctgagtaagcaatgatatcgtttgtaagttttgtaagttacccccataccatcgacatctccgatccccagctactctcaagggccatatcgtttctacttcgcttcgagtgggcttgaaaggtgattaacgcgatcatagaaatgatgtcggaggagtaccgcactgggggctcatctttccaacacctgaagtggtacagggaaacgggaatttaatgaagcactccactgggagaaaatatcacccgaaatgctaatcacttaattcaatttaacatcagcttattgaaatgaaagtccttcagaacttttgtgactaaaggctgtataagcaaatatgaagtagtatattaacagataaaacactacgacaattgaaagcgagcgaaccaataggtaatatactctccaaataatggacgttattactaacaataacaataaaaatgcttcgagacctataatgtcaattttattaggcagcaaaggatgaatctttaagatagtacggggaggttattaggatataaacgataaaagagaataaaatttgtgacaagcattgttcatttgtttattttcgataatataataatataatgaatctttttctttacaggtttaaaatgatttccgattgatatagttttttctcgctgtgtcgtagatcgttagatgcttagatcatgactctttctttctgcgcttgcgcacgcgctaaatgtcaaaaaagtgcccatgaagctcgggaagaatcagccgcctgctgttcgccgccgcagctccgctttccgccatgccacgccccccgccctcacctgaaagtgacacgccctcaggcgggccgcccacttggaacatgtcgaatcattcattcaacgcaacgaaatgtgggctgcgaggtgttgaaaggcgagaggcgaaaaccgaaatacaaaatccgaaatctaaaaggcattttgtgtgcatttgtaatttgtggagctgcacacagcattgcgctgtcattattttctgtaacatttagcaaaatcattaataattgttgccgccgctgcagcgacacagatacgcacttaaaaattgtcagacaacagtgactatgccttggtgttaacttgattagcattcgtataaattcgcattcgcagttgcatcttggccgcatttgcatagaatgcacatttcggggacccaattattcggggtaactaaaagtcttctgatcttgatcgcctgagctgttagatggaattcgaggtggccccaattccaattcccctggctgagatttcaattaccctcgcatattatgcaaacaaataaattcgagcgataaggttaagccgaagaaattatgaaaatatttcccagaaaatgcgcagacaaaacaaattgccgcgtaatctctgggacccttgctcttggaagaaataacaactccaggttgacaatgcacggcccgaataaatcgaaatcatttgggaacttgtccttctttatcggcaagtgccgccaagtggaatcaatcaagcggagaaccatttccttggaggctctcagatcgtgtttttcatattatttcgattccgatttcgaagcgtgacaatattttggccacaattcaaacgaactgatctcgagggtcttcggtgggcaattaatcatgtcgagctggccgataagttctgctcggtcgagtgcagtgaatttctggggggagagtcctcgaatctccagtctcataacaggtagtacccatcgacatcgatctttgtgtgaggtaagagctgaaacaggggcttccataaatcccgcagatatcgctggcgggaaaatcaattactctacaaggatgtgc

SEQ ID NO: 36824 - DNA, 366 bp, DROSOPHILA
atgttccaagtgggcggcccgcctgagggcgtgtcactttcagctcagggctttttcgacagttacagaagtccaaaggagtccggtctggccactctctgtcaagaaattcaaaagatccaagatgactttgtgcatctggcagataattgctccatagagaaactgacggtgaacgactccctggagtatctgcagatcagttgccatgtggatgatcttccagagggctacgagcggagactgaaacccgtcgactatggccggagtttcttcctcaaccaacggatgccgaagcctttgaagcgccagtggaatttccgagtgcccacagacgccgtgaatggactcagtctgctgacttga

SEQ ID NO: 36825 - protein, 121 aa, DROSOPHILA
MFQVGGPPEGVSLSAQGFFDSYRSPKESGLATLCQEIQKIQDDFVHLADNCSIEKLTVNDSLEYLQISCHVDDLPEGYERRLKPVDYGRSFFLNQRMPKPLKRQWNFRVPTDAVNGLSLLT

SEQ ID NO: 36826 - DNA, 2181 bp, DROSOPHILA
accccgtacgccctcctccctccacgcagaagttcaacatttgcatatcgacctcaatggcctcattgagtatcattcgcaaaagggagccgcagacccacaaacacacttgaataaatcagacagtctggcaataagggtgttcattacacgcagaatcgagcaaatatatgcgacggacacaagtggctgttaatatttgccacggcaaaacgttgattggcaatgaagttgcgcataagagatttctgcgtgaataaaatgagtgcatttccaaccttaattgcatttaattaacttgaaatgaattcaaaaaattgattataaaaaatgttacacatgaacatgagcacaacttatttcattacaaaattgcattcaagctgcatttgaatttaaagcacactacatttctgtcatttaactatgacatctatatacccagctaaagttttaaagtcacttttaaggaccctccacaaactatcaaatgcagcgctcctgatcgacactttaagctttttgcctctcggttaaaatgtatacaaaaagcgcacagcttctgttggccataaaagttttcaataaagttgcaggcttaagcctaatcgccccgccagccaaaagaaccccaaccgcccattcgtcgcctggaattcattccgccagctggacgcagctgcaatttcgtggctcctctttatggctgaccacgcccatcattctcgaacccactcacacgtccagccagccgcccactttcacatataacacactttattatcatggccataaaacgctgcaatgtccagggcaatgtttcatcgcaggcattgagtggttttgtgtttgggaattcaagacgatccctgcttttgaccaacgtcagcagagggagaaatgttgatattaaaatgaatccaaaccagtatcttgggggatatacgaatctatctaatcagaactgatataagatatacgattacacacactcacacctttaaatagagtttatattagcaaagcacgaaagcactgtgaacagtacgaaacaccctgcaaatgaattccccatcttattactagcctaatttctgcgagtgtaggtggctcacctaaactcctcttgaccgtggcacgtggcttgttggagccgctgttcaacgtgaccgcaatggtggccgtcgtcctgggcttctgcggacccagtggcttggcaactacgggaaatggcttctgctggcgtatcaggttcggtttcatacactgcatgtgattctggttgtgggtccgggtttgtgtactgctctgggtctggctctgcgtctgggtctcctggctgctggtggcactgggcaaagccgatgtggagaccgaagtgctcgaccgtttgtagccctcggtgaggaaggccggcggcggtgtgatgggcggtgccgggatgcacatgtgctcgtccaccggcgaactggccgccgtactcggtgcagtaatgcattcccgaatcctcaggccgccgggcttcaactgattactgctgctgccgctgccgccactggtattagtgggcacatttgtgggcggcgtggtggtctcattgcagtagagctccaaatggtgcttatcgcatcgacgccgtcggcggatattcggtgctatggtcttcattttggagccatttggggatccattggggtaaccattgacctgctggttgagggacggtacgccgtccttagaattcaggcggatgtagtggacgcggaatatccgcaggggctggttgttctgttgctgttgctgcagctgttgctgttgcttttgctgctgatgctgttgcaagtattccttgtacgtttgacgtcgctgctgtggcagctgttgctgcagtaaatgctgatgctgctgctgttgctgttgcagttgctgttgctgctcctgttgcagtaactgttgctgttgttgttgctgttgcggttgctggtactgcagcatttgtgtgaccaaagtggagtgattttctctagatttgatcagtcacttgcttatattttattgtagcgtggtgcgtacttcttattgcagcatttgtgagttgtcaattcaattgagtttaaaatattgttttatctccaataaatactgtacttgagtatccaatgtatggtggttatattgaaa

SEQ ID NO: 36827 - DNA, 936 bp, DROSOPHILA
atgctgcagtaccagcaaccgcaacagcaacaacaacagcaacagttactgcaacaggagcagcaacagcaactgcaacagcaacagcagcagcatcagcatttactgcagcaacagctgccacagcagcgacgtcaaacgtacaaggaatacttgcaacagcatcagcagcaaaagcaacagcaacagctgcagcaacagcaacagaacaaccagcccctgcggatattccgcgtccactacatccgcctgaattctaaggacggcgtaccgtccctcaaccagcaggtcaatggttaccccaatggatccccaaatggctccaaaatgaagaccatagcaccgaatatccgccgacggcgtcgatgcgataagcaccatttggagctctactgcaatgagaccaccacgccgcccacaaatgtgcccactaataccagtggcggcagcggcagcagcagtaatcagttgaagcccggcggcctgaggattcgggaatgcattactgcaccgagtacggcggccagttcgccggtggacgagcacatgtgcatcccggcaccgcccatcacaccgccgccggccttcctcaccgagggctacaaacggtcgagcacttcggtctccacatcggctttgcccagtgccaccagcagccaggagacccagacgcagagccagacccagagcagtacacaaacccggacccacaaccagaatcacatgcagtgtatgaaaccgaacctgatacgccagcagaagccatttcccgtagttgccaagccactgggtccgcagaagcccaggacgacggccaccattgcggtcacgttgaacagcggctccaacaagccacgtgccacggtcaagaggagtttagggtgtttcgtactgttcacagtgctttcgtgctttgctaatataaactctatttaa

SEQ ID NO: 36828 - protein, 311 aa, DROSOPHILA
MLQYQQPQQQQQQQQLLQQEQQQQLQQQQQQHQHLLQQQLPQQRRQTYKEYLQQHQQQKQQQQLQQQQQNNQPLRIFRVHYIRLNSKDGVPSLNQQVNGYPNGSPNGSKMKTIAPNIRRRRRCDKHHLELYCNETTTPPTNVPTNTSGGSGSSSNQLKPGGLRIRECITAPSTAASSPVDEHMCIPAPPITPPPAFLTEGYKRSSTSVSTSALPSATSSQETQTQSQTQSSTQTRTHNQNHMQCMKPNLIRQQKPFPVVAKPLGPQKPRTTATIAVTLNSGSNKPRATVKRSLGCFVLFTVLSCFANINSI

SEQ ID NO: 36829 - DNA, 2144 bp, DROSOPHILA
taaaattgaattcgatttccaggtatggcatgttttgtttttcatcgactttggtgaagtttttgttttactttttttgccccataacattcctgtttggcaggactctccttctgcaggactctctccccttccctctcacgcacttatgctcacatgtccaaggtccttttgtggcctgctaggaagtgaagccacagaaccaagcagggatatagggatatataggcagaaaacgcagaaaaacacaaaggatgagatgcccagtaaccagaacaacaactgcactcgctacgcagcgcacgcacacaaacgcaccacgaaggacaataaaagcaacaacaatagccaccaggagcagcagcaactagaaggagtagatgagaacactgacaaaaataatgccgcaaacaatatgaaattattaagagtaatatatattgtttatattgattcttgtttccactcattaacggattaagcaatcaaaaaattatgcgcaaaagcttttaatatatttaagagtttaaaaatactcccaaatgtaggctctaaaagttgggcgccaattatttaattttttcttcaaattaattgataatttcttcgagtgagtgcagagtggagagtctcgagcaaatgccaccccaataagcattttgcctctgggccatgggacatcgggcgaactatatggtagggaggatatctagagagtgagagagggggctaggatgtgggaaagggagggggagacccatacgctttaacctgttttccgcgaagcttttacgcactcgcagcgctctctttttgcgtgaccaaagcgagagcaaaagagagcgaaagactcgcttgattttttttgccacccttctgggggaaaagcacaagcacgaatgaggagattttcagccgagagattctagagagaaaaccagaggaaaagagaccttccgccagcgaattggcccagtatccattcggccgtgttcccataatgtccgccagcggtcgtcgcttctgtcgcagccgttgccaaagttgtcattgtcatccgtaccagcaaacgcagcagcaaaagcagcagcagcagcagcagcagcaacatcaggcagcagcagcagcagcaactagcaactagcagcagcaacatctataggagaagcagagccgcagcagcagcagcagcttaaaaatacatttttcacaatgaagcaaacggaggcaagaaaaaattagtgcccgagaaaattagtttttcaagaaaaaatacaaaaataacaaaaagagcgagtgagaggggcataaaagccgagagaatgagatggagagagaacaatggtcgatggggtttttgcggttgtggggctctgttcttcggttttcgcttctcaatacaagagttgctggtggaatatacaaaaaagaaggaaaacacaaatggcacgcgcgttgaaaaaaataaaaatatcggttttagagtgaaattgcagacaccgagtggtaaatggatatgtaaagctgaaaaggaagcccctttgccgggcagagtgtttaaaaatatataaataaaatgaaaagtgcaaagaaatgtgtgcgaaaacgagaaaaatgttttcgagtcgcgaggaattttcatttgcttaaaagacaatttttttcggtggcctttttggtgtattatacatacacagtcgcacacgtttttcccacacacacacacacactcatacgagagttcgggtctttttctcgggttcgtttttcatttcgtatttttctttaacagcattttagtttgtgtattttcgacattcggtgacgtttcaacatacaaattagtaagagttttccgcgcgagaggtggaaaactgcatgcttggaacatttcatcgacttgtcaacaaattataatcgttatttggctctttggtggaaatggacgccccatttagccctcatcttttgcttcttcctccctcttttggggtttttttgctgtttcattttccatttcccttccactgcctttgcgagtgcattgcagccaacttcctgctcgagcttctaaagtgcaggcacgccatgctctctctgggtatgcactcaaagaaaattgtggttagaatttacttataaat

SEQ ID NO: 36830 - DNA, 144 bp, DROSOPHILA
atgtccgccagcggtcgtcgcttctgtcgcagccgttgccaaagttgtcattgtcatccgtaccagcaaacgcagcagcaaaagcagcagcagcagcagcagcagcaacatcaggcagcagcagcagcagcaactagcaactag

SEQ ID NO: 36831 - protein, 47 aa, DROSOPHILA
MSASGRRFCRSRCQSCHCHPYQQTQQQKQQQQQQQQHQAAAAAATSN

SEQ ID NO: 36832 - DNA, 2183 bp, DROSOPHILA
tgggacattcatcatgctgcactgctaactcccagactctttgaatccgaatccaaatccgcaactgactgcctgcgtaggcgttactggtggtcaacatctcctcctcgtcctgtccgctttccctgcgccgtgtttaccttcgttgggcgttggagcacgtaaaaatgtaacaccaactggctggataaatggaggaggtgcgcgcaggaggaatgagacatcgacaacttacgcatatctgagctggctctttggtttataactagctgaataaggctgattttataaaggcattacaaatattgataatcattaatcagagttgaaataaagttctcaattaaataaaaataatctgaaggctaagagatgggtaatttctaaataaacaatgccatatctttgaacaaagtagtttcatattattattaagaaatgtatattattatcctagtattaatccgcatacatccgcatcagtcagcactgacagtcctggtgctcctgttcaatcgactgggccattcggaggccaagtccaatttccattggcttggcgagtggatgcgaatcccttgccctttgcctttgccgttgaagttgcctttgctggccaccgagtttgcttaacttaagttaactgtgcgcgcacaggacacccagctgtggtcgccgggccaacaagccgtcggtggttgctgctgctgccgctcctgaagctgcaacacaaacagcaacggcagcaacaccggggacaagcagcaacatgggcagcgacaacgtgaacgcaggcgactccttcttgcctcccagctacgccgacaactttggcagtgcacctcaatgtttgtgcaagcaacattcgcatgcaagtcagcaaagtttgcattgacacgcagcagcggcagcagcagcagcagcatcagcactgaatttgcataaaggcgagggatggccaggtgaaaggggggggttgcccaactgctctgctggtgtcatggtgcccaaaaaaccagacaaacgccaagtgcacagcatggtaaacgaggaaggaggcccggtcgcgctgcccatgatgaagatggacgtgttgctggtggtttcccatcagcagcagcaagcgcagcagcagcagcagcagcaactgcaacagcagcagcaacaacagcagacccattaggccgcacataaactgcatgcaatgaaattcactcctgcggcgtggccatgttgctactgcactgaagttgctgctgtgtctgacttatggcaattgccaatgcaacatttgttgctggcgggaaggttgctgttaaggatgggggcgtgaccagaacgctaggaactccctactctcggataaagggatatatttaaaagtcaattactacgcccgctaaacaatgtccgttaagtaaataggcaaatatccaccttactactacttaacagtttgccagctaactaaaagtcggcagacaatgtcgtaaactaaatgactagttaatcaacagatttgtgaagtattgggcgggctaagtcacctaaaaacgtcagcaataaaatcctttcaaaaatacaatgtctaggctgtcgttttgaatatgaataagtcaacaaaaattgatgaacacttaggatcttttgtaaatacaagatatttatataacgattaagttcctgcgatttgtaaaatagaaattagaatgcttaaccaaaagtgatccccttaacaatctagtttgctgaccaatatcccgattgagcatcgtgattgctcacgcaacaatctgaaactcaatcacgcgacaatctcgaatggttgctgaagttcctgttgtttttggtccctggaaggcaatttttttatttcacttaccccccgcaaacatttgtttcaacacgtacgcgcaaatgagtttacaaggtgcgatattcatgttgctgctgcgtctttgggccgatatgttgctgctgctgctgctgcttgtcaatatttactatgcagcatgttgccgccgagtacagaacttggctaatcgtattttagccattttatgtatattaatagctgagcgacggtaaaaagtttgcgcccctcatgtgctgccacaattctcgtttctcattctcattcttattcttttattttattgatttttttccagtgcccttgcctt

SEQ ID NO: 36833 - DNA, 183 bp, DROSOPHILA
atggtgcccaaaaaaccagacaaacgccaagtgcacagcatggtaaacgaggaaggaggcccggtcgcgctgcccatgatgaagatggacgtgttgctggtggtttcccatcagcagcagcaagcgcagcagcagcagcagcagcaactgcaacagcagcagcaacaacagcagacccattag

SEQ ID NO: 36834 - protein, 60 aa, DROSOPHILA
MVPKKPDKRQVHSMVNEEGGPVALPMMKMDVLLVVSHQQQQAQQQQQQQLQQQQQQQQTH

SEQ ID NO: 36835 - DNA, 2410 bp, DROSOPHILA
tgaagagctttgctatcttcctggcctcgtaccacaatattggtataatcataatgggcaggatgttgaccagaaagaggtatgcaataaccgcctcctcgaagggtccactcagggagcgcacaatgtggatgcggttgttggccacatagcctacatagcactgtaaagcggttttgggttacataatggtatccatagtcaattttgaaaaatgttatgcaaacaccacactcaccgccaggagcacaaagaaaaccaccgagtaaataaaggaggcggagttcatttcgaacttggcacgagcaggaccatgtcgcacgatgggtaatactccaataatcctcaagaaccaattgatgggatctatgtttcggtagaaaacactctgaaagcagcgaaattcagttttacaaaaatggttttaacagcgtagcaatccacaaaccggcttaaattccggattattggacgccgtgctgtccgagctctttttcctatccaacggaggagcttcgtaatccgcatccaatcgctccgccaatccaatggagtacttgcggaccccgtacaagtatgcctgggcattagcactgttcagcggttttgcattgaggaacaccgcgtcacccttcttgcgtcgatagtagttggccattccggagagactgtgtccggaatttccttgtccgtggccttttaccactttttcgccagacggacgcattagccatgcacctgcacacgcccccttatcgaccacgccctctgttgacttagagccggagttttagtttcctgttgatgtgcgttgtttgtcttttgaatgaattaaccttagcccggtgtcccaatttcgaatttgtgtcaatggcgcgcatgtggcaatttacaacactgaaaccgggctgccaggctaccgatttggtatctaaatggatctagtccggtcacactggtgggtgtgggtgcgaaagataaataaataaatatgttgaaaatggacagggaaaagttgattgtgcccaatcaaattggctatctgatactaaaggaagatggagcagttctggagtccggcggagatctgaagaacgatgagcgcagtgcaaatgtgataatgggattactaaatctcacagagacgtgcgtttttaaacaaaggatgaaggaattttgtaataattacgcctatattgtagcatcgacgagtccttcatgccgagcagcagctgcgagaggatcaccatcgattacgagcatcactactacagcatctgcatgtccaaccgtagaatatacatcattaagatcagcaaatcgcagaatggcgtcaccacgaccacgagctcctcctcgtcgaacagcgtgtataacgatgccagcgattccggggcagtgctggcttgaaatccgtcgtcggatgtccgacccacttgcagattctgttggcaagcaaccggacaaagaccccacaattggcgcactcccattatttacctaatcctcctctttatttgtcaaaaaatacatcatctgtgagctcttgctcgaaaatgcgcctcgcttcctgggtgacgtccagcaaggtggccttgctattgcacaggatcacatagtactgcctgtagttacagcgccgcttcacaatccaatagtcattggtggtcttgacctgaacttcctcggcaggagcactctccatttccgccttgccactgccattggccaagtccgcaatgatactaagcacattgcggggcagcccttggggcaggtgcctctgaaagttcgtgtggtgctgcaggctttgttcgttaatgaacaagtacttcggcgccgtttcgctgttcccgctggagttgtcctggcctgcagcacccaccgcctcctttgtcaactcgctggatatgtcccgggccaacgaagtcagttggggagccatgtaggcatggagatcgtcgtagagatcttgtttcggcgcaacctggtcagctgacaaatgtggaatgtttcaagttgattattttggctatttagttctaatccttaacataccattcagaaacagacacagagttatgtgcaaagcgcggtagatgagcaagtagtagggtttggcctccttgtccagtgtcacatagaccttcattggatgatcttcctcattcacagcgtcatgttcatctcctgcgaccttctgacgacttcttacgaatccgcccacctggcattcacttatgcttcgctttagtgaaggagaaactgcaatggtggaactgctggcctcgactttcagcacgtgttgcacgacatacgagtgcacgcagtgcagatcctccgggctaagttttccgccacaaaggacctgctcctggtagagcattatgctctccttgatgtcggggaa

SEQ ID NO: 36836 - DNA, 354 bp, DROSOPHILA
atggacagggaaaagttgattgtgcccaatcaaattggctatctgatactaaaggaagatggagcagttctggagtccggcggagatctgaagaacgatgagcgcagtgcaaatgtgataatgggattactaaatctcacagagaccatcgacgagtccttcatgccgagcagcagctgcgagaggatcaccatcgattacgagcatcactactacagcatctgcatgtccaaccgtagaatatacatcattaagatcagcaaatcgcagaatggcgtcaccacgaccacgagctcctcctcgtcgaacagcgtgtataacgatgccagcgattccggggcagtgctggcttga

SEQ ID NO: 36837 - protein, 117 aa, DROSOPHILA
MDREKLIVPNQIGYLILKEDGAVLESGGDLKNDERSANVIMGLLNLTETIDESFMPSSSCERITIDYEHHYYSICMSNRRIYIIKISKSQNGVTTTTSSSSSNSVYNDASDSGAVLA

SEQ ID NO: 36838 - DNA, 2933 bp, DROSOPHILA
gtttccaaatcgattccatcatttaaagcgtattagaacagtcaacaaatatgtgtgtgagggaaaaggaaaggcgatcaaaatagaaagagagcaaaggaaatccttggcaggatgtgcgacacattgcgctttgaacttgtcaggaaatgctgaaaaaaagcgctgaagaagtgtcgtaatttaattaagtttcgcaccagatgacaagcgaaacaaaagtggaaatggtggaggaaaagccaaagaaaagcataaaaatcaacgggaaaattgcatagaatcgagtgcaggataaagagcaatgaaaaggacattgattacagccaaccttttcgcgatttcaatgacatttactcaatttagcaaattgccatcgtcataaatatcaatattgagtgcgatatagcttgttaaggttgcggattaggaaatgatggctttttatatcgaatcggttgaaacggtaattgagtaattaagtggaaatctaaacggggcaccatcaaagtaaacgctgctaattgagtttattgtaacgcataaaacctccttgatacgtttaaatgggtataaaaatatattttatttattatttgcctactcattttgcaatatctctgttcttccataaaaataagcacatttatgtgcttggaaaatatttaattaaaacgtaaactgccagtatgaaacgaagcccgcatgactgtaatccaattaataaatcattgcgaagtaatcaatcaatacgaggtgcaagcccaaaggcccgcacacaacaatcgaccagttagcattacaggacacaatggagcaccggaaaatacacaaacgcaacgcaatttcccttcaatagccccacactttcataccattttcatctcattttcatcccatttcccgttgccgtcaactgttgcacatgcgagtgacacacaatgacagcggctaattaagctatcaaaatgtacgtcgatccacctgggaacgcactacgttacagtgggcacccgcttgcggactcacctcggtacagtggaaactcgccgtcgctgtgactgtggcacagcattatgggacttcgacatcgtgaggcggcgaccatgatcccagttttgtggatactcagttgattgttgctactggccgatgatgttgcagttgtggctgctgcagttgtggccgctgctgttgctgctgctgctgctgcggctgctgctgcgttggccgccgctgtgcccagggagtaagagcgcgatacgtgactcaaggtgcggcgtctaatggtggcagcattcgccgatgttgcagctgcggccgctgcagcattggttgcattgcgatagtgatgctgcggcgtggagtactgattcctgttggcctgcatctgcagctgcagttgctggtagccacccagcgacaggtggtgctgcagcggtgggtggtgcgagtggtgcaagcgctgctgctgctgttgctgctgctgctgcaccgtttgatgctgctgctgctgctgctgctgcgcgggctggtgctgctgggtggcttggaagggcggatgggagtgctggtggtgcagcaactgccgctggtggtgctgctgctgctgcaccgctgccatctggaattgctgctgcaactgttgcagcaagtcctgctgcagctgctcattggtcctggcattgttgtccttttccgcgttggagttctgcggatttgggttctgctgctgcttctcccagggtccgttgctatcgctgctgtaatccagcttgaggctgatctaatattaacttatacagttcaaaagtggcactagaccattgcgtttcggtcgctggatttgctatccagtatttactacaaatattacactaaaatcgttagaaataaattttctttagaaaatacacactgaattgtttaccatttcagcgacccattcacactgttaaaatacgatttataaaatttagaaaacttcataaatctttagtataaatcactaataatccagctgatttcgcaatgatttcagcgagtcaaagataatgcaagaggtaactagaccattgactgcgatgtcaaggtcgctcggcagcctctcaaacccaaaaacccacttgaaagtgtttataaaaatctccagcgccgatttgaaataatcagctgttgtgtgtgtgtggggtagtagtagtagtaagttctggaccagccaggacttatttatttatatttatgaaaacacatagcacaagcacacacggacgcgaaggatgccacgcatatgtatgccactaaaggacctagttcgaacaggttctaacggtatctgggcgagagcgaggattcgcgacactctctcccgggtgaaaagtcccgcttttccgcttttccgaccagagacgctgggccaaagtacgacgactgattgcgccgagctttgttatcctgcggaaaagctggctggccaaggagcgagaggcgaaaagcgcaatcagccgagagagtggtagaatcgtagagagttgcacaggaaatcgggagtctgtgagagctgtgaaagcacagatagcaaacaatcgggtccatctgagcaccccccacatgaaagttcatcaggttttggactcaatatcgcacgtctaaatagcagtttcaaatatttatgatgtttaaaatattatttttaacatcattcataaatatagctgatttactaaagagtttaaagcagagttcacttttatgtttgtttatttaacgattattttttccagtgtgaccctgagtgagcgagacagagttgcatctgctggtgcttagaaaattggcccttgcttttgcttgcatcccagaagtaagagggaaataggagaagcatatgttttgccaactcttttgattcctctttgctgtttaccgttact

SEQ ID NO: 36839 - DNA, 801 bp, DROSOPHILA
atggtaaacaattcaatcagcctcaagctggattacagcagcgatagcaacggaccctgggagaagcagcagcagaacccaaatccgcagaactccaacgcggaaaaggacaacaatgccaggaccaatgagcagctgcagcaggacttgctgcaacagttgcagcagcaattccagatggcagcggtgcagcagcagcagcaccaccagcggcagttgctgcaccaccagcactcccatccgcccttccaagccacccagcagcaccagcccgcgcagcagcagcagcagcagcagcatcaaacggtgcagcagcagcagcaacagcagcagcagcgcttgcaccactcgcaccacccaccgctgcagcaccacctgtcgctgggtggctaccagcaactgcagctgcagatgcaggccaacaggaatcagtactccacgccgcagcatcactatcgcaatgcaaccaatgctgcagcggccgcagctgcaacatcggcgaatgctgccaccattagacgccgcaccttgagtcacgtatcgcgctcttactccctgggcacagcggcggccaacgcagcagcagccgcagcagcagcagcagcaacagcagcggccacaactgcagcagccacaactgcaacatcatcggccagtagcaacaatcaactgagtatccacaaaactgggatcatggtcgccgcctcacgatgtcgaagtcccataatgctgtgccacagtcacagcgacggcgagtttccactgtaccgaggtgagtccgcaagcgggtgcccactgtaa

SEQ ID NO: 36840 - protein, 266 aa, DROSOPHILA
MVNNSISLKLDYSSDSNGPWEKQQQNPNPQNSNAEKDNNARTNEQLQQDLLQQLQQQFQMAAVQQQQHHQRQLLHHQHSHPPFQATQQHQPAQQQQQQQHQTVQQQQQQQQQRLHHSHHPPLQHHLSLGGYQQLQLQMQANRNQYSTPQHHYRNATNAAAAAAATSANAATIRRRTLSHVSRSYSLGTAAANAAAAAAAAAATAAATTAAATTATSSASSNNQLSIHKTGIMVAASRCRSPIMLCHSHSDGEFPLYRGESASGCPL

SEQ ID NO: 36841 - DNA, 3674 bp, DROSOPHILA
tctgcatggattactgcaagtggtatgtgatgcatagcttctaccagagtctacgcaccatgaataagcttcgagagattgccactgtggccataccatgtccagctccaggagccgtaagttggtatcaatattttgaaaactttaatagtaactttcttatacattagataccctatcgtttccaacgcgagcacatgtatctgggcagcaatggatataagcacattctaaccgagtctcccgatggacagtgttaaacatgtactgaaagattggatatttttggaacttcccatcaggtgtcttgattgcaattgcactgcaaattctgtattgcaaaacagagtgtgatatggttttggtagagatactattttatatagccaacggacatggagcggcttattagaaatgcagaatcggttcaaagcgttcggcgattaaactataaactatttttgtgtagaaatagctcccaaagcaccttaaaaaataaaaaaaataataataatatttggtcactaacgcgactcgaactcggaacttcgaagcgaaggtcgcactctctaacccctaggctacggcagcgaaactctcgggatagccgagattgattaagccccaaaatcttgaaacgaaaaacttgtcttaaataaattggcgttcatacaaatatgtattgtagcaacgaattttttaaagcttagtttctcagtagatttaccactacttaactataatatgccttaaattctgttgactagcaatattttaggtatttctattttgtggcacagaacgaatatcaaataaaagtgcaaaattgtaacatatctaatgaacgtgttttttattatttccacacttactaatttaatgtacatcaagttagaaaaatgtttggaatattcagttttgggtgcttttattatttggcctcagctacagatgcacattatctaataatatctttcttgtcttaggattatttgttccactagcctttccggccctttagcttcataattggcggtggcaaagtggttcctacagtggtggtgctcagagtgctggctcccattagactcatatcgttatccaggctgtccattacaaagtccactacggttatattgttagcgccttcagaatcccccttatctgtggggatactgatctgaaactgcagcaaaaccaccagataagtgaccattgtggttaagagtcctttaaagagagtcctgttcacatcaaaaaagccaccgcagttgatggtcgatggattcatttcggtggctcgcaaaaacatatttatctccgtctgggcatccgagttcatccagttaagctccaccatgagtagtttcttctggaaattggttcgcacattaaccgaggcataatgtgcctcatcgcaaatatagaagagcagtcctatgttccacaaagccgtgatagtcagtcctatgtccttgatgccaaatccctcggagagttgcgacattagtccataaatcgaaagggtaatgatgaagaacaagtagaggctcatgaaaacaaaggtgtagcacagggcatttccagtatcacgggtcaacttgctcagtcgtagccacagaacacggtagtctgccaccatggcagcgggtccaatgtgtttcagtgccttctggaaccgctccgccagaagatgagccgtaatgctcatggcctcgcagatgaggaaccaccaggcacccagcattgcagtcaagttgtccaggatgcagtagggcaccacctggttaatgttcaaatccgacatggtgacgtgcgtgatgaccaccgataaaaccgagagaattggcagcacgatggctatgtacaccgccttctgtcgcaatttcagaggcaaactgtgcccggatatctggtagtacaacacctcaaagtcatcccaatcattgaagagctttgctatcttcctggcctcgtaccacaatattggtataatcataatgggcaggatgttgaccagaaagaggtatgcaataaccgcctcctcgaagggtccactcagggagcgcacaatgtggatgcggttgttggccacatagcctacatagcactgtaaagcggttttgggttacataatggtatccatagtcaattttgaaaaatgttatgcaaacaccacactcaccgccaggagcacaaagaaaaccaccgagtaaataaaggaggcggagttcatttcgaacttggcacgagcaggaccatgtcgcacgatgggtaatactccaataatcctcaagaaccaattgatgggatctatgtttcggtagaaaacactctgaaagcagcgaaattcagttttacaaaaatggttttaacagcgtagcaatccacaaaccggcttaaattccggattattggacgccgtgctgtccgagctctttttcctatccaacggaggagcttcgtaatccgcatccaatcgctccgccaatccaatggagtacttgcggaccccgtacaagtatgcctgggcattagcactgttcagcggttttgcattgaggaacaccgcgtcacccttcttgcgtcgatagtagttggccattccggagagactgtgtccggaatttccttgtccgtggccttttaccactttttcgccagacggacgcattagccatgcacctgcacacgcccccttatcgaccacgccctctgttgacttagagccggagttttagtttcctgttgatgtgcgttgtttgtcttttgaatgaattaaccttagcccggtgtcccaatttcgaatttgtgtcaatggcgcgcatgtggcaatttacaacactgaaaccgggctgccaggctaccgatttggtatctaaatggatctagtccggtcacactggtgggtgtgggtgcgaaagataaataaataaatatgttgaaaatggacagggaaaagttgattgtgcccaatcaaattggctatctgatactaaaggaagatggagcagttctggagtccggcggagatctgaagaacgatgagcgcagtgcaaatgtgataatgggattactaaatctcacagagacgtgcgtttttaaacaaaggatgaaggaattttgtaataattacgcctatattgtagcatcgacgagtccttcatgccgagcagcagctgcgagaggatcaccatcgattacgagcatcactactacagcatctgcatgtccaaccgtagaatatacatcattaagatcagcaaatcgcagaatggcgtcaccacgaccacgagctcctcctcgtcgaacagcgtgtataacgatgccagcgattccggggcagtgctggcttgaaatccgtcgtcggatgtccgacccacttgcagattctgttggcaagcaaccggacaaagaccccacaattggcgcactcccattatttacctaatcctcctctttatttgtcaaaaaatacatcatctgtgagctcttgctcgaaaatgcgcctcgcttcctgggtgacgtccagcaaggtggccttgctattgcacaggatcacatagtactgcctgtagttacagcgccgcttcacaatccaatagtcattggtggtcttgacctgaacttcctcggcaggagcactctccatttccgccttgccactgccattg

SEQ ID NO: 36842 - DNA, 1539 bp, DROSOPHILA
atgcgtccgtctggcgaaaaagtggtaaaaggccacggacaaggaaattccggacacagtctctccggaatggccaactactatcgacgcaagaagggtgacgcggtgttcctcaatgcaaaaccgctgaacagtgctaatgcccaggcatacttgtacggggtccgcaagtactccattggattggcggagcgattggatgcggattacgaagctcctccgttggataggaaaaagagctcggacagcacggcgtccaataatccggaatttaagccgagtgttttctaccgaaacatagatcccatcaattggttcttgaggattattggagtattacccatcgtgcgacatggtcctgctcgtgccaagttcgaaatgaactccgcctcctttatttactcggtggttttctttgtgctcctggcgtgctatgtaggctatgtggccaacaaccgcatccacattgtgcgctccctgagtggacccttcgaggaggcggttattgcatacctctttctggtcaacatcctgcccattatgattataccaatattgtggtacgaggccaggaagatagcaaagctcttcaatgattgggatgactttgaggtgttgtactaccagatatccgggcacagtttgcctctgaaattgcgacagaaggcggtgtacatagccatcgtgctgccaattctctcggttttatcggtggtcatcacgcacgtcaccatgtcggatttgaacattaaccaggtggtgccctactgcatcctggacaacttgactgcaatgctgggtgcctggtggttcctcatctgcgaggccatgagcattacggctcatcttctggcggagcggttccagaaggcactgaaacacattggacccgctgccatggtggcagactaccgtgttctgtggctacgactgagcaagttgacccgtgatactggaaatgccctgtgctacacctttgttttcatgagcctctacttgttcttcatcattaccctttcgatttatggactaatgtcgcaactctccgagggatttggcatcaaggacataggactgactatcacggctttgtggaacataggactgctcttctatatttgcgatgaggcacattatgcctcggttaatgtgcgaaccaatttccagaagaaactactcatggtggagcttaactggatgaactcggatgcccagacggagataaatatgtttttgcgagccaccgaaatgaatccatcgaccatcaactgcggtggcttttttgatgtgaacaggactctctttaaaggactcttaaccacaatggtcacttatctggtggttttgctgcagtttcagatcagtatccccacagataagggggattctgaaggcgctaacaatataaccgtagtggactttgtaatggacagcctggataacgatatgagtctaatgggagccagcactctgagcaccaccactgtaggaaccactttgccaccgccaattatgaagctaaagggccggaaaggctag

SEQ ID NO: 36843 - protein, 512 aa, DROSOPHILA [sequence omitted]

SEQ ID NO: 36844 - DNA, 3519 bp, DROSOPHILA
cttcgtaatccgcatccaatcgctccgccaatccaatggagtacttgcggaccccgtacaagtatgcctgggcattagcactgttcagcggttttgcattgaggaacaccgcgtcacccttcttgcgtcgatagtagttggccattccggagagactgtgtccggaatttccttgtccgtggccttttaccactttttcgccagacggacgcattagccatgcacctgcacacgcccccttatcgaccacgccctctgttgacttagagccggagttttagtttcctgttgatgtgcgttgtttgtcttttgaatgaattaaccttagcccggtgtcccaatttcgaatttgtgtcaatggcgcgcatgtggcaatttacaacactgaaaccgggctgccaggctaccgatttggtatctaaatggatctagtccggtcacactggtgggtgtgggtgcgaaagataaataaataaatatgttgaaaatggacagggaaaagttgattgtgcccaatcaaattggctatctgatactaaaggaagatggagcagttctggagtccggcggagatctgaagaacgatgagcgcagtgcaaatgtgataatgggattactaaatctcacagagacgtgcgtttttaaacaaaggatgaaggaattttgtaataattacgcctatattgtagcatcgacgagtccttcatgccgagcagcagctgcgagaggatcaccatcgattacgagcatcactactacagcatctgcatgtccaaccgtagaatatacatcattaagatcagcaaatcgcagaatggcgtcaccacgaccacgagctcctcctcgtcgaacagcgtgtataacgatgccagcgattccggggcagtgctggcttgaaatccgtcgtcggatgtccgacccacttgcagattctgttggcaagcaaccggacaaagaccccacaattggcgcactcccattatttacctaatcctcctctttatttgtcaaaaaatacatcatctgtgagctcttgctcgaaaatgcgcctcgcttcctgggtgacgtccagcaaggtggccttgctattgcacaggatcacatagtactgcctgtagttacagcgccgcttcacaatccaatagtcattggtggtcttgacctgaacttcctcggcaggagcactctccatttccgccttgccactgccattggccaagtccgcaatgatactaagcacattgcggggcagcccttggggcaggtgcctctgaaagttcgtgtggtgctgcaggctttgttcgttaatgaacaagtacttcggcgccgtttcgctgttcccgctggagttgtcctggcctgcagcacccaccgcctcctttgtcaactcgctggatatgtcccgggccaacgaagtcagttggggagccatgtaggcatggagatcgtcgtagagatcttgtttcggcgcaacctggtcagctgacaaatgtggaatgtttcaagttgattattttggctatttagttctaatccttaacataccattcagaaacagacacagagttatgtgcaaagcgcggtagatgagcaagtagtagggtttggcctccttgtccagtgtcacatagaccttcattggatgatcttcctcattcacagcgtcatgttcatctcctgcgaccttctgacgacttcttacgaatccgcccacctggcattcacttatgcttcgctttagtgaaggagaaactgcaatggtggaactgctggcctcgactttcagcacgtgttgcacgacatacgagtgcacgcagtgcagatcctccgggctaagttttccgccacaaaggacctgctcctggtagagcattatgctctccttgatgtcggggaaggtctcgcacagggtgccaaagttttgggcccgcaagaagagcgttttatccaatggcagatactgaatggaatgcagcatatcgatgatatcacattgcgcgggatccctcaggttggtcagatgctgatcatagaactggagtagcttctggcagagcagttccctacgcttatccggattaggttcttcacttccgcaggaggagaaacatccgttttgaaagcgaaacatttgatagcattgtctaagtattgctctataaatcctgtcggagatctcggcaccccgataatcggccacctccacgccctcctttaagcgcacctccttgggaacattcaggaccagtactaaccaataccctggctcgggttggtagaagagttgtgtggttttctgggtatgcaaggcctggcaatcatcttcagatgtaaaagttctgcaagtacagcaaactctgtattattacccacttccctctatgtaaaaagttccataaatacccagtgaaccttatgatggcctcacttagtcccacatctttgattttcgtatttaattcaatgtcatttggatggtaaaacaaaaccttcttgtgttcctgaaaaaaattactcattaggggcgtttcttagccttaaaattgatttgccaacctcgccttcaacttggccaaaagtcgagttaaaaatgtaaaagctgcgtaacgtaatttctacgcgttgcaataatttagccatttctttccgcacagaattaaaagtatttattttggccaaaggtaaataatgaaaaggtactaacgcgtccgtgtttgccaaccagggttacattttaccaaatgtagtgtgctagtatataccaaacgtttccagtaccaaattaaaaaaaataccacacaattaataagcgaatttaaagctttttcatttattttggaatttaatagatttaataaaatttatgtcatggcgtttactgaaatttagaatttttctgatgtcttcccttttgacaatgcagaaaggaaagtggccatccataatctcctcatatttatttagagtgaagtgcgtgctaaattgtgtttatttggaaatgtatttagtttaagcctggattcctccacggagacggagcaccaagtgaagggtcgattccttctggatgttgtaatcggacagggtgcgtccatcctcaagctgcttgccggcgaagatcagacgctgctgatctgggggaattccctccttgtcttggatcttagccttaacattctcaatggtgtccgagggctctacctcgagggtgatggtctttccggtcaaagtcttcacgaagatctgcataccaccacggagacgaaggaccaagtgaagggtggactccttctggatgttgtaatcggacagggtgcgtccatcctcaagctgcttgccggcgaagatcagacgctgctgatgctgggggaattccctccttgtcttggatcttagccttaacattctcaatggtgtccgaaggctctacctcgagggtgatggtctttccggtcaaagtcttcacgaagatctgcataccaccacggagacgaaggaccaagtgaagggtggactcct

SEQ ID NO: 36845 - DNA, 1392 bp, DROSOPHILA
atgagtaatttttttcaggaacacaagaaggttttgttttaccatccaaatgacattgaattaaatacgaaaatcaaagatgtgggactaagtgaggccatcataaggttcactggaacttttacatctgaagatgattgccaggccttgcatacccagaaaaccacacaactcttctaccaacccgagccagggtattggttagtactggtcctgaatgttcccaaggaggtgcgcttaaaggagggcgtggaggtggccgattatcggggtgccgagatctccgacaggatttatagagcaatacttagacaatgctatcaaatgtttcgctttcaaaacggatgtttctcctcctgcggaagtgaagaacctaatccggataagcgtagggaactgctctgccagaagctactccagttctatgatcagcatctgaccaacctgagggatcccgcgcaatgtgatatcatcgatatgctgcattccattcagtatctgccattggataaaacgctcttcttgcgggcccaaaactttggcaccctgtgcgagaccttccccgacatcaaggagagcataatgctctaccaggagcaggtcctttgtggcggaaaacttagcccggaggatctgcactgcgtgcactcgtatgtcgtgcaacacgtgctgaaagtcgaggccagcagttccaccattgcagtttctccttcactaaagcgaagcataagtgaatgccaggtgggcggattcgtaagaagtcgtcagaaggtcgcaggagatgaacatgacgctgtgaatgaggaagatcatccaatgaaggtctatgtgacactggacaaggaggccaaaccctactacttgctcatctaccgcgctttgcacataactctgtgtctgtttctgaatgctgaccaggttgcgccgaaacaagatctctacgacgatctccatgcctacatggctccccaactgacttcgttggcccgggacatatccagcgagttgacaaaggaggcggtgggtgctgcaggccaggacaactccagcgggaacagcgaaacggcgccgaagtacttgttcattaacgaacaaagcctgcagcaccacacgaactttcagaggcacctgccccaagggctgccccgcaatgtgcttagtatcattgcggacttggccaatggcagtggcaaggcggaaatggagagtgctcctgccgaggaagttcaggtcaagaccaccaatgactattggattgtgaagcggcgctgtaactacaggcagtactatgtgatcctgtgcaatagcaaggccaccttgctggacgtcacccaggaagcgaggcgcattttcgagcaagagctcacagatgatgtattttttgacaaataa

SEQ ID NO: 36846 - protein, 463 aa, DROSOPHILA
MSNFFQEHKKVLFYHPNDIELNTKIKDVGLSEAIIRFTGTFTSEDDCQALHTQKTTQLFYQPEPGYWLVLVLNVPKEVRLKEGVEVADYRGAEISDRIYRAILRQCYQMFRFQNGCFSSCGSEEPNPDKRRELLCQKLLQFYDQHLTNLRDPAQCDIIDMLHSIQYLPLDKTLFLRAQNFGTLCETFPDIKESIMLYQEQVLCGGKLSPEDLHCVHSYVVQHVLKVEASSSTIAVSPSLKRSISECQVGGFVRSRQKVAGDEHDAVNEEDHPMKVYVTLDKEAKPYYLLIYRALHITLCLFLNADQVAPKQDLYDDLHAYMAPQLTSLARDISSELTKEAVGAAGQDNSSGNSETAPKYLFINEQSLQHHTNFQRHLPQGLPRNVLSIIADLANGSGKAEMESAPAEEVQVKTTNDYWIVKRRCNYRQYYVILCNSKATLLDVTQEARRIFEQELTDDVFFDK

SEQ ID NO: 36847 - DNA, 3317 bp, DROSOPHILA
taccattcctccttaggatgagggttcaagtgttgcttggttattgtggcatggcgaacggtcgattttcaagtgaaacaacaatgcttctgctccgtgtgtccgaggaaatgtccgaggcccagatggattatgagttagctctggtggatctgctcttggccctgcaactattgctactcggtatgccgcagaaggcctatcaggcaataaagcgctgcatgcacgacattcacatcaacggcggtctatatgaacgagcaaaaacggatttcgtgttcgttcgctgcctgttggccgtcaatcagaatgatgcggagaaacggaaagcgcagctgcttaaatcgcaagtaatcctccagcgtgcagctcaatcattcaagaaactctccgcacatgcgaaggttttggatgtgtacgtgttcttggcacagcgatttaacgaatttggcgatcggaatttaaggaataagtacgctggagagttccgacgctactttacggatcaccccattccaagggaatatctgggtagtccttagtttccgtctgttgttaaattctaaataaacttgttcttacaacctaaggaatctcaatcttacctaaagtttttcaattcacaagcacacagctgaattattttgactattaataaacgtagttttattaattggtttaaaccgcagtggttgcttgtttatacactgtacgccaactgcaatgctaacacctatctgaagttttgcaacggctcgtttcgattgatgaggacgtcctttttttgggggccggatgttcatagagtgtggatgcgtaaatgctgcgctgtgaagtggcatttaatgggtggctgctttattggggggaatcgctggacgtcctgcaccgctcgatttcgactgggattgattggtatcgacaaacttaagctaacgtgtggcaatttccggatttccgatgccggttatcgtagagctaatatgcgtatgtggtagggggtctctcatggttaacgaatcaagggtaagctgggcgacggccctccaggacccatcgcactgccgggtccaagaagcacctgcttctgctgcgacttgtgcagctcctccatctgggcgcgctccgtctcgaagatgaccggggcgaacaggataaccgcgctggtgaagaatatccagctggcgttgcacgagaacgagtagaagcccttgacgctcttcaccgtggcgctgctcacggcgccgactgcattcctcactggctccgggaacatctcggttagtccccagaagcgctcggatgccgtctcatcgggctcctgtgtattgtgaacagaaatgagtattaataatctttaaaaggtgcttcttctaagcaattaaattatagatgtaacgccatattctattcattatttacaatcaaagtaaccttataggattttgatgaatcaatattatatacaaactacttacaagattaaatcttataatgcaatttttaaataaaaacagtgcataattatgttaaagttacaggaaaaacaagtttatgatgacaatgacctttatcgcgtgcacgttgtggctaacagctgattcatttcttggccaaaaggccaaagctaaatttgtaaataaactcatgaacctaaataagctgtttataaacttgagatcctcaagactattgctacatttggaaaacacctagaatgtccttaatgtgcgcctccctcccgaactttgaggttagatttcgtgctgtgtttacaaacagggtccacttacatcatcgtagttctcgcgttgcggatcattggaggtctggaagaaatgggagaatgaaaggtattattgaggggtatcagtggattcgttttcatgcgccagctgctttgattgaccgacaattacgtgagcacgataagaagtcgaggggattgggggctacttggttttcagcggggtgggggagccaacgaggggccaccacgtttttacttacggcagccactgcccgacgctccggcgtctcgtccttgctgccgcctaacgacgacatgccgctgtccttttcaatgaactcgatttcaggatcagagtccatcaaatcctcgattttcactgtttcggtatccacttttgcggctttcaatcaacgcacacggtcgaaaatcgcgggtttgtgctctaaagcaaccctttgaaggaacacggaagtatcttatcaccggaatcgctcacaaaatccagttcgcactggcatttaattgagcttgagcggaggattcgttcgcgttcgcttaaaatttatgtaaaaattgattttataaaatgctcctcgtgagcttagtggtgacctcacagcgatagactccaattggccatattaatcgatttatcgcggcgcattcatgagaaatctcctagcgcgtgcaagtgcaacgctttttcaaattctcttacatcttacacacttaataatttaactttaaatgtttatattctacatcttaggcttgggtcagtagaaacactcacctttccctcattgtagtcacccattgtcgttaatcaactgcgttaagagtttaaaaatgaaaatatatacaatattttgtggagcctgaaatttagaaacgttgtcaaatcgaacagcacaaatttacaagtactttgatttccgatttctggattggcaaccgaaaccagaaaggaaaaagcctactattagtaataaaacatttgttgagcgttcgtgtaccgtttttatttattatgccacatctcgttttccgaatcgaaatcgcatttataaattatgaaatctttaatacctattccaattatctaccactttaggtacgcatacagatagtgtcttagttcttgtgtgtgtttttccagtatctatacatatagaagataatattaagtatgtagtttgatcattaacataaacagtaatcgtgtatataagtagtaatattgttgggtaggtatatagtcctgcatatagttggtaagcacattaagaggtcataaaaaactacttgcatcgaagtacatacatacattatatatcaggtatattcaatgttttgggctagagtttaatttgattcggtcttcgatttttgattaggtttaaacttgctttgcctttgcagtcctgttgtaaataccatacaaaagttgtggttttttatttgctttccttgtgtttacccaattttgctatttgtacctttgacctgattatatttactccacgcaacttttatccatatagtattttaaatgtatgtaaat

SEQ ID NO: 36848 - DNA, 664 bp, DROSOPHILA
aaattttaagcgaacgcgaacgaatcctccgctcaagctcaattaaatgccagtgcgaactggattttgtgagcgattccggtgataagatacttccgtgttccttcaaagggttgctttagagcacaaacccgcgattttcgaccgtgtgcgttgattgaaagccgcaaaagtggataccgaaacagtgaaaatcgaggatttgatggactctgatcctgaaatcgagttcattgaaaaggacagcggcatgtcgtcgttaggcggcagcaaggacgagacgccggagcgtcgggcagtggctgccacctccaatgatccgcaacgcgagaactacgatgatgagcccgatgagacggcatccgagcgcttctggggactaaccgagatgttcccggagccagtgaggaatgcagtcggcgccgtgagcagcgccacggtgaagagcgtcaagggcttctactcgttctcgtgcaacgccagctggatattcttcaccagcgcggttatcctgttcgccccggtcatcttcgagacggagcgcgcccagatggaggagctgcacaagtcgcagcagaagcaggtgcttcttggacccggcagtgcgatgggtcctggagggccgtcgcccagcttacccttgattcgttaaccatgagagacc

SEQ ID NO: 36849 - protein, 148 aa, DROSOPHILA
MDSDPEIEFIEKDSGMSSLGGSKDETPERRAVAATSNDPQRENYDDEPDETASERFWGLTEMFPEPVRNAVGAVSSATVKSVKGFYSFSCNASWIFFTSAVILFAPVIFETERAQMEELHKSQQKQVLLGPGSAMGPGGPSPSLPLIR

SEQ ID NO: 36850 - DNA, 4557 bp, DROSOPHILA
tatataagttacgagaactaattgtacaataattcatctaataataccgctgtgtataagagttaatatgaacgatcgcttgctagttgattagtatacgtaagacaatatcattaccgttggcaatacaaatatcaatggtgtaattgatctgcacgagaacgggcgcagcttaaaagaggagaaactcacatccaaaatcgagactcctgctcgtaattcctagttccattgtacaggtaggtgaggctaatcatgctaatcatgttcgaaacattcaactgacttaacttgactttttgagcagtgttctagtggacaggtgggtgattgttttggtgtaacaaagcataggggccaaaagtaatctgtttgcaaacttgttttttcgtaaactcaatatataatttaaaaagtaaccaaaattgtgaatatttgttaggaaagttgtagtgatgagaaggcctatttatttaaagcccttttatgtattttgctgtttgaaatgtatttacacatttctctttgcttttgcaagtttaacaaatgaattgaaatagtttctgcatatattattagtatggcaatattttgagtacactgtattaaatcctttgattcttgcggctcttaatattgtaaagaaaacaagtgccattaacaaaatgttatattggttgaaataaaatcgaactattagttttataaagtcaattgcatatgtactgcatttcttttttgggggatatgcaatcagtttgttagtcaaatgaaattatattctatatgttgaaaagctaaaattcgatagattacttttcgtccatatggccatcttgtaagcccatcgattcacccacccatcagtgatttgtattatttttttgcataattcgcagtcgtgtgctaaacggggtggtcgtgtggaatctataaatcagtggagcacttagcgtccgaatccaaatccgaatccgcagctgcactgccccggcgattctcaggtgcactgcatcttcttgcagttgcacagccacttgatgatcctggcattccgctcgacaatcgacggcggttccgagggtctatacgcctgagtggcctgcggctgggtttccgtgctgtccggcaatcgcatcgagtccacggtgcttacgtccgagaagaaaacagtgctggaatcatcggaggcgtcatccgtctccgagtggtgcctcctcggttggctgtagatctcgtggaaggcctcgtcgttcagtcccaggcgatcgaagaatttctccagctccgaaatgctggcattcagagcctccctttccatatccaagctattgtggtacacctccgaggagaaacctttggggaaaaagacattctcgtgatccacgctgccccgatgctgcttgtaggcggccaggacaccgctggccgtacccattcctcctgaacctggcgctacgagaccacctcctgatcctggtggtcctcccatttctacaggaagattataaacaaatgatcatttgcgccaatgggattctcaattcttacctccttgaactggcaatcgatttctgttcttgaagcggatgcatcgctgcctcttgaactgaatgggcggtggactgatgtcgtccacggatggcgccgatccgggactctggaccagtgagctctgcgagtgattgatgctcgtgtagccctgcgaactggtgtgcagctgctggctggaggagctcgagtatcgtggcgtctgagtcttaagcctgggcgatggcggcgtcggggtgtagtcatcctgaaaggcttctggaacctccggagtgggcgtgaagttcagcagataatcggagcccattgtggtgtcctgtttgcagcggcaatccaagcactccgtattccggccaccacccatgccggaatagtcaccggcgggcgtcacatagccacagtaggaattggcactgtgctgtgtggacgagccactgtccctgcgagtggcggccaccaaggtgcagcagttcttaatcgtaccgctcgccggagccgcactgccggccacttcccgttgacgctctcgcttgtagcagggctcgctgcgatgcgtatagtgaccggaactgccgccggagtcacggtttatcgaggactcgccggcggacttgatcgatcgattgccacggctgcagcagctcaggatctcgctgtgcggcgagtgtcggcttatctgggtgtgcagatccggcaacgacttgtggctattgatgttgaagtcgccggagggatagggcgcactgcgatcctcgcccgtgttgggtacctcatgggagtgcgagtacgaacgctggtagttgtatctgttggatggtaaaaaaaggtgacaattaatgcaattcaactgcagatgcatttgttgcttgtgcttttttagtcataaggacaacatgaactttgttgcatactttcaggcaagaaagatttgcaagtcatgtaccgactggtttcaacataacttttgaaatcatataaccttacctatatcgatcgttatgagcctgtcccgactttgcagcatactcggcgggcgggctaatgggtcgatagttctcggtgaggacgaggggttcttcgccatcccgcccgaagccgtgggacgtgggcatgtagaggggcggtgggatcctcagggcgcccgcctgaccgcccatctcctcctcgccgtagtccgtgggcagtagctccgcactgccgtcgctcatctcgtggcgcctcaaggtgccaccgttgcgctccttggccgtctccgagcccagcagcatgcgcagcttgtgctgcagtaggttgttgttcacggcagagcctccgtttcgtccttgaccttggccttgggcgtggcgggagtgcgggtgatgctggtgtgggtggggatgatggttgtgcaggtactgctgttgctgttgctgctgctgctgctgttgttgttgctgctgcacctgctgttgcacctgctgctgccgactgagattgaggctcatgtaccgcctatcctccagttcataatggtggccatgcgattcctccggccgacgacctcttttcccactagctccgttgttaccgcctccattgcgatagctcgcctgctgcagtcgctcgaaaaccgcctcggatttaatgtagaacggcttggactccgccagcagctccacggcggatttcctcttgctgtaatgcctgctgcccgtgtgatagaaggcgttgtggtgaccccaataattccggctggccgctgccgtttccggcaacgcggaagcggatagtggtcgctgtccgccggaggaggacattccgtacccgtagctcgcatccgcgattgcacctccaccgccgaatatctgctgactggtggcatacagtgtctgactggccgtccttgagtacttgggcatggtcgggtaggcggaggagggcgtagacccgtggtgaccacctggagagctgctgccattgcaggatcgctgtcgcggactgctgcatccatgtaccacagccgccattattgatatggcctataggttctagattctttggtttctccgagattcggttccttcttgtattcttatctactcttttggtttccgtataatccttggattcccttgtgcaggtgttgctgcaggtgtcacctgctgttcctcccacttttttccgcccctcagcttttctgctggccccgattgcaggggatgtgagctggggtccgggttttgtggcatgcgcagtggtcggcgtgctgcgtatactgaaattacaatacaataattttcagctaaccaaggctcgacggcagtcaccttctacacctccatggcaatccgcaaaaactagaccagaccaaggcgaaacgaatgagccagcgacgacacgcacttggtcacaggagcaaatggtagtggttgctctttcgtgacttggtctagtcactacccaagagaagtatttatagattgcagcgcactttcacttcgatccttcagggcactgggagttataacgaactaggggttttccagtatatgcactttaaacttatttatcaaacattttagcactttttaggagccagtcactcgctggagtgattttcttctcggcttggagcacacatccacaaattcctcgggtgggaactcaccaggcgcttcgaaaattccttcacttgtgcgacggtggcaaggtctggtacattgtgcctctttgaataacagatgttgtgccgcttccaaagtgttccgtcctcccagaaagctccagctccactcatgcgccccacacagaataccccaggcaaagcttttactggtctcgaaggtgtggtgctcagtcggaatttcattttatcctggagtcatgtaagttactacaaaaatttcggtgctatcggtactttagtaaatatgaatttaaagttaatttggagaagatattatatgataatcaaccagcttatataagttatataaatatataatatatataagacacaaatttaaa

SEQ ID NO: 36851 - DNA, 2196 bp, DROSOPHILA
atggcggctgtggtacatggatgcagcagtccgcgacagcgatcctgcaatggcagcagctctccaggtggtcaccacgggtctacgccctcctccgcctacccgaccatgcccaagtactcaaggacggccagtcagacactgtatgccaccagtcagcagatattcggcggtggaggtgcaatcgcggatgcgagctacgggtacggaatgtcctcctccggcggacagcgaccactatccgcttccgcgttgccggaaacggcagcggccagccggaattattggggtcaccacaacgccttctatcacacgggcagcaggcattacagcaagaggaaatccgccgtggagctgctggcggagtccaagccgttctacattaaatccgaggcggttttcgagcgactgcagcaggcgagctatcgcaatggaggcggtaacaacggagctagtgggaaaagaggtcgtcggccggaggaatcgcatggccaccattatgaactggaggataggcggtacatgagcctcaatctcagtcggcagcagcaggtgcaacagcaggtgcagcagcaacaacaacagcagcagcagcagcaacagcaacagcagtacctgcacaaccatcatccccacccacaccagcatcacccgcactcccgccacgcccaaggccaaggtcaaggacgaaacggaggctctgccgtgaacaacaacctactgcagcacaagctgcgcatgctgctgggctcggagacggccaaggagcgcaacggtggcaccttgaggcgccacgagatgagcgacggcagtgcggagctactgcccacggactacggcgaggaggagatgggcggtcaggcgggcgccctgaggatcccaccgcccctctacatgcccacgtcccacggcttcgggcgggatggcgaagaacccctcgtcctcaccgagaactatcgacccattagcccgcccgccgagtatgctgcaaagtcgggacaggctcataacgatcgatatagatacaactaccagcgttcgtactcgcactcccatgaggtacccaacacgggcgaggatcgcagtgcgccctatccctccggcgacttcaacatcaatagccacaagtcgttgccggatctgcacacccagataagccgacactcgccgcacagcgagatcctgagctgctgcagccgtggcaatcgatcgatcaagtccgccggcgagtcctcgataaaccgtgactccggcggcagttccggtcactatacgcatcgcagcgagccctgctacaagcgagagcgtcaacgggaagtggccggcagtgcggctccggcgagcggtacgattaagaactgctgcaccttggtggccgccactcgcagggacagtggctcgtccacacagcacagtgccaattcctactgtggctatgtgacgcccgccggtgactattccggcatgggtggtggccggaatacggagcttaagactcagacgccacgatactcgagctcctccagccagcagctgcacaccagttcgcagggctacacgagcatcaatcactcgcagagctcactggtccagagtcccggatcggcgccatccgtggacgacatcagtccaccgcccattcagttcaagaggcagcgatgcatccgcttcaagaacagaaatcgattgccagttcaaggagaaatgggaggaccaccaggatcaggaggtggtctcgtagcgccaggttcaggaggaatgggtacggccagcggtgtcctggccgcctacaagcagcatcggggcagcgtggatcacgagaatgtctttttccccaaaggtttctcctcggaggtgtaccacaatagcttggatatggaaagggaggctctgaatgccagcatttcggagctggagaaattcttcgatcgcctgggactgaacgacgaggccttccacgagatctacagccaaccgaggaggcaccactcggagacggatgacgcctccgatgattccagcactgttttcttctcggacgtaagcaccgtggactcgatgcgattgccggacagcacggaaacccagccgcaggccactcaggcgtatagaccctcggaaccgccgtcgattgtcgagcggaatgccaggatcatcaagtggctgtgcaactgcaagaagatgcagtgcacctga

SEQ ID NO: 36852 - protein, 731 aa, DROSOPHILA
MAAVVHGCSSPRQRSCNGSSSPGGHHGSTPSSAYPTMPKYSRTASQTLYATSQQIFGGGGAIADASYGYGMSSSGGQRPLSASALPETAAASRNYWGHHNAFYHTGSRHYSKRKSAVELLAESKPFYIKSEAVFERLQQASYRNGGGNNGASGKRGRRPEESHGHHYELEDRRYMSLNLSRQQQVQQQVQQQQQQQQQQQQQQQYLHNHHPHPHQHHPHSRHAQGQGQGRNGGSAVNNNLLQHKLRMLLGSETAKERNGGTLRRHEMSDGSAELLPTDYGEEEMGGQAGALRIPPPLYMPTSHGFGRDGEEPLVLTENYRPISPPAEYAAKSGQAHNDRYRYNYQRSYSHSHEVPNTGEDRSAPYPSGDFNINSHKSLPDLHTQISRHSPHSEILSCCSRGNRSIKSAGESSINRDSGGSSGHYTHRSEPCYKRERQREVAGSAAPASGTIKNCCTLVAATRRDSGSSTQHSANSYCGYVTPAGDYSGMGGGRNTELKTQTPRYSSSSSQQLHTSSQGYTSINHSQSSLVQSPGSAPSVDDISPPPIQFKRQRCIRFKNRNRLPVQGEMGGPPGSGGGLVAPGSGGMGTASGVLAAYKQHRGSVDHENVFFPKGFSSEVYHNSLDMEREALNASISELEKFFDRLGLNDEAFHEIYSQPRRHHSETDDASDDSSTVFFSDVSTVDSMRLPDSTETQPQATQAYRPSEPPSIVERNARIIKWLCNCKKMQCT

SEQ ID NO: 36853 - DNA, 2492 bp, DROSOPHILA
ggcaaaggaaattggaaggtcccagactattgagctactacgatgcaagtgatggattaaccaagatggagtgtccttcgcggcggttagctggcttggcaattggggggctgggggctttatctgcagacgaaatcgggctgcaatcaagagggcattaaaaggaaggcaaaataggagggcaagaaaaaaaaaagtggctgtataaggaaaaaagcaaagggaaaaaccaccacaagaaatacatacaacaaaaaagcgacgaaaactatgcgtagtaaaagcgaattttatggagcatcctcgtttaagaaacagctcctgaatttaaattcctctgcgtacaatcacatataagcgagtatttgcacacgcacacagatacaccaacgcacacacacacacacacactagctgccaagaccgtgttcttgtatcattgtgtgcgttcgagcgcattcaacctcaaaatgaataattgcatatgcttcaatgatttgcgactttattcgagagcgcaagcttctcgcaagctgctcctttgctcctctgcacctccgctcgccaactgccaatactttaaagttaaaggccaggagttcaattgcaggacctaaggacatggcagatgagatggcaatggtcgccaatgagaataagccaccagtgagcgacccatccgggctaatttgagaattgcccggcttaattgcgtggcacttaaacaataatcaagttaacggttatgccggcgattatcgccatttttacaccgatgccaatactaaggattattggctgcccattaacaggagcagcaattccaatccgagtcccccagcccggttctcaattcgattccgtccaatccaatgacactcgtacacagccaaaaatacttggagatcagtagacgtttgattttgaattgttaagctgtctatataacattatccaatgctgccaattcgagtctagatgtcaaagttcattcagaaaaatgttacatctaccgaaaattgtcgacttgttgaaggagctgcaagagcaggagaaagaaattcaagagatcattctcgaggagagcttcgccagtccagaacagcgactagcccaactggaatcggtcacatcacggatgcatctataccattcaaggcgcgggaatattctaatgagtttgcagcaagagctaggcaaatatgagtacttcactctgctggtgaggcacattgcccagacgcacagctatttgaaatcgctcaacaaggcactggacttcctgtacaaagtcaacatctgctccatctgcgatttgaaatgtgagccgcatggcaggcattccatggtgtccctgcgttgtggccacctctttgggcgccactgcatcaacaacgtcctgcgggagagctctcggtgccccacttgctcgcgaagagcccgtcatcacgaagtccgcaggatctacggcttaaagttttatcctctttaagctgcgttgaattaattgaattacattttgttcttatgaaacaagaatcttacgcatccttagcgacaataaaattttcagaattgaaagtattttcaaattaaaattaaagtacattttatttttgccagtgctgtggcaactttattgggtttaatgtgagcacattttcgccaccgaacggggtcctctatttgccacccaggagtccacccaagatgccaccgccgccgctgctgctgccgcctccggtgatgccgggtatggaaatgagattgcccagcaatgggttgccatttaaagtgagcaggcagctgtcaaagcaattgcacgaaaaggagcagatatatgagcgagaatatcctgcagaactcaaccggaagttgccacttaccgcagatccagccggatgacgtactgacaggcccattcccgcaggcactgcaacatggagccgagagatcgggagtttggtttaaagctgtccgagggatttatttaatccgcacttacccgtaaagcttcgggagaaggacgcgggcaagtgccgccgattgctccgccgccaccttctccacttccgcttcctccgccggcgccaccacctccaccaccaccaccgccactaccacctcctccgccacctccttctttgggataaacaggaacaggaactggcacaggaactggcaccggaacaggcactggcaccttctttatcggagtgggctgctgctcccagggattctaaagtatgccaaactaaagaatcaccaaaactagatcttcaacgccccagcttacattgtgacccaaggccagggatattagtcctagcacagctagggatataactaatttcctcatctcagctccagtcacttgaaagtcatgcactgataatgacttactgcctcaaatcgctttatatatacttccagatcccacaggtgtttctatatgtgggtcatgcaacggtatcaatgggataatccacttt

SEQ ID NO: 36854 - DNA, 492 bp, DROSOPHILA
atgttacatctaccgaaaattgtcgacttgttgaaggagctgcaagagcaggagaaagaaattcaagagatcattctcgaggagagcttcgccagtccagaacagcgactagcccaactggaatcggtcacatcacggatgcatctataccattcaaggcgcgggaatattctaatgagtttgcagcaagagctaggcaaatatgagtacttcactctgctggtgaggcacattgcccagacgcacagctatttgaaatcgctcaacaaggcactggacttcctgtacaaagtcaacatctgctccatctgcgatttgaaatgtgagccgcatggcaggcattccatggtgtccctgcgttgtggccacctctttgggcgccactgcatcaacaacgtcctgcgggagagctctcggtgccccacttgctcgcgaagagcccgtcatcacgaagtccgcaggatctacggcttaaagttttatcctctttaa

SEQ ID NO: 36855 - protein, 163 aa, DROSOPHILA
MLHLPKIVDLLKELQEQEKEIQEIILEESFASPEQRLAQLESVTSRMHLYHSRRGNILMSLQQELGKYEYFTLLVRHIAQTHSYLKSLNKALDFLYKVNICSICDLKCEPHGRHSMVSLRCGHLFGRHCINNVLRESSRCPTCSRRARHHEVRRIYGLKFYPL

SEQ ID NO: 36856 - DNA, 3470 bp, DROSOPHILA
ggcaaattattgcgcaactaataaactatgcatcgctgattcgattcaaatgtggaagccacacgggcagctcagtcaacaagcggcattcagcagatggctgcacatcatatagtagtatactatagtatatgtctatagtacacagtacttgagcattatatcgcaatctgaatggggcggggcacacactcccacacacacacacagaggcgggggtacaagtgcctcgtcatgtggagtgtgtttaaatgaaattgcttgattcggcataaacatatttactctgttgaatatttgcccaacaatttgattcgcaatctgggcggccatgggcatgggcaggtctgaaatgccgaaatcaaaatggaattgtatcaaggacgcggaacaatcgaggcgggcaaacacacacacacacacacacacacgtgtcgaggaggcctcgttccacatgcctcctgccaatcctccggatcgcaaagtcctccacttgcattcaatggcgtaatcgcaggcagatacaagtacttgtattccgatttccgccgctgcagtacaaccaaacccaagcccaatcccaatccatacacccatccatccgacgacccgcggcatttcatccacagatgtcagcaatttctcgatttgaatgctcaacaaaaacgaaagtgggcaaacaattcaaaggcgagtgcggagcaaaaataactggcagcagggcgcaaaaaagacgaacctctcccgcgtaaatggcttctctaacgacccaattaatttgaaacaagttacagaaaaaaaaaaagaaaaaatggcaaaaaaaatagaataacgtttgaatttaaggaacacaatcagagtgtggcggcgttgcaggagtggagcgccacaggccactaaatgctgggttagaaaccatgcccttgctgttcttccgaggaaacccctcccctcaacaccctagaaactccggcaattgccgcgaagccccaagctttttatgccccaccacagctcgaaaagttcgccgacagcttcattaccagccatcatcggagccatcatcattcgcgtgcactgcgagaaaaggggagcatttttggtgcttaaagaggtggggtataaaaggtgcaagcggatacactgcaaagtattttacaaacacatttaaaatatatttcaaaatggtttaagaaacttcttaagctgaactgatcagctttcttttaaaatacttaataagtagtaagtaaagtgcatgcaatttccctgcaattcctgcatatcgatgacataatttttctctctctgtttggatgctgctacccatgagtaattggcccggcaaaagttcgctggagtcgagtcggatttaagcttggccgttggccgatctagcctgagtctcgagtctggagtcgcgtcgatcgcagtccgccatcaaatcgcgagaagttcacaaatagaatagccatggtcaagaagacatccgccagcctgggaaagagcatcttgctgggagttctgttgtttctcgccgtacacgcacttctcaccgagggtaagtggaatggctgaaatatatgatgtacttttacgggcactaaatgcttaatattaatggcacatctgcttgaaatatttgcggctattgttttggaatgagagatgaaaacaggttttcgagcgccagaatcgccggccagtggcgtagtttctggggatcgtggggcacaaagctcactgttactcggctcgttagtcataattacgctttgtcgtgattcaaggcttccgggtgtatgtcatagccaaggcggcgcagattaaccagctgataagccaaacagcaacacaaatggaaaaatgaagcgaaacataatttaatggcgtgtaattaaactgaaacaccccaccccacccctctctctctctcgcccaccagcggcccccttccaggagctggagcctcgcaaaggtcatgtgcccgtctacatccgacatggcgatgagccactcagcgaaatccatccaggactggccgaggccttcaaggagggcgaatcgaaggtgagtccaaaggacatttactgctagttcaggattatgtggtcgttatttgaagtccttttgctttatgtacaactgtggtatatgaacttgcagaagttagttagatcgctcgattcacatatattctaatgttctctttcatttcaaattttttaaatttgttatttcatgcagtttctactcatatatatagtgtgcttagtttgattcgtttttatgaaaacccctcggattcaccatcattttactgctcttttcgcagagtctcgtcaccgaatctccccaggcggaaactacaaacccaccaaccacatccgatgctcccgctcccgctccgtccagctccacggtatcggatatagccagctttgaggccatcaaaggaaagacggattaaggaattgaataaattcaaaaattgctgcttaaacttatttagtctacgagttaagtccatcaaacgaaagcgcctaaggtctggtgacaaatcagcaggcgaaatggtgtatatttaaacatgaaataaacatttaaataaggccagttttaactgaataaattatattgcttacttttcttaggcataatccggaaagagttataatcaaatagtaaccaactatttcgccattaagtatggatttgatatactatattttagaaattaaaagcctactcaggtcttgctttaaatcaatgttttgccttggcgagttcgaaaaggtcctgaccctgtttaaaataaactgtaaagagttttccaacttaattatttgtacaatttgcaaaattaccgggcacgttaagtcgctttaaacgatgccattcccattcgactcagcatcgtcaccatcgccataaccaaccagccaggaattgtgtgtcctgtctggcgcgcttaaatgaatttctgaatttctgtggacccaagctcgttaagagctgtgcaagtttcacacattgaatggaaattattcggtccttttgggtttcagtttcagtttcgggtcctgtttctctttctgtttcggcttcgaagtcctcgaagctcgtcgctggaatcgccttggagctttgagtgtgatttacttgttgtgcccattagggagtagcgggcacccctcaaatggtaggaaggacacccagacacccggacgcccggacaccctgaagaccagaatcaggaccaggtcctggccaggaagctgtgtggcgcaaacgttcgtaattaatataatggcaacggctgggccgagtaaaactccaaaatggcctacacacgttgcggttcggctttgttaacggaatgggagaatgggcgttgtggtcttggaggattttttggcccgtcctggctgattgggggcgatcacaaattgttgtttcattgtctcaca

SEQ ID NO: 36857 - DNA, 537 bp, DROSOPHILA
atgccccaccacagctcgaaaagttcgccgacagcttcattaccagccatcatcggagccatcatcattcgcgtgcactgcgagaaaaggggagcatttttggtgcttaaagagcctgagtctcgagtctggagtcgcgtcgatcgcagtccgccatcaaatcgcgagaagttcacaaatagaatagccatggtcaagaagacatccgccagcctgggaaagagcatcttgctgggagttctgttgtttctcgccgtacacgcacttctcaccgaggcggcccccttccaggagctggagcctcgcaaaggtcatgtgcccgtctacatccgacatggcgatgagccactcagcgaaatccatccaggactggccgaggccttcaaggagggcgaatcgaagagtctcgtcaccgaatctccccaggcggaaactacaaacccaccaaccacatccgatgctcccgctcccgctccgtccagctccacggtatcggatatagccagctttgaggccatcaaaggaaagacggattaa

SEQ ID NO: 36858 - protein, 178 aa, DROSOPHILA
MPHHSSKSSPTASLPAIIGAIIIRVHCEKRGAFLVLKEPESRVWSRVDRSPPSNREKFTNRIAMVKKTSASLGKSILLGVLLFLAVHALLTEAAPFQELEPRKGHVPVYIRHGDEPLSEIHPGLAEAFKEGESKSLVTESPQAETTNPPTTSDAPAPAPSSSTVSDIASFEAIKGKTD

SEQ ID NO: 36859 - DNA, 5357 bp, DROSOPHILA
cccccagaagttccagtcaatagaaagtatgataaagggggccattcatttttcggaaaatattgttagctgtcatcataaataagttttgatattaaatttaaatttcgaactagagtctacttcccttaatttaaggaataatatacatatacatataattaattatatatttttttaaactgctgcgatgtaaaaagtgtatttaacaaagctgtgtattcaacaaacttacaccaatgttaagaagcttattacaaagacgcacctttgtcttggtccttcgagcaggatacagctattacttgcatgtaaatgtgacagggtctttgtgcactgtcttgccggtaaataagtgcagtttaatttacccgcctttccattacttgcagaaaacaggagcagcagcggtaacgtcggcaacattgcaacattgcaacaacgcaacaacgaaagccagataccttgaactgcggagatagccgggggtacaatttaaataagctgccaggcggatgtggtaggatcgcaggtgggcaggaactggcgggtggcagaaggatgccagccaaaggacgcaatattgcaacatccgcaaattcggggacacggaatcaaagctgaaggagcaaccgcagcaatactctcaaggcgacgcatgtcaatgtcaaagttgaaccagaagtagaggcagtagaagagggccaggaacggacgtgggcgggtcaagagctacggctatagcttataaaggcaaaagcattttaactgcagatgacaaagaaggttgtgctacatctacatagtaaatacaaaacaaatctaagcataagaaaaccccaaaaaccacacccaaaacccagagaaacctagaccaaaataaacagggcagcagcaaacaagtggagggcaatccccggaatttcgattgcccaggctccaagctggcaaactgggaaggcggacgaatacggatacggtgacccgttttgcaggcaagatgtccgtggactttatactgcccaatcgcaataagatccaaacgattgcctatgcgagtgccagcaagaagtatgtgcccggtggatcgggatccaccctgagctccggatcggtatcggcatcgggtgccgacttgcagagctggcgacgacccaagcccaggacctccggaaaggtgaagttcgatgataaatccccgctgactgccagttcggtgctaaaaaatgccaatggaaatggcctgggaactggaggcaagtcacctctcaaatcgctggccaaaaggaactcgcgttcaattctcaagcgggagatcatcgatctggacgacgaggatggcgaggagcaggaggatcagctctgcgaacatctggaatggtccgccgcccaatctctggtccaaatgaactcctccaagcaggaaaagcaacggcgagcaggaactacaggatctcctgcaactgtggcagcgccagtctccgcctcaggtgagttgcacttttaaagtttcatctatcgtgttccctttaatataatatatatttccaaacaaaatgaaacccgcacttttaggagaaaacacctcgacctttattgtaattttttttagcatattttatgacttatttttggagttttccaattattagtccacatttcctgtacttcctgttcaagtgaacattcttgggttgccagagcggttttgttctctaggtagctattgttccatttgtgagacctgccagtcgctcatgccccccggaattacccgaaatcacccggaatcaaccagctgcacccccctgaaagttgcgtcacaacaatgtgaacaggtggctgcgacaatttgtgtgctcgtatttatttttagtagccaggcagtgtgagtcccccactccatcatcgagagccagcggcactttcaaccattttatggccacccacttggccagcgtccttcaaccggtggcgctagcgactgggcctctgcccaggggggtgatcccccccatggtgactgctggtgaccccaaacagtccctgctttccctgctttccccactttgaacactccactgtgagcgctcgtgtttgacattgtcgccgttagctaatctttttagcgtatgttggcattttccatgtttgcgcttgccttcttgtcgatgtcgttgcttgttgctcttgaatggaggaaaaggcacgggaaaagcgtaggggaaaagccaaagcagaagcaaatgcaaacaagcggcattgactgccactggcagtgggtggtgctgggtgggtttgatggcttgagaggtcgtcatatcgattgagcaactcggaacgtaacaggtcagccgcagtggaaaagggatatatactgcgtcagcttcagtcccataaatgccgaataaatgtgcatttatggttactgctgtcctgtatgattccctttgctttcggtagtcccttcacaatatctcttgcatttggcacacgcacttcaagcacatgtgtgtctgtgtagtgggaggagttcaaaaaggcaagaaaaaatgctgccttttaataaagacagttcaaaggagcttgtagtttcgggttacacctttcgaggtctacaggtgcaggtggcagctctgggaaagagaagacagggtagcccgaagttaaataagatagagttgcaaagcgagtcaaaacaaattgagaatgttttctgatttgcacagtaaatcgtttttaaagaatcgttagtcagtgaattttcgtactcttttaccaattaattgaaactaagatcgtttcacaaatcttgtactgcaagctgtctggaacttgcactcttgtaggtttttcttcgatctttacccatcgaatttatcgattaagcggattccatcgttccggaaaacgtcaaagcttacagtcgattaggcagccctggccgtaatggcaaccctgcacctggtcagtctgaaaaatcaacaagttgcttgacaattatggaaccccatctatttcaaaggaggatttctagtgaaaatgaaccttaaagagttctctgtccaaaacaaggatagtattcagcccatggactgttagttctcttgagttggccagtatcttgtggatactaaaactaagtattaatttacccataaacagtgtcgctgcgccgtccagtgggcagagctccggcggaggatggcaaggtgattttctatgccccgcccgccagcgccagtggatctccgcgtcagccggagccggtggccttgaagagggagcgcgagcgggacaaggagcgcgagagggaaaaagaacgcgagcgggaccgcatgcgggaacaacaattggtcgcggcgacggcagcggcatcgatttaccggggtcgcagcgtggaggaaacggaagcggcccacgatctgctctccctgtcacagagtctgccgcccctgatcccgccatgcgtggtcaccatcatgaagcaggagcaggagcaactgcgctccccggaaatccaggagatatcgaacagcgcttccagccgatcgccccagtcgaccatccggttcattggcagcagctcatacgacctgatgggtggctcctcggagggggccaacaattgctcgcctctgacgccgccgaactcggaccacagctccgacgtggatatcgacatgtcttcctcctccgaatcaggtctgcagcagtggggcaagcccaatccgcagcaaaaccagcagcgtgcctcggccctcaagatgtgcctcaacatgctggatggcaggaccaaggcgagcaaggcggctgctgtgaccaagcaggacaggcaggaaccgatgcagccgcgtcccaagagtgcccagagcaatgcctcgtcaggaggtggtccgccatcggagccgccagagaatccggcagccagcctgggacacagctcctccggcaacggggagaactacgccaagcggaagaggggctgctacaagtgctgcgagtgtggcaaacagtatgccacatcatcgaacctctcgcgccacaagcagacccatcgctcgctggactcacagtcggccaagaagtgcaacacctgcggcaaggcctatgtttccatgcccgccctggcgatgcacttgctcacgcacaagctctcgcacagctgcgacatctgcggcaagctcttctccagaccctggctactccagggacaccttcggtcccacaccggcgagaagccctacgcctgtgtccattgcggcaaagcctttgccgaccgctccaatctgcgggcccacatgcagacccattcgggcgataagaacttcaagtgccatcgctgcaacaagaccttcgccctcaaatcgtacctcaacaagcacctggaatcggcatgcctccgggatgccggggccatcgatcagggcaagggtctggaggaggaggacgacgactgcagcaagcaggacgaactggagatgggcgacgagctggagagcgatgagaacagccaggacattgtggtggcctagggacaatcgacctagggaactctcctgcccgcaactaagatactttataccagaaccctataagcaatactcgagcacccttatcaaattaatactaaaatgaattaacaaaaccaaatgagaattataaacaaacaaaatctagtctagaaatcggcttactagcggagtagttctttaaatggcagatgatcacgatgataatgatgacgatgacgatgatgatgatggatctcaactcaatagaatcttcttcaagcagttatatacacacacacttatatctactcacttataatctgaactattccaaaatctctccaagttgcaacttttactgaacgaagattgggaggcgtaagaacaaagaaaacaaaaacaaaaggtttgagaaggaaatccaaaacgtaacttatagtaaaaatctgacacaacgaatattatggaacataagtagaaattctatatatacacagatcaaataagcattatatacagatggatggtaggaagacggaaaaacggtgcaaacggcaaattatatgtatacatatgaactaaatgattaatacctagcgagcagaaccaatttgcatgttttttggtaaataactacttttaggcatcgttttagggctctagagtttatatacaccccctcacaagaaccggatacccagagacacacaaaccggacaccattcgccagataactaacactaatctccaatcaccactagatgtagtccttagagtaccgaaggattcgatcggagctcagttcaagtcctagcaactaatcaattagtgaacttatagcac

SEQ ID NO: 36860 - DNA, 1860 bp, DROSOPHILA
atgtccgtggactttatactgcccaatcgcaataagatccaaacgattgcctatgcgagtgccagcaagaagtatgtgcccggtggatcgggatccaccctgagctccggatcggtatcggcatcgggtgccgacttgcagagctggcgacgacccaagcccaggacctccggaaaggtgaagttcgatgataaatccccgctgactgccagttcggtgctaaaaaatgccaatggaaatggcctgggaactggaggcaagtcacctctcaaatcgctggccaaaaggaactcgcgttcaattctcaagcgggagatcatcgatctggacgacgaggatggcgaggagcaggaggatcagctctgcgaacatctggaatggtccgccgcccaatctctggtccaaatgaactcctccaagcaggaaaagcaacggcgagcaggaactacaggatctcctgcaactgtggcagcgccagtctccgcctcagtgtcgctgcgccgtccagtgggcagagctccggcggaggatggcaaggtgattttctatgccccgcccgccagcgccagtggatctccgcgtcagccggagccggtggccttgaagagggagcgcgagcgggacaaggagcgcgagagggaaaaagaacgcgagcgggaccgcatgcgggaacaacaattggtcgcggcgacggcagcggcatcgatttaccggggtcgcagcgtggaggaaacggaagcggcccacgatctgctctccctgtcacagagtctgccgcccctgatcccgccatgcgtggtcaccatcatgaagcaggagcaggagcaactgcgctccccggaaatccaggagatatcgaacagcgcttccagccgatcgccccagtcgaccatccggttcattggcagcagctcatacgacctgatgggtggctcctcggagggggccaacaattgctcgcctctgacgccgccgaactcggaccacagctccgacgtggatatcgacatgtcttcctcctccgaatcaggtctgcagcagtggggcaagcccaatccgcagcaaaaccagcagcgtgcctcggccctcaagatgtgcctcaacatgctggatggcaggaccaaggcgagcaaggcggctgctgtgaccaagcaggacaggcaggaaccgatgcagccgcgtcccaagagtgcccagagcaatgcctcgtcaggaggtggtccgccatcggagccgccagagaatccggcagccagcctgggacacagctcctccggcaacggggagaactacgccaagcggaagaggggctgctacaagtgctgcgagtgtggcaaacagtatgccacatcatcgaacctctcgcgccacaagcagacccatcgctcgctggactcacagtcggccaagaagtgcaacacctgcggcaaggcctatgtttccatgcccgccctggcgatgcacttgctcacgcacaagctctcgcacagctgcgacatctgcggcaagctcttctccagaccctggctactccagggacaccttcggtcccacaccggcgagaagccctacgcctgtgtccattgcggcaaagcctttgccgaccgctccaatctgcgggcccacatgcagacccattcgggcgataagaacttcaagtgccatcgctgcaacaagaccttcgccctcaaatcgtacctcaacaagcacctggaatcggcatgcctccgggatgccggggccatcgatcagggcaagggtctggaggaggaggacgacgactgcagcaagcaggacgaactggagatgggcgacgagctggagagcgatgagaacagccaggacattgtggtggcctag

SEQ ID NO: 36861 - protein, 619 aa, DROSOPHILA
MSVDFILPNRNKIQTIAYASASKKYVPGGSGSTLSSGSVSASGADLQSWRRPKPRTSGKVKFDDKSPLTASSVLKNANGNGLGTGGKSPLKSLAKRNSRSILKREIIDLDDEDGEEQEDQLCEHLEWSAAQSLVQMNSSKQEKQRRAGTTGSPATVAAPVSASVSLRRPVGRAPAEDGKVIFYAPPASASGSPRQPEPVALKRERERDKEREREKERERDRMREQQLVAATAAASIYRGRSVEETEAAHDLLSLSQSLPPLIPPCVVTIMKQEQEQLRSPEIQEISNSASSRSPQSTIRFIGSSSYDLMGGSSEGANNCSPLTPPNSDHSSDVDIDMSSSSESGLQQWGKPNPQQNQQRASALKMCLNMLDGRTKASKAAAVTKQDRQEPMQPRPKSAQSNASSGGGPPSEPPENPAASLGHSSSGNGENYAKRKRGCYKCCECGKQYATSSNLSRHKQTHRSLDSQSAKKCNTCGKAYVSMPALAMHLLTHKLSHSCDICGKLFSRPWLLQGHLRSHTGEKPYACVHCGKAFADRSNLRAHMQTHSGDKNFKCHRCNKTFALKSYLNKHLESACLRDAGAIDQGKGLEEEDDDCSKQDELEMGDELESDENSQDIVVA

SEQ ID NO: 36862 - DNA, 3071 bp, DROSOPHILA
gctgggtggttgggactcatcttgctcttctactgctgctgttcccaggccttcttacgggccataaaatttaaaagcgagcaaagcattttagctctggtgcaatttattaggccggctcatcgcgccgcatttcgggcctttgcgtaacaattgccttcatctgttgataaatccctggcatggcaccaagtaaattgaaaatataccccacacacgatgagaaggtggcacaccgacttcgcctccaattccgattgcgatgtgcagccaactgtgtcgcagttctaattatccacgcacatgtctactggcactggcattacgaacaggaacaggaacaggccgactccattggtcccaactggagctgggactatatccaaaaatcaggtaatgagcacagaaatgatctagctgaagtgcgtactttgaaagttacttttcagtaactgacgatactcgagtggctgctttccagaatggcgtcaatgtttcacctacagaggctcaactgtaccgccgtcgagctgcagacctggctttaaggacacggacagaagctggtaaagcatgagcttccgcttctgtcttttatgcaactgcagtggccacccgctggctgcctcagtggcgagaggcattcaaaacagcagccaggacgggccgccagctgtgcagctgcctccgcatccgcaagtggcgtgaaagttatgaattttaaacattttctggcagggcatcgtcggagccagcagagagcacagaggacggcggacggaggatgaaggagaacgcccctttggccacgtccatatattagtttcggtgtcttcgtggcgtctgcagatttatagccggccaaaatctgcaattgtgggtgactgcaacacactcgcagctcgtttttgtagaaattgaatgaaatctttataaaattggcaagagccagtctaaatgaagttgcatttcttaaaactaaacaatattgtctgccttttcacgatgcagcgcttgagttgcgccatatatccacatccgtttggaggcattttcggaatttgtagttgaccaggccaatggaatacatcggattggcgggcttgtagaagtgcagacctcgcccaatcttaattatgtagccattgcttaagctgcaagaaaaaaaaaacgaatagataagataatttaaatacatacgttttcaagtgggtgtacagattgcgaatatgccaaattaagctgtcccataaccttttaatggaaaaacaatcgatgttccccacttcaagtccaattttactgacgctatcattttgcaaacttactaaatttttcgatcgtgcagagagtcttcgtattttatgtagacagtcacgttccgccgctccaagtcacccttgatctgtccaagatttgtttcctgctgatctggattctttgcatccttgtactctttggtgatcagtcgaaaatactttaggtttgggcaatttgtggcagctagctccaagaatcttattagattttgatactgcaagcgaatataaattacaagcaatggctcaacaatcatatttcttatcttaatatgatatgaaacctcatatgaggtcattacaaaagattaacacttgattcaattttctttgaattatattcgtaaatgttgaccatcttgaggacttgaggatcattctcttacctgatagttctgcgtcatgtagggttcctccagcatgatctcgacggtcttgtcgtccatgtatttcccgaagagctgatcgtagtcgaagcccgtatcattctcgtcgatggaaacgtgggaaaccacctcgccgagcattagtttgccattgatccgcgccttaattgcgtcagcccgatccatgtactccttgatcctggtcaggaaccccttccgtttggcttcatccggttccccgttgacgaactgcatcaactgcccgatcccctctgtgtacagcgtttgcgcctccaagatccgtccaacttggtcgcattccacggcgcgtataagtaactccttggcgttcaaagcgctgctcatcttggcatctcaggcgggggagtattaagtacttcgaatatctcactgttcaggatcttttgatcgaggatctttcacatttaatatgttattgccacggaatgcaacattcgaaaacgcaatcagctggttgtgtgaccatagcgcgctagtctgaaaactccgaaagtaagtccgattcgttggtatatattcggcattatctttcgctgaccgttaattttcaaaactaacaaaggctctatatctctggtgtttatttacgaataatttaaaaaaaaaatgtctgtattgaacatacatatatatattacaataaaaaaataaataatagcacaggcttaaacttaaagctatcttgcacaaacatttaattttatacgcattgagcaagatttttcaaacatatttttacctcttgcttttttgtttgtgacaaacctttcaattgcaacatgtgcaaatttaaaatgccccacatttgcatattccactgtagcacgatgacgtcccctttacgagcaattacgtggaatcgaaaacgaaagcgttttatcgccagccagcagtcagacatgccaacatggagccgaattcaatttcactaagccaaatattaatttatttgtgttttcatttctggctccaaccgccaggtgaccaatggatctggatgagggactggactgccatggccatccaatccaatcggagtcagccaaggaaaaaaccgaaaacgtttcgtgtaatttcgagtattgggtgggggttttttttttggctgggtggtttggtggctgagtggcttttccggacatcccgagtccgtatttttatttatgtcataaattttaagccattgggagctgtgaacgggaacgtgacgtcagcttatagttcgcacagcggggcttaaatttttcgtattttaaatgcgtattaagcagaaagaaaagtcatttcgggtgattcgacacaaaaaccaggcacccagctcatc

SEQ ID NO: 36863 - DNA, 726 bp, DROSOPHILA
atgagcagcgctttgaacgccaaggagttacttatacgcgccgtggaatgcgaccaagttggacggatcttggaggcgcaaacgctgtacacagaggggatcgggcagttgatgcagttcgtcaacggggaaccggatgaagccaaacggaaggggttcctgaccaggatcaaggagtacatggatcgggctgacgcaattaaggcgcggatcaatggcaaactaatgctcggcgaggtggtttcccacgtttccatcgacgagaatgatacgggcttcgactacgatcagctcttcgggaaatacatggacgacaagaccgtcgagatcatgctggaggaaccctacatgacgcagaactatcagtatcaaaatctaataagattcttggagctagctgccacaaattgcccaaacctaaagtattttcgactgatcaccaaagagtacaaggatgcaaagaatccagatcagcaggaaacaaatcttggacagatcaagggtgacttggagcggcggaacgtgactgtctacataaaatacgaagactctctgcacgatcgaaaaatttacttaagcaatggctacataattaagattgggcgaggtctgcacttctacaagcccgccaatccgatgtattccattggcctggtcaactacaaattccgaaaatgcctccaaacggatgtggatatatggcgcaactcaagcgctgcatcgtga

SEQ ID NO: 36864 - protein, 241 aa, DROSOPHILA
MSSALNAKELLIRAVECDQVGRILEAQTLYTEGIGQLMQFVNGEPDEAKRKGFLTRIKEYMDRADAIKARINGKLMLGEVVSHVSIDENDTGFDYDQLFGKYMDDKTVEIMLEEPYMTQNYQYQNLIRFLELAATNCPNLKYFRLITKEYKDAKNPDQQETNLGQIKGDLERRNVTVYIKYEDSLHDRKIYLSNGYIIKIGRGLHFYKPANPMYSIGLVNYKFRKCLQTDVDIWRNSSAAS

SEQ ID NO: 36865 - DNA, 7157 bp, DROSOPHILA
cgaatacgccagtgcagctgttgaaaacgaatcttcaagcctcgacacatgagaaacagaaaaatatcgccaaagttccacacaaaagtcatggccatggtgttccattcgataaagaacaccatccaggcgcggtattcaaaaaccgagaataactcctgacgctcgcgaaggaagtagttctccacgaatcccaccttcagattgcaatctcgaatctggacatagttactccaagccgcacttcccacataggtcaggtgctcacatagagcggccaccagaaggatcaatgcccatcgcctaagaaatcgggtgaaattgagtccttcctggttcgcatagcagggcttcagaaagattcgctcacatagcgctgtttcccggatgatatggggccatcgacgggacagttttataaaggatccgaaacaaaatatgcaaatcacactaaaactcaaagagcctgggagaataaatagtgggaaaacaacttggtatatatatatcttatatatatattatccaacatcttacccatggtatacagctgaaggccatcgttcagtacaatcttagttgagagcataaagtcagcgattacaaatgtgaatgccacgacgaaaaacagaatgtatggcgaaaaccagcgaaagcgaacattttccggcttgccattaggatttattccggccaggggtagtacgccaaaaatccgggctattatcagaactgcaagggcaagctgagagatctgatcaactgggaacctaactcaccatgcccaatggtataatgcagggtattctcctgcactgaccgctccatttgaagtccatgaacagacaaatggctcctcagcatggacgtgataattaagacacttgcgaccgaacgtttcagacacgcattgtattcatagatatcatctgacaggtgattgattgggtgcgattaaaaagtacagaaggtgcgacagaatgcaaatttcaaactagaactaggaaaatatgctcttggacgagccaacgccgccctcgcagaagctcttttgcacctcagatccagccatttggttgatgagcaccagttcgtagaccatcaaagtggcagccatctgtccagatattgagttgcttaaaatgcactagaatatgttatttctattgccaacttactgcaaatattaatcgtctagtcagcagaaagtatcccttgccactcagagcaaagtggtcggatagaaagatctcattcaggcgcctgagctccacgcaccaaaactcagtgggtatttcgtatagggtgtaggaaatctccttagcctcttgcggaatcgaggatgcagcgaacatcatgtttagtacgcgaatgatgacataagacaagcaaaaccagaaatataactcatccgcatagttgcccttggatctgaaaaataaaaaccatagacatagtgatatagtttagtttaatccaatcaactcactgaaagctatgataaatctgcacacaaacgaagtacatattgtgggcacaggatagcacgatcaaaccggataattccttgtcgtagatacccagaagatcactgaggtccagaagatcacagcgaatcctctgccagaattcattcggcatttgctgcctcacatgctgcctgatgcgccagtgcatctgctggaatcgcatctgcattccgcggcagatgagtatcagaaagatgtccacaaagttccacacgaaggtcatcgacagcgtggtccactcgatgaagggtatccaccaggcggtgaagtgcatgatcaggaagagctgctggcgctctcgctgaaaatagttctgccaaaagttcgcatccagcttgcactccacgatggccaggtgattgttgtacagcgcgctgcccacataggtggagtgctcgcagagagcggccaccagcatgcagactccccagaggcgaaggcgactggagtagccacgtccatagctgcaatcgtactctggttccaggaatatctgctcgcactccgccgttcgacggatgatgtatggccagcggcgggaaagcagcaggaagaccccaaaacaaaagatgcagatcacgctgaaactaagagatcctggaaaggaaaggattgttagtcaatatgctatagaacatacaatatttcgatctcacctatggtatagattttcagtccatgatcgaacaccactttcgaggatagcgcacagtccacgatggagaagacgaacaggatcagagcagccagcagggacaaggatatccagcgaaagcgcaccctctccggacgacaactcggccagactcctgcaacaggcaggactccgaagaactgggctataaccagaactgaacaatatccgaattatcatcaatacccaatccttgactcactcacctgggccgatggcgtgctgaagcgtgtttctggtgcctttttgacccgactgctgcatggcttgactgttgggtagcaaatggaaagaggtccttcacgtcctaaggacacgccgtaaaaaaaggggcgtatgccgaactatttgcagattaggatctcgcgaatgtggattcggtgcgggtgcatgggcgtgacacttatgactaaatgcgttcttgaattggagatacgagtagtaaattctaggatctaatattccctgcagtactgagtcttttgcctgatggaaccttggttaataacatccgatatcatgagctcgtaggtgattatggtggtgcccatctagattgggatatatacggttacaaacagaagttcaaatgttttattgggcaatcttacggccaggacgagtgagcgggtgaggtagaagaatccgctgccggatagagctgtcgtatcatttcccaactgctcactgaagcgctgaacctgtggatacatatattctcttaaggtattcaatctggatgatactttctacctctatggaccaagctctggagggcacatccctcaaggctgtgacaatctttcgttcgtaatcgtttatggaagaagccacgaaaatagtaagtaaagtgcgaactacagcgaatcctaaggagtaccaaaaagccaacatcaccaggaaatccacacctatatttctgaaaaaatatacataatatatctaagctgtgtaaagtcatttctcaactcacttgaagctgttgaacaattgaaagcaaatgaaagacatgttattgccaaaggcgaggagcaccagtggagctattgccgcatccaggagatgaaccagacgcttcaatgccagatagtgctcccgaacctctgtccaaaagaccgcgggcattactttcctatgaacagcagcgattcttctatagagctggtgaaatctggcagccaagccaatgccaatgcacatgatgaagcagtcggtgaatgagcgcggataggcaatggtctggttaacccactggatagtgtttaaatgaaatttaagcactgcgagatgaggtatccttcaaggtaaattacctccaagatgggtagcatccaaaagtggtagggcaggatcatgtatagatgaggacgctcccacttgtaaatgctctcgaagtaggtaacgttaatcttgcactgggtgcgctccatattgctcagatgaaatgagttgcccagcaggagacagtgttccactgaaaaggatgcttagaaattgaacttgaattattaatttaagcaagcattcacccaaagctgatgacatgacaattgtaaacacaatgtagatgcgcctctttatcctgtactcgccgtagaaccgatagggaacccgcagaaagagctgctccactccatgccaggtgcgcataatcctgggccattggatggccagtctccagaagaagaggtgctccagaaggcagacaatgtacagtgaaagcgtgctggaggtgtgaaagttgatggtcaccttgatgacatagttgatgaccgcaccgaattcgctaagatttaggatcccgatgagtagggagtacaaaatgcgaggcgagcaccaacgaaaccggatatccgccacgtccagagcacggacattgctaaccggaagcaggccgtagatttgtgaaataaaaagcactgcgaaaatatttaattcaatatttaataatgaattgaaccaagtagagataggcacaccattcgagaccgcccgatggaatgtctcgccctgcggcatggccaaactagcactaaccaaacgacttgccaatctggcgtgccaagtggccaccgatatttccaagggggtgtggtcgctttaaacgatttaccaactaagtatttaaaactaatagtggcgcctgtcacattcagctgacatgacaaatgtttggggagtgggaggatggttatggtgttggtggctattgttgtccatcaggcgcacagtggctgcagtcctttgcgtcgattgggttcatcgaattgcaaaaggaccagttcgtaggtgacaatggttccagccatctagaggggtgggggaaacacagaggtgtgagcataaaccttcattttttctgcacttggggttactcactccaaagagcagtcgtcgggtgaggaaatagaacttcttgccggaaagtgccactgtctgtgtggtcatctggaatatcaggcgctccacctcgacgcaccagctacgactggaaactcttctgagcactcccagacctcgtttggactcctcattgatgtccgccgccgtgaggaatacaaaggccgttcgtccaatgaggtagagtagggagtaccagaagtatatgtagttgatgggccaacgtagtttgctaaggaatataactataatattagaacaaatattttcttggctactcacttgaagacatttagcagttggtagcacacaaagtacaggttgttaacacacgaaagtagaatgagactggacatggcgctatccacgaactccagtagctcgcacatcttgacgtagtgctccctgatttggatgaacaccgattcacagacctcctcgtgttccaatttgcgaattcgcgtagttatttgctcgaatcggtaggacaagcccttgctaatcatcatgatgaacagatccatgtagttccacacaaaagtgcacgctccgttgattaactaagatatagattcttaagaatatattaagtaattttacgtaaaagttacttgccagtataagaacagcgataatgggactgtaaggtagcagttggaatacgtagtcatagttcgtctgcatgtagttattaaaactgggcacagtggttatattggcgcacatctgaatgcgtcgtgtgtagcttagaatagcagatacctggtacagagcatgttcgcctaaaagggagtagaaagaagtatatccacaagacaaaactgcaaactcacctaaggacaagccaatgatggccaaggcagccaattgcacgcgtcgcgaaagattccttttgggtatttcatatggtggcttggtaaaaggtatttccgttctcgtccagattcgaacaactgctggccattttttggccaggcgaatgaagaccacataggccgacaaaacacaaccgaagaacaccaatcccactggatggatacaaatacccatgttaactttcagctagaaaaggacatcgctctgctcttaccaaaattcttggctgtaatgccaatttttagcaggtgggtgaacatgctcaaaaacaatatcgatgtggctatcataaagatcagggtaacgaacatgggaattgatttataggcaaatcgaacccggcgaggattagattcccggatgcccaccagcggcattatggcgacgcattgggccagaaacataactaaatcggagaaaataatttctaaatattcgttagtaataattgtttaatcttacatggaaacactgctctatggaatagatccaaattggtatagttgggcaacttttcgctggccaagacattgaattccagattggaatcctcaacaaacttcggtggaggcgtttccggcctggccaaactctccacctgcttaacgccattatccttgctcggagtttttcgaaaattcagattgggtcctttcatgacgctggtcccttttgcactgacacgaaatgcgaaatttcaacatgtccaaagcttgtcatgggtggagttgagcccttcacaatggtgcccgtctgaagtgccactaattaggggctttggacctaagctagtaccaggatgtaaacaacaattatgagacacttctgtgggaattggaataaagtgggttcactctgcagcagcagaccgaaggattcggatgcatccgtcagattgcatttcgattagctgccgagatacatgtgagaaagaatgttacaaataagcacagatttggtcaaaactttgtatttctattcaagttttagttggtccacttttaggctgaataatatatatatatttttttttgcttccgcagtgaacgtagggcagtagtaatatagctacttatctccgatgttaatcgagtattgattgatatggcgagcgatgtggtaagagcccagtttagataatacgttggctatttacaaatctttcttatcaatgtattgttaaaatgttacacttccgaatagccttagaaccttgacatacatttttaatgtaatatcagatacttatttatttacaagaaaatatttaataaatacaattgactagtgtttcataaggcatttctattaggaagttgattttaacagctaagagacaatcgctgttagatttgaatacacttgtgatcatatggaaatagatgggatggattgaatccactctgggcgctttggagcagtggatgagagcagctcgttgcgactggttgtgcgacaggtgtcggaataaataaaagcaaaaacattcgacggcttttgtttgcgctgataaacaacctgcgcatatgtacaagcaaagcaaaatactgctcgaataattgtttgttcaaaacaatcaggtgtgccttttataaaactaaaagtttctaatttctaaacgagtaggtgtgcgcgcttctaataaaaaatttcggtat

SEQ ID NO: 36866 - DNA, 3900 bp, DROSOPHILA
atgaaaggacccaatctgaattttcgaaaaactccgagcaaggataatggcgttaagcaggtggagagtttggccaggccggaaacgcctccaccgaagtttgttgaggattccaatctggaattcaatgtcttggccagcgaaaagttgcccaactataccaatttggatctattccatagagcagtgtttccatttatgtttctggcccaatgcgtcgccataatgccgctggtgggcatccgggaatctaatcctcgccgggttcgatttgcctataaatcaattcccatgttcgttaccctgatctttatgatagccacatcgatattgtttttgagcatgttcacccacctgctaaaaattggcattacagccaagaattttgtgggattggtgttcttcggttgtgttttgtcggcctatgtggtcttcattcgcctggccaaaaaatggccagcagttgttcgaatctggacgagaacggaaataccttttaccaagccaccatatgaaatacccaaaaggaatctttcgcgacgcgtgcaattggctgccttggccatcattggcttgtccttaggcgaacatgctctgtaccaggtatctgctattctaagctacacacgacgcattcagatgtgcgccaatataaccactgtgcccagttttaataactacatgcagacgaactatgactacgtattccaactgctaccttacagtcccattatcgctgttcttatactggcaacgtgcacttttgtgtggaactacatggatctgttcatcatgatgattagcaagggcttgtcctaccgattcgagcaaataactacgcgaattcgcaaattggaacacgaggaggtctgtgaatcggtgttcatccaaatcagggagcactacgtcaagatgtgcgagctactggagttcgtggatagcgccatgtccagtctcattctactttcgtgtgttaacaacctgtactttgtgtgctaccaactgctaaatgtcttcaacaaactacgttggcccatcaactacatatacttctggtactccctactctacctcattggacgaacggcctttgtattcctcacggcggcggacatcaatgaggagtccaaacgaggtctgggagtgctcagaagagtttccagtcgtagctggtgcgtcgaggtggagcgcctgatattccagatgaccacacagacagtggcactttccggcaagaagttctatttcctcacccgacgactgctctttggaatggctggaaccattgtcacctacgaactggtccttttgcaattcgatgaacccaatcgacgcaaaggactgcagccactcgaccacacccccttggaaatatcggtggccacttggcacgccagattggcaagtcgtttggttagtgctagtttggccatgccgcagggcgagacattccatcgggcggtctcgaatgtgctttttatttcacaaatctacggcctgcttccggttagcaatgtccgtgctctggacgtggcggatatccggtttcgttggtgctcgcctcgcattttgtactccctactcatcgggatcctaaatcttagcgaattcggtgcggtcatcaactatgtcatcaaggtgaccatcaactttcacacctccagcacgctttcactgtacattgtctgccttctggagcacctcttcttctggagactggccatccaatggcccaggattatgcgcacctggcatggagtggagcagctctttctgcgggttccctatcggttctacggcgagtacaggataaagaggcgcatctacattgtgtttacaattgtcatgtcatcagctttggtggaacactgtctcctgctgggcaactcatttcatctgagcaatatggagcgcacccagtgcaagattaacgttacctacttcgagagcatttacaagtgggagcgtcctcatctatacatgatcctgccctaccacttttggatgctacccatcttggagtgggttaaccagaccattgcctatccgcgctcattcaccgactgcttcatcatgtgcattggcattggcttggctgccagatttcaccagctctatagaagaatcgctgctgttcataggaaagtaatgcccgcggtcttttggacagaggttcgggagcactatctggcattgaagcgtctggttcatctcctggatgcggcaatagctccactggtgctcctcgcctttggcaataacatgtctttcatttgctttcaattgttcaacagcttcaaaaatataggtgtggatttcctggtgatgttggctttttggtactccttaggattcgctgtagttcgcactttacttactattttcgtggcttcttccataaacgattacgaacgaaagattgtcacagccttgagggatgtgccctccagagcttggtccatagaggttcagcgcttcagtgagcagttgggaaatgatacgacagctctatccggcagcggattcttctacctcacccgctcactcgtcctggccatgggcaccaccataatcacctacgagctcatgatatcggatgttattaaccaaggttccatcaggcaaaagactcatcaagccatgcagcagtcgggtcaaaaaggcaccagaaacacgcttcagcacgccatcggcccagttctggttatagcccagttcttcggagtcctgcctgttgcaggagtctggccgagttgtcgtccggagagggtgcgctttcgctggatatccttgtccctgctggctgctctgatcctgttcgtcttctccatcgtggactgtgcgctatcctcgaaagtggtgttcgatcatggactgaaaatctataccataggatctcttagtttcagcgtgatctgcatcttttgttttggggtcttcctgctgctttcccgccgctggccatacatcatccgtcgaacggcggagtgcgagcagatattcctggaaccagagtacgattgcagctatggacgtggctactccagtcgccttcgcctctggggagtctgcatgctggtggccgctctctgcgagcactccacctatgtgggcagcgcgctgtacaacaatcacctggccatcgtggagtgcaagctggatgcgaacttttggcagaactattttcagcgagagcgccagcagctcttcctgatcatgcacttcaccgcctggtggatacccttcatcgagtggaccacgctgtcgatgaccttcgtgtggaactttgtggacatctttctgatactcatctgccgcggaatgcagatgcgattccagcagatgcactggcgcatcaggcagcatgtgaggcagcaaatgccgaatgaattctggcagaggattcgctgtgatcttctggacctcagtgatcttctgggtatctacgacaaggaattatccggtttgatcgtgctatcctgtgcccacaatatgtacttcgtttgtgtgcagatttatcatagctttcaatccaagggcaactatgcggatgagttatatttctggttttgcttgtcttatgtcatcattcgcgtactaaacatgatgttcgctgcatcctcgattccgcaagaggctaaggagatttcctacaccctatacgaaatacccactgagttttggtgcgtggagctcaggcgcctgaatgagatctttctatccgaccactttgctctgagtggcaagggatactttctgctgactagacgattaatatttgcaatggctgccactttgatggtctacgaactggtgctcatcaaccaaatggctggatctgaggtgcaaaagagcttctgcgagggcggcgttggctcgtccaagagcatattttcctag

SEQ ID NO: 36867 - protein, 1299 aa, DROSOPHILA
MKGPNLNFRKTPSKDNGVKQVESLARPETPPPKFVEDSNLEFNVLASEKLPNYTNLDLFHRAVFPFMFLAQCVAIMPLVGIRESNPRRVRFAYKSIPMFVTLIFMIATSILFLSMFTHLLKIGITAKNFVGLVFFGCVLSAYVVFIRLAKKWPAVVRIWTRTEIPFTKPPYEIPKRNLSRRVQLAALAIIGLSLGEHALYQVSAILSYTRRIQMCANITTVPSFNNYMQTNYDYVFQLLPYSPIIAVLILATCTFVWNYMDLFIMMISKGLSYRFEQITTRIRKLEHEEVCESVFIQIREHYVKMCELLEFVDSAMSSLILLSCVNNLYFVCYQLLNVFNKLRWPINYIYFWYSLLYLIGRTAFVFLTAADINEESKRGLGVLRRVSSRSWCVEVERLIFQMTTQTVALSGKKFYFLTRRLLFGMAGTIVTYELVLLQFDEPNRRKGLQPLDHTPLEISVATWHARLASRLVSASLAMPQGETFHRAVSNVLFISQIYGLLPVSNVRALDVADIRFRWCSPRILYSLLIGILNLSEFGAVINYVIKVTINFHTSSTLSLYIVCLLEHLFFWRLAIQWPRIMRTWHGVEQLFLRVPYRFYGEYRIKRRIYIVFTIVMSSALVEHCLLLGNSFHLSNMERTQCKINVTYFESIYKWERPHLYMILPYHFWMLPILEWVNQTIAYPRSFTDCFIMCIGIGLAARFHQLYRRIAAVHRKVMPAVFWTEVREHYLALKRLVHLLDAAIAPLVLLAFGNNMSFICFQLFNSFKNIGVDFLVMLAFWYSLGFAVVRTLLTIFVASSINDYERKIVTALRDVPSRAWSIEVQRFSEQLGNDTTALSGSGFFYLTRSLVLAMGTTIITYELMISDVINQGSIRQKTHQAMQQSGQKGTRNTLQHAIGPVLVIAQFFGVLPVAGVWPSCRPERVRFRWISLSLLAALILFVFSIVDCALSSKVVFDHGLKIYTIGSLSFSVICIFCFGVFLLLSRRWPYIIRRTAECEQIFLEPEYDCSYGRGYSSRLRLWGVCMLVAALCEHSTYVGSALYNNHLAIVECKLDANFWQNYFQRERQQLFLIMHFTAWWIPFIEWTTLSMTFVWNFVDIFLILICRGMQMRFQQMHWRIRQHVRQQMPNEFWQRIRCDLLDLSDLLGIYDKELSGLIVLSCAHNMYFVCVQIYHSFQSKGNYADELYFWFCLSYVIIRVLNMMFAASSIPQEAKEISYTLYEIPTEFWCVELRRLNEIFLSDHFALSGKGYFLLTRRLIFAMAATLMVYELVLINQMAGSEVQKSFCEGGVGSSKSIFS

SEQ ID NO: 36868 - DNA, 3060 bp, DROSOPHILA
ataaagtgtatagtaaaacaaaatcccttttacccagcgagcaagtggtggccacgatggtgatcatgttaatgtgctgcgccagggatctgcgctctttgggcaacttcagaggcggcaacttggcctccaccaactgccatgactgagctatttctggccactttctggccagttgaaaaaacgacaaagagataaggaatatggacaagtagaagaccagggtctccaccgaatcaaaattaaaggacacacttgtcacaaaggccaccatatatccagagctaacaccaaaaaacaggatggttaccagggcgtaataggatcgaacgctgaaccaggtgaaggttaggtcttctgcgaacttggagctcacttttcgaactggcatcaaagcaaagatctgcgcgattatgaggactgaaagaaactcgtataagaagtaaaaaaaaatgtagtaagcttaaaaacattaccaggcttgatggcttcctggaaagatccactgtacttataatcctcctgtctgatgcgaagaagccaagcttttactgaaagggttaaataaataataaatattttaaatactatgcaagataaacttactcaaggaaagcttaaatcgctttgtatctttttcaacgactctgtatttaatgattcccaaggtggcactggtaagtataagcaatccgattacaattaaaacaatctcaacaggatccacctactcgctgcccacgcgcgatcttcgccagaacttgatgcgagacatgcacctgcgtcgcttggcaggatccccagtggtcctggccatgttccgtactcgactgacaaccaatcccccgcagacatgtggcaagcccgcaaattttcactggtcaccgctaattgttggctcccatgccaattgtgtgcttatctgtgcataatcttgtgcaaatacgacgtagaaggacttatggcgcatatataaatgaaaatgaagtgctaagaggggctaagagaagaaaatgctcatggaggaaccgggtccgcggctgcaaatacttttctgcaccacggcaccttgcatttgccggaacagcaccagttcgtagcccattaaggcaccagccatctaaagggagaatgttcttaaagatattcacattctgttctggtactcactgcaaagatgagccttcgggttacgtaaaagtatcccattccgctgagtgcaaaggtttcattgcgaagcatttcgcttaaacgacccagttcatcgcaccatggactcgaacggacctcgtacagggtattcgatatatccttgatctcctggggaatcgaggaagcggctagcatcatgttcatcaatcgactgatcacatagagcaaacaaaaccagaagtatagctcatccataaaggctcctttgaccctatatattgttaaggagtgttttgaatatatggtatatacaataaaagcagttgggagctcactgaaaactatggtagacttgaacacaaatgaagtacatgttgtgggcacagcagaccagaatcagtccagacaactccttgtcgtagagcttcagcaggctatccagatccaaaaagtccgaacgtatttcctgccagaactccttggccatcggctttcccagattctgacgaatacgccagtgcagctgttgaaaacgaatcttcaagcctcgacacatgagaaacagaaaaatatcgccaaagttccacacaaaagtcatggccatggtgttccattcgataaagaacaccatccaggcgcggtattcaaaaaccgagaataactcctgacgctcgcgaaggaagtagttctccacgaatcccaccttcagattgcaatctcgaatctggacatagttactccaagccgcacttcccacataggtcaggtgctcacatagagcggccaccagaaggatcaatgcccatcgcctaagaaatcgggtgaaattgagtccttcctggttcgcatagcagggcttcagaaagattcgctcacatagcgctgtttcccggatgatatggggccatcgacgggacagttttataaaggatccgaaacaaaatatgcaaatcacactaaaactcaaagagcctgggagaataaatagtgggaaaacaacttggtatatatatatcttatatatatattatccaacatcttacccatggtatacagctgaaggccatcgttcagtacaatcttagttgagagcataaagtcagcgattacaaatgtgaatgccacgacgaaaaacagaatgtatggcgaaaaccagcgaaagcgaacattttccggcttgccattaggatttattccggccaggggtagtacgccaaaaatccgggctattatcagaactgcaagggcaagctgagagatctgatcaactgggaacctaactcaccatgcccaatggtataatgcagggtattctcctgcactgaccgctccatttgaagtccatgaacagacaaatggctcctcagcatggacgtgataattaagacacttgcgaccgaacgtttcagacacgcattgtattcatagatatcatctgacaggtgattgattgggtgcgattaaaaagtacagaaggtgcgacagaatgcaaatttcaaactagaactaggaaaatatgctcttggacgagccaacgccgccctcgcagaagctcttttgcacctcagatccagccatttggttgatgagcaccagttcgtagaccatcaaagtggcagccatctgtccagatattgagttgcttaaaatgcactagaatatgttatttctattgccaacttactgcaaatattaatcgtctagtcagcagaaagtatcccttgccactcagagcaaagtggtcggatagaaagatctcattcaggcgcctgagctccacgcaccaaaactcagtgggtatttcgtatagggtgtaggaaatctccttagcctcttgcggaatcgaggatgcagcgaacatcatgtttagtacgcgaatgatgacataagacaagcaaaaccagaaat

SEQ ID NO: 36869 - DNA, 783 bp, DROSOPHILA
atggccccatatcatccgggaaacagcgctatgcgatgggcattgatccttctggtggccgctctatgtgagcacctgacctatgtgggaagtgcggcttggagtaactatgtccagattcgagattgcaatctgaaggtgggattcgtggagaactacttccttcgcgagcgtcaggagttattctcggtttttgaataccgcgcctggatggtgttctttatcgaatggaacaccatggccatgacttttgtgtggaactttggcgatatttttctgtttctcatgtgtcgaggcttgaagattcgttttcaacagctgcactggcgtattcgtcagaatctgggaaagccgatggccaaggagttctggcaggaaatacgttcggactttttggatctggatagcctgctgaagctctacgacaaggagttgtctggactgattctggtctgctgtgcccacaacattcgattgatgaacatgatgctagccgcttcctcgattccccaggagatcaaggatatatcgaataccctgtacgaggtccgttcgagtccatggtgcgatgaactgggtcgtttaagcgaaatgcttcgcaatgaaacctttgcactcagcggaatgggatacttttacgtaacccgaaggctcatctttgcaatggctggtgccttaatgggctacgaactggtgctgttccggcaaatgcaaggtgccgtggtgcagaaaagtatttgcagccgcggacccggttcctccatgagcattttcttctcttag

SEQ ID NO: 36870 - protein, 260 aa, DROSOPHILA
MAPYHPGNSAMRWALILLVAALCEHLTYVGSAAWSNYVQIRDCNLKVGFVENYFLRERQELFSVFEYRAWMVFFIEWNTMAMTFVWNFGDIFLFLMCRGLKIRFQQLHWRIRQNLGKPMAKEFWQEIRSDFLDLDSLLKLYDKELSGLILVCCAHNIRLMNMMLAASSIPQEIKDISNTLYEVRSSPWCDELGRLSEMLRNETFALSGMGYFYVTRRLIFAMAGALMGYELVLFRQMQGAVVQKSICSRGPGSSMSIFFS

SEQ ID NO: 36871 - DNA, 5347 bp, DROSOPHILA
gaggaactgggcatgcacgtggtcgtggagaaggcagccattccggagaaggtcaagcaatacgacgccaagcggcactgaggccctgcgatgccccagacttgttaaacgcaaaacgctaatgcaaacttaacgcattcatgccacactcgctactcgagcctctgcattccccatcttcaataaggactgaggctaatcctccaaaccgatcgtttgcgctctctcgctatgctttaatttaagatctcaatctttgtgatactttatttttgccttctctcagccaagtcgaaatcccccccagcatttttctgtgtgaagcgtgaaggcgttcagcaaaacatcgaacaagtttttgtagttctttattggcagtcgtagaaatcgtattagacacagactcatatgtgttaggatcctatatatacacccacatacataatggtaccatgtagttatcgtgtagcttccgcttcatatattttatagaggaacatacatatgcaaccagaaaccaccaaacttccgaacatgttacctttcctttgtagtggcaaaaagaaaaaaaaaaaacacaaagttggaaacggagcaacacactaaactgaatctaaacataagtaattgaaaatctttagctgaattttgcatcttatatcgcatattgtatattccaagcgttccaaacacgacactttcgctgacacatgatggaccccatgccagtcgacagtaggtgccccatttatctcatccaccatcagagttagccgattagcctgtaagtgaaatagcgaccattctttgtggaatctacacacggacacacgtagaatctctctagcggataatgtgacgtacaattaggcaatgtaaccgattgatattaagagcgacattttgttggtttccttttaccgctttaaacaaacaataataataaagtgcaagatgattttttatttattacgcaataaaccttgtgaaaatcaaactcctatgagtaatagctctgatcgcagtcccacaggtcgttgtcctcatgaaattggatgagaacaagttcgtacgtgacgatggttccagccacctaagtaagtggatatcatactaaactatatgattacattcatatttgtgtagtcttacactcagcaccagcttccttgtgaggtggaaaaacttcatgccagtgagggccacctcatcgctgattacctcctccgtaaatcgtttcacctccggacaccaggactccttgggcacacagcgcagatatctcaaagtcagcctggattcatcatgaacactcgaggagtacagtgaaaccgccagagtgcgaccaattagaaagatgagcgagaagtaaaagtacacagcatgggccaccgatggcatagtgctgggaaggattatataaactgaacaactggatgttattaagtgcatgaactcacttcaagcttctcagcaactggacgcaaatgaaatacaagttgttggagaaggacaccattgttatgagtgatatggcatcgtccattttgtcgcacagtatgcatatatttctgtactgaatacgacgctctgaccagtaagatggagccatattctgcaagtggttattgcttttcataagggatttagttagcattgtcttaccattcctttaaagtttcgcaaatcatcgttgagctggcgaaacttcgaagccagtccaatgctcacaatcatcacgaacaggtccatgtagttccatatgaaggtcgaaaacacattctggaatttgccccacaaggccagagttgtggagtagctggtcacgaagaagatctcatcgttggtgcgcagaaagtagttctggatgggatcggcggtgcggttgcagaatgaggcgtagtttatggccgataccatgctcaggatatgctccgctgtggtggcattttgggtttgcttttggaatatatcttatatggtataatatttaccaaaggacagcatcattcccagcagcatgaccatggaaatggtatgacccatcttccacttggtcaactgtgtcttgtactgcggcagatccttctccaccgtgtgccagtacatcatcaactggggccactgcctagccagattaagagccactatcaagaccagcaggacagaaccccggaatataatgggcttaatactgttgaaactaatcggattgtttaacaccttaaacaacgacagtccaaagttagctaagctcgaggcgatgaaaagcagactgaaacaggtgcgtatgttgcgccaagagaagctcagatccgaaggatgtttgcccgtcacacccttgaccggcatcatggcaaagaactccgccactaggagcactctgcccaccgcctggtggaagcttccatcgctgaggaatgcctccttatcgctacgagacagctctgtttgatccaggactattacacttttttcacaataatagtttatgcataacttactgggcaaactattcctgatttcgtactcattctcaatctgatttttgtaggtctcacaactctcttgaaatgccttttttcgggcactaaaataaagttatataaccaaattttaaataataaaatacccatatccaacctctcgtgaaccaaatccaattttctgaacagtgatgtccgggttacccttttcttcagccgcctcaacttgcgctccagcttcggaagaatcttcatcctaggacctgctggggtaaactgctttaaaggattggcccagccaactgaattgtcacactgtgagtgcccaatgactattagaaacacctgttgttttgcacttatctataattaaggaccaacacagcaacaaagtatatattttgcggacttaaccccctgccacttccacaaaattcagttttcgaaacagccgggcaccttttcctcgccattgaattgcagcaaaatgagttcgtaggtcacaattgtgccggccacctagggatatagtatagtgctataattgaatattttgcaagcatttttgggtaaacaaaccgaaatgacaacgccgcgtgttagccgaaagaatttcatgccagtcagagccacattgtccatttggacctcctccgaaaagcgttttagctgcaaatttgtgagggattatccaaatttctggtattagcatatatatcatcctacctcatcgcaccaatattcccggggaaccaatcgaaagattaccagtggtcgcttggactcatcatttatactggagctgtacagggacaggatgagggtgcgaccaagtaggtagaccagcgagaaccagaagtacagggcatgccatatagacggcttggccctagaaaaatataggtacaaattcatacattaacatatagatataatgaaatattaaagaacctactgcatactctttaggatctttccgcagatgaagtacagattgttgctgaagcagagcaatgtaatggtggatatggcatcgtccacctcttcgcacagcttgcaaaggttgcgaaagttaatcctgcactgcatccaatagtccacagtggtgggctaagcaggttatcactcagattcattaagattctattggtctgatgcaaattcttaccaatctagcctccctcatcatgtagtcattaagctgacgaaagcgagcagccaaagctacgctaactgccatcacaaagatgtcgttaaagttccaggcgaaggtgctcagcacattgaccaccttgcccacaatgcccaggaagcgtgtgtagtccacgaagtagaagaccgaggagaagctcaagtacaggaaactgtctatgggacgatctggccatcggggacaggagttgacatagtagcccatggacaacatgctcataatgtgctccacttgaagagtaacaaacaaattaagtcataaagtgtatagtaaaacaaaatcccttttacccagcgagcaagtggtggccacgatggtgatcatgttaatgtgctgcgccagggatctgcgctctttgggcaacttcagaggcggcaacttggcctccaccaactgccatgactgagctatttctggccactttctggccagttgaaaaaacgacaaagagataaggaatatggacaagtagaagaccagggtctccaccgaatcaaaattaaaggacacacttgtcacaaaggccaccatatatccagagctaacaccaaaaaacaggatggttaccagggcgtaataggatcgaacgctgaaccaggtgaaggttaggtcttctgcgaacttggagctcacttttcgaactggcatcaaagcaaagatctgcgcgattatgaggactgaaagaaactcgtataagaagtaaaaaaaaatgtagtaagcttaaaaacattaccaggcttgatggcttcctggaaagatccactgtacttataatcctcctgtctgatgcgaagaagccaagcttttactgaaagggttaaataaataataaatattttaaatactatgcaagataaacttactcaaggaaagcttaaatcgctttgtatctttttcaacgactctgtatttaatgattcccaaggtggcactggtaagtataagcaatccgattacaattaaaacaatctcaacaggatccacctactcgctgcccacgcgcgatcttcgccagaacttgatgcgagacatgcacctgcgtcgcttggcaggatccccagtggtcctggccatgttccgtactcgactgacaaccaatcccccgcagacatgtggcaagcccgcaaattttcactggtcaccgctaattgttggctcccatgccaattgtgtgcttatctgtgcataatcttgtgcaaatacgacgtagaaggacttatggcgcatatataaatgaaaatgaagtgctaagaggggctaagagaagaaaatgctcatggaggaaccgggtccgcggctgcaaatacttttctgcaccacggcaccttgcatttgccggaacagcaccagttcgtagcccattaaggcaccagccatctaaagggagaatgttcttaaagatattcacattctgttctggtactcactgcaaagatgagccttcgggttacgtaaaagtatcccattccgctgagtgcaaaggtttcattgcgaagcatttcgcttaaacgacccagttcatcgcaccatggactcgaacggacctcgtacagggtattcgatatatccttgatctcctggggaatcgaggaagcggctagcatcatgttcatcaatcgactgatcacatagagcaaacaaaaccaga

SEQ ID NO: 36872 - DNA, 2454 bp, DROSOPHILA
atgccagttcgaaaagtgagctccaagttcgcagaagacctaaccttcacctggttcagcgttcgatcctattacgccctggtaaccatcctgttttttggtgttagctctggatatatggtggcctttgtgacaagtgtgtcctttaattttgattcggtggagaccctggtcttctacttgtccatattccttatctctttgtcgttttttcaactggccagaaagtggccagaaatagctcagtcatggcagttggtggaggccaagttgccgcctctgaagttgcccaaagagcgcagatccctggcgcagcacattaacatgatcaccatcgtggccaccacttgctcgctggtggagcacattatgagcatgttgtccatgggctactatgtcaactcctgtccccgatggccagatcgtcccatagacagtttcctgtacttgagcttctcctcggtcttctacttcgtggactacacacgcttcctgggcattgtgggcaaggtggtcaatgtgctgagcaccttcgcctggaactttaacgacatctttgtgatggcagttagcgtagctttggctgctcgctttcgtcagcttaatgactacatgatgagggaggctagattgcccaccactgtggactattggatgcagtgcaggattaactttcgcaacctttgcaagctgtgcgaagaggtggacgatgccatatccaccattacattgctctgcttcagcaacaatctgtacttcatctgcggaaagatcctaaagagtatgcaggccaagccgtctatatggcatgccctgtacttctggttctcgctggtctacctacttggtcgcaccctcatcctgtccctgtacagctccagtataaatgatgagtccaagcgaccactggtaatctttcgattggttccccgggaatattggtgcgatgagctaaaacgcttttcggaggaggtccaaatggacaatgtggctctgactggcatgaaattctttcggctaacacgcggcgttgtcatttcggtggccggcacaattgtgacctacgaactcattttgctgcaattcaatggcgaggaaaaggtgcccggctgtcctaggatgaagattcttccgaagctggagcgcaagttgaggcggctgaagaaaagggtaacccggacatcactgttcagaaaattggatttggttcacgagaggttggatatggagctgtctcgtagcgataaggaggcattcctcagcgatggaagcttccaccaggcggtgggcagagtgctcctagtggcggagttctttgccatgatgccggtcaagggtgtgacgggcaaacatccttcggatctgagcttctcttggcgcaacatacgcacctgtttcagtctgcttttcatcgcctcgagcttagctaactttggactgtcgttgtttaaggtgttaaacaatccgattagtttcaacagtattaagcccattatattccggggttctgtcctgctggtcttgatagtggctcttaatctggctaggcagtggccccagttgatgatgtactggcacacggtggagaaggatctgccgcagtacaagacacagttgaccaagtggaagatgggtcataccatttccatggtcatgctgctgggaatgatgctgtcctttgcggagcatatcctgagcatggtatcggccataaactacgcctcattctgcaaccgcaccgccgatcccatccagaactactttctgcgcaccaacgatgagatcttcttcgtgaccagctactccacaactctggccttgtggggcaaattccagaatgtgttttcgaccttcatatggaactacatggacctgttcgtgatgattgtgagcattggactggcttcgaagtttcgccagctcaacgatgatttgcgaaactttaaaggaatgaatatggctccatcttactggtcagagcgtcgtattcagtacagaaatatatgcatactgtgcgacaaaatggacgatgccatatcactcataacaatggtgtccttctccaacaacttgtatttcatttgcgtccagttgctgagaagcttgaacactatgccatcggtggcccatgctgtgtacttttacttctcgctcatctttctaattggtcgcactctggcggtttcactgtactcctcgagtgttcatgatgaatccaggctgactttgagatatctgcgctgtgtgcccaaggagtcctggtgtccggaggtgaaacgatttacggaggaggtaatcagcgatgaggtggccctcactggcatgaagtttttccacctcacaaggaagctggtgctgagtgtggctggaaccatcgtcacgtacgaacttgttctcatccaatttcatgaggacaacgacctgtgggactgcgatcagagctattactcatag

SEQ ID NO: 36873 - protein, 817 aa, DROSOPHILA
MPVRKVSSKFAEDLTFTWFSVRSYYALVTILFFGVSSGYMVAFVTSVSFNFDSVETLVFYLSIFLISLSFFQLARKWPEIAQSWQLVEAKLPPLKLPKERRSLAQHINMITIVATTCSLVEHIMSMLSMGYYVNSCPRWPDRPIDSFLYLSFSSVFYFVDYTRFLGIVGKVVNVLSTFAWNFNDIFVMAVSVALAARFRQLNDYMMREARLPTTVDYWMQCRINFRNLCKLCEEVDDAISTITLLCFSNNLYFICGKILKSMQAKPSIWHALYFWFSLVYLLGRTLILSLYSSSINDESKRPLVIFRLVPREYWCDELKRFSEEVQMDNVALTGMKFFRLTRGVVISVAGTIVTYELILLQFNGEEKVPGCPRMKILPKLERKLRRLKKRVTRTSLFRKLDLVHERLDMELSRSDKEAFLSDGSFHQAVGRVLLVAEFFAMMPVKGVTGKHPSDLSFSWRNIRTCFSLLFIASSLANFGLSLFKVLNNPISFNSIKPIIFRGSVLLVLIVALNLARQWPQLMMYWHTVEKDLPQYKTQLTKWKMGHTISMVMLLGMMLSFAEHILSMVSAINYASFCNRTADPIQNYFLRTNDEIFFVTSYSTTLALWGKFQNVFSTFIWNYMDLFVMIVSIGLASKFRQLNDDLRNFKGMNMAPSYWSERRIQYRNICILCDKMDDAISLITMVSFSNNLYFICVQLLRSLNTMPSVAHAVYFYFSLIFLIGRTLAVSLYSSSVHDESRLTLRYLRCVPKESWCPEVKRFTEEVISDEVALTGMKFFHLTRKLVLSVAGTIVTYELVLIQFHEDNDLWDCDQSYYS

SEQ ID NO: 36874 - DNA, 3597 bp, DROSOPHILA
attatggtaactatggtttacagctttatgtatatatatatattcatatatatatatatatgatgtatacgggtctggtagatccagtatagcccgtctgagtttctgatttgcaatcgcaactcattttgtggatatatatatagaccaattacatgtgttattcgttagtaagtacaagtatatattttataaatgttgcttttgcgtttaagggccgtaaccaacactaaactcttggttggcactttggcctaattgcgacactcctaattgatgctgatttgaaatatctcaatgctttagattcgccaataacttgtaagccaaaacaaaggaaattctttagataccaacttgtttttgcctcgtggtaaattgatatgctgattccatcgaaccaaggtgtattccaaataaatgtgattgggtgtttttttttttgttttttgattttgggtagtgtttaccgcacgatatgttgtgtacattgatattaattggttgttcatcttcatatatctcttcttgtgtctcctcagtccaattccttgaccaatcacctaaatacgggttgtgtccgtcccggggatttcggatgccttttgggagggcatcctcatcctccgaggcgacgcactggaagccctgcgtgattctgctgtttctcgagtgtggggggtaaagtccccccccttgcttactctatagcttttctatagttagttgtaattgaaattagttacaaattaattgattcgcatagggaattttttttgtttgcttgctcctcctcctcatcgtatattcttctctatgtattatttatattgaattgtttgattttttttttgatttttctatagtttttgtttttatctctttacagtatttaactaaactttcgtaacacgttttccgatatagattatatatgggagatactttttcatgacaacaatagcactaactgaagttcaaaaacgaagaacaacaaaacatcagataatcagataattctcgatccatatatatggttttgtgatttagcgcctccatcgggagcgatcccctcaggaaggtggggatcgctcagctgaagaacggcgataaatcacagttgcacaaagacccgccatcgccagtcttgcagagcaccttgcacacttcgtcccagtccggtgccggagtggttgtgtccgtttccgaggcggctgccacggtagctgcggacactgttgcttcctcgaccgatcctctccgttcggcattctccgcggctctggaaccgtgtgttggatcgcccagcactccactggccttctcctcgtcctttcgaacctcctcctgcttctcctcctcctgcttccgctccttcatcaccctcatcctgcgcacctcctgctggcagggactgcatccgggcagggagcgacccatctgaccacaaaagctcgagcagaccaagtcgcccgctttagctggaagtaaataagtgcatttgattagtatgtttatttttcaaaaagcaaattaaccttaagttcgaccataataatcattaaagtataatattttgaatagagtttcaatatattattttccacttacccctaggcagtccacacagttgccggcacttggccacatccgtctccggtctcaggattgtgtttttggccacatcaggcgttgaagcaacgcccaggccagctctgcaaggatcaaccataaaatgctgattaaattgcaatgcagagtaaattaaaaaaaaaaaagatttaagatgacagtatatgacactcgcattaccaagttaagaaccatgatatatgcataattgttattgaaactaggtttacagataacatagttttaaatagcacaaatgatctaggaaaatctcgacttgataaactgttttttttttttgtaaaaaatatatttatttcaaaacatttttaaatagtattaaacaccaaattaaaaaataatgcagagtatattttaaatataaacgcaagccaaaatgttctaattaataatatttgtaaattatatatcgtaaaattgtgaaataattttgattagctttgacccgacatttagaatttattttttaaagcctattcaattttttaagtgagcacagtacttctggcgacttcgagtgccatttatacttaacatatttggcacttgacaaactactgcacacacgccacaaaagtcgagtcacgaatcattgatatagccaccgatcatcaggaatgcggattatatttccctgacacacgcgattgtgggaaaacctcgatggaagccacttgaaaggccgacgcgatttgcaaatgatttctcaaggccaacattttagttggtaaatgtgtcgtattattatcattattagtttgcacttttttttgtgttggggggaaacctgcacttgccaacaataaacacttgagtcactttgcgccgaggcaccttactttcagtaattcctagagttttcgattgctgtttatccgaaacttacccgcagagctctttacacagcaaactccaatcctgaactgcgctgatggtttggacgtcttcaaggattttggctgctgaatgcgctgccgtcggagcagcatcccccaaagtgtcgtccttcaggacgggcgatgacgtcacagcctgcgcctgcgcagccaggatgaggattgtgaccaatggtatgacgagctgtaatccacatccccccatttttctctgtcgcttttcaacacgctctcccatcgctgggctgaaaagagatgggtagattacggaactgggggatgggtttttcacgctggtttggggcgtattatcctccagggaggactgggccaaaatggagactgtttggccccgtacaataggagcaattgtgctcgaaatgcaattatcgcgctctcaaaaataggcagcaaaaagcagcgtttggggtacttgcctgcggggcctaatccttacaccattgttatcccgagcatttgctatccgaatatcattcgcttgatttgccaaaccgaaaggggttatgcaatcgcctgtctttcgaacgcaactgagactcccacctggcatcctggcattctggcatcctgacaacgcttttgcaacgggattctcgtcgaaaatacctcacataaatgcctcagctaaccaacctgctggaatcttattttgtcagcgtaatgacaggctaaacagtcgaaattcccaaactcccatttgttttccacgggcaacgaaaaatgttcatggcccccggggtgcggagcattccctggcccactgtgcttctgatgcctctggctggcagttgagagtcgagtgccaaagaggacgcttcgccctggccagaaacgcccggtctgaattagccgcccgagaatagcagacccaagctcccagctccatccgcatccgtgggtggcacttgactccaaacattttcgcctatctgggttacagggcctacttgcgctacgtgcaatcacagccaggtgagcatcctattttctggtcgagagctcatctcattgttcaattccattcgct

SEQ ID NO: 36875 - DNA, 643 bp, DROSOPHILA
acgtccaaaccatcagcgcagttcaggattggagtttgctgtgtaaagagctctgcggagctggcctgggcgttgcttcaacgcctgatgtggccaaaaacacaatcctgagaccggagacggatgtggccaagtgccggcaactgtgtggactgcctagggctaaagcgggcgacttggtctgctcgagcttttgtggtcagatgggtcgctccctgcccggatgcagtccctgccagcaggaggtgcgcaggatgagggtgatgaaggagcggaagcaggaggaggagaagcaggaggaggttcgaaaggacgaggagaaggccagtggagtgctgggcgatccaacacacggttccagagccgcggagaatgccgaacggagaggatcggtcgaggaagcaacagtgtccgcagctaccgtggcagccgcctcggaaacggacacaaccactccggcaccggactgggacgaagtgtgcaaggtgctctgcaagactggcgatggcgggtctttgtgcaactgtgatttatcgccgttcttcagctgagcgatccccaccttcctgaggggatcgctcccgatggaggcgctaaatcacaaaaccatatatatggatcgagaattatctgattatctgat

SEQ ID NO: 36876 - protein, 115 aa, DROSOPHILA
MGRSLPGCSPCQQEVRRMRVMKERKQEEEKQEEVRKDEEKASGVLGDPTHGSRAAENAERRGSVEEATVSAATVAAASETDTTTPAPDWDEVCKVLCKTGDGGSLCNCDLSPFFS

SEQ ID NO: 36877 - DNA, 3051 bp, DROSOPHILA
gtgatgggacctcgtcattgtcggcctctgtgatgaatcactactcgggctaccatcgcaggcccataaatagggtgagttttacgagtatagccaaaaggccaccattgataaagttgacctatagctgaatcgcatcccgctttcgcagaattcaaatattctctccgccgcgctgtgtttggtgaaggagttagactacgccagtctggaggttctggagcacgctgtgcggtgtcgcattgatgagctggcgaacgaatgatgaagacgactctctaatcgcatgtcgattagctaatccaacgcctcagcggcgttgcaaaatacaaatgaccaggaaaactgaacacacataaaagacaagacacgagcagctgtaggggttgcgagaggaaaggggaaaactgatattatactaacgtcttaagcaacaattaacaattacaaatcagatacttaacgaggataaggattcatacttgccaattgaaaactgtcatagtgtaactagcaacttttgtaagcattttgttatgtaacgaactttgctattgtaaacacataacgaaacagtaagctagaacataatccgcctattgatcccagatcctgttcatttgatacccaatcaatcccaagcacagaccacaaaaactagccctttttttgtacttaactcgagaagatcgactagcgaactaatgtcgcccaaggcgaaggagcacaatgtatcttcctagattcttaataagattagttgaaatcatactcatgactttgttaaatatttgtacgcaaaagcaaataacgctaaaccttaattttaatatatttacctaaaatgcaatgaacacgtccagtttatgtttgccgttctctttttaacgattacgttggaaactaaaatgcaaaaaataaacaaattaacagaagatggcctctttcgaggagtattattattttaatgtattattaatgcttaatgtaatgtaaaagcttattcctgtttatagttcgatggtaactgaccagcagcgaatggaacactgttggagttctgggccatgtgctcatagatccaatcccgaaacatttcaacatttgtgtagactgctggaacgttttcctcttgacagccgatgccccagttaacgatgccagcctgctcatagcgcgatgggtccgcctccatggggcagaatagagcggatcctccgtcgccgaggcagtctcccgcatccttctcgccgccggcgcatatcagactagcaggcagatcaaacgagacgcccaatctggtgtttctcaactgatcctggcactgcgccctgttaatcatcggcagttcgattttcttttggatatttgagtaattttcatcgttgaatgccacctttccccatccggtcaccaagcagcgcttctgatcgaaggaccttccctggctgggcaagcagatggttcggatgtggcttttcaactcaaatgggttggctaggaacagaagggcaatgttattggctcccaataaatacgaaaactccctgtgttgcacaactctggccaccggacgatcctccgacggtaggaattcactgcgttgtcccgtattccattcgcctgctctcaccacaatttccgcatcagtcttgcccaccacaatgctagccgctgtaaggactacttctggggcaatcaaagaaccggccccaaagtattttccctgactgaaaagggcaaccacccatggaaattggccaggtgtggagtaatctttgggcaccttcacattggccaccaagccatttggattgctcatgccgcaaacttgatttgggtctggttgaagattttccgtgaatgacattccgttgaatattccaggtgcctacaattttttttttaattgaattgaataaaatattgattaaatatttcaaaaaatattatatactcctccttcattttgcccagtcgcactacaaagaaacgaaaccaaaaggaacgtatttattgtccagttcttgagcatggtttgcttgagctcacaaattccaaacgactaaaagtcagaagctgcgacacttttaaaaattcgacgggaatcatgcttatcagtcactgttgatagtatacatactaagctttatatattttctaaaagagagcgaataatatctacgaaaaatatacgcatgcactcctatgggaaataattaatatatgtatgtaggtacctaagaaataagcaatcaatttttttgttatacacatatagataagaatgtagacagcgcgccctgatttgaaatactgtttaaagcagctcaagcggttatgcactgcttgccacggttgaagcagtgaaacggttcctcaagcttacgtggtaaagcagtgtattcaaattgtacgttacgttagttcttgttattcaaattaaatgaaaactcggggtatttgtaaaaaatgtaataaaattaataaaataaaaaattgaattgcatatttattgagccccttagccatcccaataaaacacaggctttcttgtttttttttttgtttagaggggctttacaacatttaacgtatataagataataattgcctttatttggttgtgtagttgctgttatggttatctgttgtgaaattgcctttaaatctatttttctgtgttattttaaccatagccccagacattaccgactaagataatgcctggccattggataaaactaaagaaacgaaactgcgaaacggcataatcggttcgaaacggttttcgactcggtattcgtaattgatgatgatgtgtctgttggttataaatatatatatatatgtatatatatattattgaattatggatattattccggcataatccgtgtgatcggttcgctagtcgctgtattcatggcagaaacgcaacgcctaacacatatacatatacataaatgtaaagtgcatttcgtatattaattactgagtgattaacttgctacacatcgatatacatactgaagccgcattaggttatca

SEQ ID NO: 36878 - DNA, 985 bp, DROSOPHILA
tgagctcaagcaaaccatgctcaagaactggacaataaatacgttccttttggtttcgtttctttgtagtgcgactgggcaaaatgaaggaggagcacctggaatattcaacggaatgtcattcacggaaaatcttcaaccagacccaaatcaagtttgcggcatgagcaatccaaatggcttggtggccaatgtgaaggtgcccaaagattactccacacctggccaatttccatgggtggttgcccttttcagtcagggaaaatactttggggccggttctttgattgccccagaagtagtccttacagcggctagcattgtggtgggcaagactgatgcggaaattgtggtgagagcaggcgaatggaatacgggacaacgcagtgaattcctaccgtcggaggatcgtccggtggccagagttgtgcaacacagggagttttcgtatttattgggagccaataacattgcccttctgttcctagccaacccatttgagttgaaaagccacatccgaaccatctgcttgcccagccagggaaggtccttcgatcagaagcgctgcttggtgaccggatggggaaaggtggcattcaacgatgaaaattactcaaatatccaaaagaaaatcgaactgccgatgattaacagggcgcagtgccaggatcagttgagaaacaccagattgggcgtctcgtttgatctgcctgctagtctgatatgcgccggcggcgagaaggatgcgggagactgcctcggcgacggaggatccgctctattctgccccatggaggcggacccatcgcgctatgagcaggctggcatcgttaactggggcatcggctgtcaagaggaaaacgttccagcagtctacacaaatgttgaaatgtttcgggattggatctatgagcacatggcccagaactccaacagtgttccattcgctgctggtcagttaccatcgaactataaacaggaataa

SEQ ID NO: 36879 - protein, 273 aa, DROSOPHILA
MSNPNGLVANVKVPKDYSTPGQFPWVVALFSQGKYFGAGSLIAPEVVLTAASIVVGKTDAEIVVRAGEWNTGQRSEFLPSEDRPVARVVQHREFSYLLGANNIALLFLANPFELKSHIRTICLPSQGRSFDQKRCLVTGWGKVAFNDENYSNIQKKIELPMINRAQCQDQLRNTRLGVSFDLPASLICAGGEKDAGDCLGDGGSALFCPMEADPSRYEQAGIVNWGIGCQEENVPAVYTNVEMFRDWIYEHMAQNSNSVPFAAGQLPSNYKQE

SEQ ID NO: 36880 - DNA, 4974 bp, DROSOPHILA
acttacgactgtagcaaatattaaaatgcatttttttttttttttgattatagataatacttggaagtggtatttatttgtcatgcgctattcatatctggcattttccttattaagagtcaccccgttaaattaaatcaaattgaagatttcgccagccattgcgtgagaagttgccccattccgaggcacatacgtagctttgggtcgcggccatcaatcaatggcgtagcacggcacgcctataatctcgaatccccatatatacccactgtacaacgccgtggtgcgcttatcaatccaattgagtgcgctgttattaataacaatacccgtgctttatattaaacgcgttgactgttgcatcaacgcccctcagaagcacacagcgcgtcaataaaagttggatgagtaatcccagtggactcgggttaccaactgccagtggaatgcatatgtaaaaacaaacaagccagccaccatttacggtcattaaaaacatataaaataatttattctgcttattaatttgtttaataaatatacaatatataaaactgcgggttagtcgcgcaagtccgcacaagtgtggtaaaaaatggacttaagtagtgtaactttaacgctgtgttagaaacagacaacacagagaacacaggacattgacttggacttgttttgggttaagattgctctggcgaaggcacaacatcgttatcataatcgttatcagcgtggtgattgttattagtctagaattccatttccattaacacttatacacgaacgctttcgatttgggtgggttgactgactgggttgattaaaaatgtaggtaatcgttggacaacttcttggacaacttggacaacacaaatttaagagacttatacttataaagttaattatttttttttttaggtaaatgccgacaaaagaaaaccaacttctggtgtcggacactagtccgtcaaagttgtttacaaaatatatacgtatttaggttgataaaccgaacagaaaaaaaacattgagaaactaacaactagagttacgaagaagttgcttggtgtggtccacagattaccagtcaacccataaatcaacgcaccctacattaggtaaatatatgtagataaaactgtagaacatgcgacgaggtttgtgcttggcactcaagactccagtccaatgctccagactgcgccaatccgtttacgaccagccgcccgtcagcttgtggaacatctcctcgttcagcgtctggttgttctccttggatcgcatggacatgaatatgtagccgccgatgaactcgtgcaccaccttacagtcggccgactgcacggagaagacgatgttctcgtcctgcagctgaatcatcatgcacttgatgccccagttaacattccaggccttcattgtgttgtagcgccaggtctttatgtgatcgccggtgttgaggtccatgcgcatgatacgattgttggccacgcccaacagctcctccttcttgtgtccatcgaacttgatgatgaagagagtaacaccgaagtctggtagagattgccaagcctggatgtacttcatcttggcgtccattaagctcagctggcgaacgttggcatgggcctctaggatcctctgcaccgccttgctggatagtttgcgcatcattttgggcgataggtaatccatgggctcaacacttcgcgggttgacggtgagcggagctccctgggcgggtttctgcatctgcagcagcgagcgaatactgctaacttcgctgtcgtaagagctatcggctagagagcgacccttggcggccagacgacaggctgccatccacttggcgtactgctcttcgttgtcgcatctcacccagacctcactgttcggaccatttctgatctctgacggaacttccagacggatggcgaactttccttgggccaggttaacatcgggcgtcacctcgcagcccttcaaattgatgctgatggtgggagctccccgcctggactcatcctgcgatttgtaaaggtgcagatgcagatccctgtaggtgaagaagtagcgcttgtatcctttaagggtgaacctttgaggcttgaggaatttcaaatagtccgacagctctggtatcctggtgatgttgccctgatccttgccacctcctggtccttcgagtgtgatctgcagctcgttgagagcggagtcaatgtcgtcctcgccgccagtctcctgactggaggtatctattccggaatcgatgcctgggggatgcagatccgtctgatgattcacctggaactgcagggcggcaaacatgagggtctcctcctcggtgggttccaattcctcgttcaaaatgctccatttggcttgctcgtacagttgattgatcctcacttggtcgtacttggggttcagatcgaagaacgtgaagtatttgaagcgcaggcacagagtgtcatactccctaactccctgctccatgatggaaagggacgagtccaaccatcccacgttgagacgggctttctccacccgggacttgggtcgaaccaagcgtgctcgtacatccggactgggcgaccttggcgacatggccagattctcctggaggtctccgaaactagagttggaatcgtagctagcatagccagtggagttgtgcttccaggtgcccgtgggcgagctgatgggtgttcccggagcagtggctgcccgtcgggtatacggtgaagccggagcgcacagcagattgccattgtgcgagcgatccaggctgccattgctaccgttataggctcctgtgatcgggacaaaggagttggtgtccagcgctggctgcacgtatgcgattccatttgcctccgccaccggaatctttcgctgcggcagcttggagaagttcttcttcagatgctccggttccaggggcttgcagaaagacagttcctccggatagcgaatgtccaggtccttgcacaagctcacaacggctccgaaagttttggccgaaaagttgacgcggtagtccagataacgaagatcgggcatctgcaccctcagtgtcttgtgcatgggcgtgaagtgcagaaaggaatccgattgaactccggcctggtccaaagtggaccgcgtcctggtcagccagatattcttggcgggccaccacagggcgtgatcggaccaatccttgggcaactccggatccaccaggttcagcattacgccgccaatgtgctggtcacccttcacgcgcagcgtcttctccacctgcagatccgtgatgaggatccgcaggttccacgtattttcgcccacatgaatcatctttcgctaaaagttccgatgcgcgggcgtctcttctgtccaaaggcgaaactataactgcgggtatatttgtatagtgtatatatatggcacaatcagagtctaaatttgccctcgaaacgatgacgtaattcaacttacgttcagcaccgtttttgcaaccaagtttttgttgttcttgtcgttgtcgttggctggcggggagcggagagggggggactgcgactgtggcggtggcgaaactatataggcccttatctcgccagatgtttgcacggaaacagaaacgccagcgaaacagacccaacaatccaacaagccgagtaatccagatcaaaatcgttggatgtagagatggtggtggtatgtatgatgataaaagggggggagaggcggggatgtacggatcacttgattaacacacgcccaaggttacgattttgatggcttgcttgctgctgcttgggatgttttgttttcccgatctctctagcaatcgcaattcgcagcgttttcctcgctcttttcctcgcacatcaacacaccgacgaacactaatgcacgcgctcaaaaatgcgatgcaaattttcacaaaacaacacgtcgcgggcgacgagacaaagcgaacgagccgagatagagagaaattaatttataaataaaccagcagcagagcagtatgaccgtttgtctgcgcatatcgatggttcgcgccagcgaaatcgaacttatcggaacggatggtaagaagtatagtttaaattttgttaaaaattacatcgaaaattaagcaataccatttaccgttaattctcgtgcttagttttttgttattaaacttactgcaagagatattaaccaccatacattcttataaattctactttcacaattgaaccgtggatagggcatacctaatacattagattcgcatgatttaatataattcgtattcgacttgaaacgaatttgtgtatggcaatctattgtattgtatcaattgtattgtatcataatatcggacaggcaaagaacaatgaagtcgtggagattggcactattgttcctcatttatttcttcgaattggcttattccatacgtacctgtggcccaggacgagaaaggaactgtcatattaatactaagcaaaaatatcaaaggccgaaacattattaacgtaaccacatgttaacagtaagcacatattttaaaatgagggtacaaatatgaaaagtgtatcgatatttatttttttccagaaatgggggtcacaccggcccaatggtcatctctaagttatcgtaacgaaaaatatagttctgttgttttaataattttagtagaaagcaaatctgctattatgaatatcaatttaaattaacgcatgttccagttaactaatttgttataaagcaaaagtacatgcatatataaaaacaatactggtttttctcctcctctctcgctgtttcgctctttccgctctttttctccacaccgcattcgtaaacaaagacaatgaaagctccagttgaacggctaaagaggcctcaaagcccccagattgtttttcgccgttgagccgagcgcacgtattcgaaaaaacaactaatagtgtataatagtgcagt

SEQ ID NO: 36881 - DNA, 2974 bp, DROSOPHILA
gctcgttcgctttgtctcgtcgcccgcgacgtgttgttttgtgaaaatttgcatcgcatttttgagcgcgtgcattagtgttcgtcggtgtgttgatgtgcgaggaaaagagcgaggaaaacgctgcgaattgcgattgctagagagatcgggaaaacaaaacatcccaagcagcagcaagcaagccatcaaaatcgtaaccttgggcgtgtgttaatcaagtgatccgtacatccccgcctctcccccccttttatcatcatacataccaccaccatctctacatccaacgattttgatctggattactcggcttgttggattgttgggtctgtttcgctggcgtttctgtttccgtgcaaacatctggcgagataagggcctatatagtttcgccaccgccacagtcgcagtccccccctctccgctccccgccagccaacgacaacgacaagaacaacaaaaacttggttgcaaaaacggtgctgaacgtaagttgaattacgtcatcgtttcgagggcaaatttagactctgattgtgccatatatatacactatacaaatatacccgcagttatagtttcgcctttggacagaagagacgcccgcgcatcggaacttttagcgaaagatgattcatgtgggcgaaaatacgtggaacctgcggatcctcatcacggatctgcaggtggagaagacgctgcgcgtgaagggtgaccagcacattggcggcgtaatgctgaacctggtggatccggagttgcccaaggattggtccgatcacgccctgtggtggcccgccaagaatatctggctgaccaggacgcggtccactttggaccaggccggagttcaatcggattcctttctgcacttcacgcccatgcacaagacactgagggtgcagatgcccgatcttcgttatctggactaccgcgtcaacttttcggccaaaactttcggagccgttgtgagcttgtgcaaggacctggacattcgctatccggaggaactgtctttctgcaagcccctggaaccggagcatctgaagaagaacttctccaagctgccgcagcgaaagattccggtggcggaggcaaatggaatcgcatacgtgcagccagcgctggacaccaactcctttgtcccgatcacaggagcctataacggtagcaatggcagcctggatcgctcgcacaatggcaatctgctgtgcgctccggcttcaccgtatacccgacgggcagccactgctccgggaacacccatcagctcgcccacgggcacctggaagcacaactccactggctatgctagctacgattccaactctagtttcggagacctccaggagaatctggccatgtcgccaaggtcgcccagtccggatgtacgagcacgcttggttcgacccaagtcccgggtggagaaagcccgtctcaacgtgggatggttggactcgtccctttccatcatggagcagggagttagggagtatgacactctgtgcctgcgcttcaaatacttcacgttcttcgatctgaaccccaagtacgaccaagtgaggatcaatcaactgtacgagcaagccaaatggagcattttgaacgaggaattggaacccaccgaggaggagaccctcatgtttgccgccctgcagttccaggtgaatcatcagacggatctgcatcccccaggcatcgattccggaatagatacctccagtcaggagactggcggcgaggacgacattgactccgctctcaacgagctgcagatcacactcgaaggaccaggaggtggcaaggatcagggcaacatcaccaggataccagagctgtcggactatttgaaattcctcaagcctcaaaggttcacccttaaaggatacaagcgctacttcttcacctacagggatctgcatctgcacctttacaaatcgcaggatgagtccaggcggggagctcccaccatcagcatcaatttgaagggctgcgaggtgacgcccgatgttaacctggcccaaggaaagttcgccatccgtctggaagttccgtcagagatcagaaatggtccgaacagtgaggtctgggtgagatgcgacaacgaagagcagtacgccaagtggatggcagcctgtcgtctggccgccaagggtcgctctctagccgatagctcttacgacagcgaagttagcagtattcgctcgctgctgcagatgcagaaacccgcccagggagctccgctcaccgtcaacccgcgaagtgttgagcccatggattacctatcgcccaaaatgatgcgcaaactatccagcaaggcggtgcagaggatcctagaggcccatgccaacgttcgccagctgagcttaatggacgccaagatgaagtacatccaggcttggcaatctctaccagacttcggtgttactctcttcatcatcaagttcgatggacacaagaaggaggagctgttgggcgtggccaacaatcgtatcatgcgcatggacctcaacaccggcgatcacataaagacctggcgctacaacacaatgaaggcctggaatgttaactggggcatcaagtgcatgatgattcagctgcaggacgagaacatcgtcttctccgtgcagtcggccgactgtaaggtggtgcacgagttcatcggcggctacatattcatgtccatgcgatccaaggagaacaaccagacgctgaacgaggagatgttccacaagctgacgggcggctggtcgtaaacggattggcgcagtctggagcattggactggagtcttgagtgccaagcacaaacctcgtcgcatgttctacagttttatctacatatatttacctaatgtagggtgcgttgatttatgggttgactggtaatctgtggaccacaccaagcaacttcttcgtaactctagttgttagtttctcaatgttttttttctgttcggtttatcaaccta

SEQ ID NO: 36882 - protein, 708 aa, DROSOPHILA; identical to SEQ ID NO: 28470

SEQ ID NO: 36883 - DNA, 7957 bp, DROSOPHILA
atgttttgcttttgcataggcctccaacttcaacaagccatcgattggccccaaggaggccgacaagaatgtgaggaacttcagcgacgagcagctgcgcgccggcgccaacgtcatctccctgcagtacggatcgaacaagggcgccacccagtcgggcatcaacttcggcaacacccggcacatgtagatcggtgtcctgcagccaggatcctccgccccacacatcgctctcagacattccgcaacgaaagaccaaaccaaaacgccaacatcttacgacgcagccgcttttgggttccacacacttttcacgttttgagctagatttgggtagagcccctgaatgatatgatatcagatggatatggatatatatttatgataccaatttgtatttgtattccaattgaccaggcgtatgctgttatgtaataacataaactactttaatttaatattattaagtactcgtacatacggatcttaggatgatttattctattttcaacatttgcattcgcaacacgatcgttttgcatactttcgttctatataaaccgcactcagcttcatccttgtgccatcgaagacagttggagatggagtcaccatgcagagtgggataataagtgatccacggatcgaaatcgaaatgaattgtgtttgatgaatgtgtcttctatctcgtagagtaacgattacaatgttgtttcgaactaaccacctgaataccaatcaaaaacgcagagcatttacaataatgtatttacaggcagagcaaatatatacatacatacgtgttacacacttttgaatgatctattttaaataatgtcccctgttgaaaataaataattattcttttaacacatattgcttgtatcttgagacggaaaaatgttgggttttatctttattatttctggtttctatttccatttagcagtcgagttagtgtaacttacctttttggttgcaaattaaaaaaagtgccgtgttttgtaacaatttcatataatttattcgataaacaaatgaattgttgcatacgtttgacatttttgaccttaaccggccgaagcgaaccgaggtcttcattcgaaagattcaatttcgagtgtgaataaaatattcggggcatctcagaaaatgcggacatcgaataacaattataaaataattttatacgatcgcttacattaaatagaacaaattgtacagtcgttgacaatgtgtttgcattcgcgcattcacctaggagtattttgataaagattcgatacatcgttagctaagtttaaaagaatattcagcacgtaaaactaaagcaattacattcgaggcggtaatacatggttgtagtttgtgggtttagccggcattcagtagtagttcagctgccacctctaagctccagttggtctgctgcagcgcctgttcgcactgtggtcgcccagccaccccaagcctcgccagttggtcgattttgtagtgccgcgtggctagtccaacatctccgctggccgcacgcagtgcattgcgcacatcctgctccaccgcggagctgcccagctcttgcattagctgctggagcttctcctgctcgcgaccgtagtccgagggcactggcgcatacagctgatgggctccgtccagctgctgctgttgctgcagccgcatcttctccatccttcgttggatctgctgcgcggagagaggaggtggcgccaatggagctggtcgcgttggccgcaggtagtcatcctgagtcacttcatcgtacagaacagctccactgccattcggcacttggccgtagtatgtggagcccgccgtgctggccgccactgcatcgtacagcgaggcggttgaggagtacgcattgtttttgggtgccaccactcgattggatattgcaacaaacgaatggttcaactcctgctgctgctgctgctggtggcgatggttttggtagatctgctcctctgcctgctctgtcggcggctgggcatagtactcggactgcgtggacgccacttgctcataccaaatacgattcaccacactttgcgtggtagctgccgcagcagctgctgcctccacattgttctgcttgggcgacgcggtcgaagagggactggaatgattcgagtgaactgacccgggtgctgcaccgttctttaagggtgtgagattctgcttatacaccatatccttgctggcatacatctgcgtagaattgcgctggtactcctcctgcgctctgttttgcccgttgctgtacatgtccttctccagttcggcgatgaaggacttgtccagcagtactccatcaccaggaggagcaggtacaggctccactggctgaatgcaggtggcgtcgtgtcgctccaatgtaagattactgagatttagctgcatagccgctgattccagggcaggtatgttttctttattcgacttggagccaccgaaaaggctcttcctgaccgaaggactattataaatcggtgctggtggagaagctgcttccagagactggttgaaattcgagtagagtgccacagtcgtttcaacgtttgtggtgtcgaagggatctcgctcccttacaggcgtcgctagctgctgttggtgaaggtctcgtttttggacaaactccattgtattcgagtaagttggtggcatctggtacggcggcggttgcaggcgccctggtgaagctgtcatcttggccggatcaaagtcgaactgcggctgctcattgtagtacgtgggcgagacattaagatcccccgatccactggagccggcataagtgggcacatctatgggagcgtctagtatgcaaaacgagctgtccgcctgcagtgaggaactatcgcctgctcccttagctcctcctgttccagcttcggctatgggtcgcatatcgggcgagatgtcgatgagtatgccctcctgttgaaattgtggcggcggaggacgctgcgggcccaccaccactcctttgtgcttcactgcatttcgtcgctgaagaccagtagcggaatcattaaccagtttgttgtacgcaaactgcttgctggacgtggacttgcgctccttggcatggggctggtttgtcatcgaggcacactttcgctgtcgatcatctccgttggccattgcagctgctccgccccaacaaaagccgaatggcgaagacgacgaaccatttccaacgctgcttcgcattaccacatctccggcagcacccactttgcgctgctccagtaggtttctgggaaagattcctatatcgaatgttcgctggttctggccctttatcaatttcagctcgtgccgtccatcgataatggcgattgtgtcgccaggctcgatctgcagtcccttggactcgtggtgacttcgggaagcacgcatcacaggaggcgacatactggccaaatattctctgcaaaacaaggatacgtattagatgaatatgaattacaaatataaacaacaaggggaacctacttgagagcagcaaaagtgggtcgctctgctggagttttatcccagcattgcagcatcatagcataaacgtccggtggacaggcatccggctgatgcagtcgctcgccttcgcgatcgattttgcgcaggatctgcgatccattgagtcccacccatggatcttcgccaaagctaaacatctcccacagcgtcacgccaaacatccaggtgtcagaggcgtgcgagaactgccggaagcgcagcgattcaggagcgcaccagggaaaaggcaccttcttatgctcagacatcacatagcaatcatcctcttggggcaaggcacgcattaggccaaaatctccgatcttgatcttgtttccagctgccaggaggacattccgacatgccagatcgcgatgtagaaagcgcttctgttccagataggccatgccagtcacaatctgcaccgaccagttccagatgatggtcagcgaggtgtggcggcattgttttcgcaacgtatccagcagcgacccgcgctccgccagctctgtaatcatcatcatcggctgggataagacgacgccgtaaagccgcaccagattcgcatgatccagggcgtgcatagcctgaacctcgcggaagaagtcatcgatgatgcccggttgggtgaggttgtccgacttcagcaccttgacggccaccgggatgaccttgcccgccggcgaagcactccattcgccgcgacgcaccacaccgaatgatccgtcgcccagtttcagtcccattgtgatgtccttttcgtggataaggcaggtaagctgggtgccattgccctgactggattcccgggcggcggaggactgcttcttggacgagggttgcttgccaccgccaattagtttggacaggatgttcttgcgccactggtgggccttctttttccgcactgcctccatcagccgtcgaatagccggtttccccagaccacatcgctccagatcgtcaggtagcacgtagtcgaagtgcgccagccgggtcacctgtaggtcgtcccgtatcctgtccagaaactgctccagctgcacctcccgcagcagatcctccagccaggccgtctcgctcccgagcccaccatccaccgccgaagtggaggtcatttcctgaggggacgcaaaacgaaacacaataagttgaaggcaatctcaacaacatagtgatcggtgaatgaactgtggtcaagggtactgggtcaatcgcgcaatcacgtattttaatatgtatgtatgtatccacttgccatatgcgattaaatggtcagggaacagagaaagtgcgcaacatttatggaccgccaatgcaattccatatcttgtcattaacaaaaggtgaagcaatggggttcagtgatttctgacgcaataaaatatttcgaaaccgtagtttttaatagctaattgaattaatatacgtatatacatcgattgatcagaggtttgtaaaagtagtagtattcattaaatcctgatatatagttctattctcttttttcaacaataattatataaacaataatctattgcctcattaaaaaatacttaatataaaatccaagttcacatgctcgtctattaagcggaagtaagctggtttctagataagccatttatttaattccacgaatccgtcaggcgacatacgtgttgaatctatggctgcttccaagggggccaatgcatacaaaagtggatttgtgtaaacatatccccacatgacgtcacgttttcttggcaatccctgtaaacgcattgcgtcacccttcgaaccctatcactaagaagagatacatatacatatgtatctgtgtacatatataggaagaagtaggtggttcgggatctcaggaaatgcggcttgaactttggcgcgtgctgaagtggagtttataaatagaccgcaataaaaggtgagcagatgcaggcacagaatgtaaccgatatgcacgccccatgggattccccttgggatgaacaaaatgatagccagattgctaatgtctattgttaaggagcgaataatagaatttacactttgcggcgacagtttgactaattattcgggcggaaactggaacttagcggatgcgagagccacacagagatgtccaacgagacaacaacgcccagttgagagcaggttgccagtccatcagctgtgtcgtatgtagatacagtcgaacgtccgtaacgcggcatctgtcgttaactacacatatgtgcatatactcgaaaatggtgactttaaggtacagaaataacccaggtacaaacgctggcattgtgtatctaaaaataaatacagccgtacttccgcgattcaaaacaaaacccagttaaattacccttcgatttaatattttcggctaacattgtatcctatcatcataagaagtattatttatttagctcaatttcatggcaaataactttaagtttaagaaataaaattaagtttagttggggtccgcgtacgggggttctactgtaccacagctatcacaccccgaattccacgaagcggctagttccattcactattattttgttggacatttgtacaacatttccaccgggtgtttggctggaaagggtttttctttgtttttcgaaatactcaccgaatattaaacagctgcgcagctgctgcgacgctggctgaggagcgtcgacgtcaacgcggacgtcgcagtcgctgcacttggctaaacttgagaaaattggcaaacttcctgtctgtaagcgaacaggttgtccagacaaaagatgttgcggcagatggaagtggtttatgcggtggatatggagatttctggcttaaagatgtgaaattcgatattcgagttgaagacagcgcagttggcgtcgcagtcgccgcaatgtaaacgattgtatgcgtgcgtgtgtgtgtgtgtgtgttggctgctttgtttacactcgccaaatgagcagctgtctgcttggctgctgattttgatggcgggcggttagtggtcccctcatgacgcagacacgtaaatattaatttatagtgcacacacgagaaaacaatgaatattccgctttcaacagcgctcagcccctcccccaccgaccatcccactcgatcgtttcacgtttttgcacaatttcacacacacacgcattcgctgcacggccgtttgggtctgggtgtatgtgtgcgtgtgtacgaatcgaaatgcacgaaaaaaacagcaacgcaaatcgcaggtgccacgaagaaccgaaaagagcgagaattctttactttttcaatatgttaactcgctgaaatcagcttgattttctttctaatgcggaaacatcgtcgttaatcgcagttagctgcgcttaatttgcaattgaaaatgcgcgacggccaaacacttttggtattttttcaagcagctgatgcagtggtgatggaacaaaacgcgatgaatgttaaatataaccgatgtttctcaaatcataattctgaatatcgataatttatatcgagtatttaagttatttactgttacgatttaaaaatatgatttaatatttactaacatttaaacataaaaatatacgtaaatatataactttgtgaaagtggtaaattatcgaagtaacacatttaatttataaaattcttgtaaatattttacatatgtaactaaatcaaattcatttctatttcatttaatcgtgattaaaatagattccaaaaaaaattgtattatccctgttacttaaatctttttgtgcaagtgtcaagaagtattatttttctttagagaagataaatgtgaaatgcttgttttttcattccttaaaattgtttctatattaatcatgtcaatttttatcacaggagtgcagaacatttaaaaacaaatttgtttctatcatcttgtgattcaaatgttgaattataagaattcggttttatgtgggcgctgattgcattaatcatagtttttttttactaaagtcagcttacattagtaatgtaagtacttacgactgtagcaaatattaaaatgcatttttttttttttttgattatagataatacttggaagtggtatttatttgtcatgcgctattcatatctggcattttccttattaagagtcaccccgttaaattaaatcaaattgaagatttcgccagccattgcgtgagaagttgccccattccgaggcacatacgtagctttgggtcgcggccatcaatcaatggcgtagcacggcacgcctataatctcgaatccccatatatacccactgtacaacgccgtggtgcgcttatcaatccaattgagtgcgctgttattaataacaatacccgtgctttatattaaacgcgttgactgttgcatcaacgcccctcagaagcacacagcgcgtcaa

SEQ ID NO: 36884 - DNA, 4378 bp, DROSOPHILA
aaaaataccaaaagtgtttggccgtcgcgcattttcaattgcaaattaagcgcagctaactgcgattaacgacgatgtttccgcattagaaagaaaatcaagctgatttcagcgagttaacatattgaaaaagtaaagaattctcgctcttttcggttcttcgtggcacctgcgatttgcgttgctgtttttttcgtgcatttcgattcgtacacacgcacacatacacccagacccaaacggccgtgcagcgaatgcgtgtgtgtgtgaaattgtgcaaaaacgtgaaacgatcgagtgggatggtcggtgggggaggggctgagcgctgttgaaagcggaatattcattgttttctcgtgtgtgcactataaattaatatttacgtgtctgcgtcatgaggggaccactaaccgcccgccatcaaaatcagcagccaagcagacagctgctcatttggcgagtgtaaacaaagcagccaacacacacacacacacacgcacgcatacaatcgtttacattgcggcgactgcgacgccaactgcgctgtcttcaactcgaatatcgaatttcacatctttaagccagaaatctccatatccaccgcataaaccacttccatctgccgcaacatcttttgtctggacaacctgttcgcttacagacaggaagtttgccaattttctcaagtttagccaagtgcagcgactgcgacgtccgcgttgacgtcgacgctcctcagccagcgtcgcagcagctgcgcagctgtttaatattcggaaatgacctccacttcggcggtggatggtgggctcgggagcgagacggcctggctggaggatctgctgcgggaggtgcagctggagcagtttctggacaggatacgggacgacctacaggtgacccggctggcgcacttcgactacgtgctacctgacgatctggagcgatgtggtctggggaaaccggctattcgacggctgatggaggcagtgcggaaaaagaaggcccaccagtggcgcaagaacatcctgtccaaactaattggcggtggcaagcaaccctcgtccaagaagcagtcctccgccgcccgggaatccagtcagggcaatggcacccagcttacctgccttatccacgaaaaggacatcacaatgggactgaaactgggcgacggatcattcggtgtggtgcgtcgcggcgaatggagtgcttcgccggcgggcaaggtcatcccggtggccgtcaaggtgctgaagtcggacaacctcacccaaccgggcatcatcgatgacttcttccgcgaggttcaggctatgcacgccctggatcatgcgaatctggtgcggctttacggcgtcgtcttatcccagccgatgatgatgattacagagctggcggagcgcgggtcgctgctggatacgttgcgaaaacaatgccgccacacctcgctgaccatcatctggaactggtcggtgcagattgtgactggcatggcctatctggaacagaagcgctttctacatcgcgatctggcatgtcggaatgtcctcctggcagctggaaacaagatcaagatcggagattttggcctaatgcgtgccttgccccaagaggatgattgctatgtgatgtctgagcataagaaggtgccttttccctggtgcgctcctgaatcgctgcgcttccggcagttctcgcacgcctctgacacctggatgtttggcgtgacgctgtgggagatgtttagctttggcgaagatccatgggtgggactcaatggatcgcagatcctgcgcaaaatcgatcgcgaaggcgagcgactgcatcagccggatgcctgtccaccggacgtttatgctatgatgctgcaatgctgggataaaactccagcagagcgacccacttttgctgctctcaaagaatatttggccagtatgtcgcctcctgtgatgcgtgcttcccgaagtcaccacgagtccaagggactgcagatcgagcctggcgacacaatcgccattatcgatggacggcacgagctgaaattgataaagggccagaaccagcgaacattcgatataggaatctttcccagaaacctactggagcagcgcaaagtgggtgctgccggagatgtggtaatgcgaagcagcgttggaaatggttcgtcgtcttcgccattcggcttttgttggggcggagcagctgcaatggccaacggagatgatcgacagcgaaagtgtgcctcgatgacaaaccagccccatgccaaggagcgcaagtccacgtccagcaagcagtttgcgtacaacaaactggttaatgattccgctactggtcttcagcgacgaaatgcagtgaagcacaaaggagtggtggtgggcccgcagcgtcctccgccgccacaatttcaacaggagggcatactcatcgacatctcgcccgatatgcgacccatagccgaagctggaacaggaggagctaagggagcaggcgatagttcctcactgcaggcggacagctcgttttgcatactagacgctcccatagatgtgcccacttatgccggctccagtggatcgggggatcttaatgtctcgcccacgtactacaatgagcagccgcagttcgactttgatccggccaagatgacagcttcaccagggcgcctgcaaccgccgccgtaccagatgccaccaacttactcgaatacaatggagtttgtccaaaaacgagaccttcaccaacagcagctagcgacgcctgtaagggagcgagatcccttcgacaccacaaacgttgaaacgactgtggcactctactcgaatttcaaccagtctctggaagcagcttctccaccagcaccgatttataatagtccttcggtcaggaagagccttttcggtggctccaagtcgaataaagaaaacatacctgccctggaatcagcggctatgcagctaaatctcagtaatcttacattggagcgacacgacgccacctgcattcagccagtggagcctgtacctgctcctcctggtgatggagtactgctggacaagtccttcatcgccgaactggagaaggacatgtacagcaacgggcaaaacagagcgcaggaggagtaccagcgcaattctacgcagatgtatgccagcaaggatatggtgtataagcagaatctcacacccttaaagaacggtgcagcacccgggtcagttcactcgaatcattccagtccctcttcgaccgcgtcgcccaagcagaacaatgtggaggcagcagctgctgcggcagctaccacgcaaagtgtggtgaatcgtatttggtatgagcaagtggcgtccacgcagtccgagtactatgcccagccgccgacagagcaggcagaggagcagatctaccaaaaccatcgccaccagcagcagcagcagcaggagttgaaccattcgtttgttgcaatatccaatcgagtggtggcacccaaaaacaatgcgtactcctcaaccgcctcgctgtacgatgcagtggcggccagcacggcgggctccacatactacggccaagtgccgaatggcagtggagctgttctgtacgatgaagtgactcaggatgactacctgcggccaacgcgaccagctccattggcgccacctcctctctccgcgcagcagatccaacgaaggatggagaagatgcggctgcagcaacagcagcagctggacggagcccatcagctgtatgcgccagtgccctcggactacggtcgcgagcaggagaagctccagcagctaatgcaagagctgggcagctccgcggtggagcaggatgtgcgcaatgcactgcgtgcggccagcggagatgttggactagccacgcggcactacaaaatcgaccaactggcgaggcttggggtggctgggcgaccacagtgcgaacaggcgctgcagcagaccaactggagcttagaggtggcagctgaactactactgaatgccggctaaacccacaaactacaaccatgtattaccgcctcgaatgtaattgctttagttttacgtgctgaatattcttttaaacttagctaacgatgtatcgaatctttatcaaaatactcctaggtgaatgcgcgaatgcaaacacattgtcaacgactgtacaatttgttctatttaatgtaagcgatcgtataaaattattttataattgttattcgatgtccgcattttctgagatgccccgaatattttattcacactcgaaattgaatctttcgaatgaagacctcggttcgcttcggccggttaaggtcaaaaatgtcaaacgtatgcaacaattcatttgtttatcgaataaattatatgaaattgttacaaaa

SEQ ID NO: 36885 - protein, 1073 aa, DROSOPHILA
MTSTSAVDGGLGSETAWLEDLLREVQLEQFLDRIRDDLQVTRLAHFDYVLPDDLERCGLGKPAIRRLMEAVRKKKAHQWRKNILSKLIGGGKQPSSKKQSSAARESSQGNGTQLTCLIHEKDITMGLKLGDGSFGVVRRGEWSASPAGKVIPVAVKVLKSDNLTQPGIIDDFFREVQAMHALDHANLVRLYGVVLSQPMMMITELAERGSLLDTLRKQCRHTSLTIIWNWSVQIVTGMAYLEQKRFLHRDLACRNVLLAAGNKIKIGDFGLMRALPQEDDCYVMSEHKKVPFPWCAPESLRFRQFSHASDTWMFGVTLWEMFSFGEDPWVGLNGSQILRKIDREGERLHQPDACPPDVYAMMLQCWDKTPAERPTFAALKEYLASMSPPVMRASRSHHESKGLQIEPGDTIAIIDGRHELKLIKGQNQRTFDIGIFPRNLLEQRKVGAAGDVVMRSSVGNGSSSSPFGFCWGGAAAMANGDDRQRKCASMTNQPHAKERKSTSSKQFAYNKLVNDSATGLQRRNAVKHKGVVVGPQRPPPPQFQQEGILIDISPDMRPIAEAGTGGAKGAGDSSSLQADSSFCILDAPIDVPTYAGSSGSGDLNVSPTYYNEQPQFDFDPAKMTASPGRLQPPPYQMPPTYSNTMEFVQKRDLHQQQLATPVRERDPFDTTNVETTVALYSNFNQSLEAASPPAPIYNSPSVRKSLFGGSKSNKENIPALESAAMQLNLSNLTLERHDATCIQPVEPVPAPPGDGVLLDKSFIAELEKDMYSNGQNRAQEEYQRNSTQMYASKDMVYKQNLTPLKNGAAPGSVHSNHSSPSSTASPKQNNVEAAAAAAATTQSVVNRIWYEQVASTQSEYYAQPPTEQAEEQIYQNHRHQQQQQQELNHSFVAISNRVVAPKNNAYSSTASLYDAVAASTAGSTYYGQVPNGSGAVLYDEVTQDDYLRPTRPAPLAPPPLSAQQIQRRMEKMRLQQQQQLDGAHQLYAPVPSDYGREQEKLQQLMQELGSSAVEQDVRNALRAASGDVGLATRHYKIDQLARLGVAGRPQCEQALQQTNWSLEVAAELLLNAG

SEQ ID NO: 36886 - DNA, 5019 bp, DROSOPHILA
ttcgttagtaataattgtttaatcttacatggaaacactgctctatggaatagatccaaattggtatagttgggcaacttttcgctggccaagacattgaattccagattggaatcctcaacaaacttcggtggaggcgtttccggcctggccaaactctccacctgcttaacgccattatccttgctcggagtttttcgaaaattcagattgggtcctttcatgacgctggtcccttttgcactgacacgaaatgcgaaatttcaacatgtccaaagcttgtcatgggtggagttgagcccttcacaatggtgcccgtctgaagtgccactaattaggggctttggacctaagctagtaccaggatgtaaacaacaattatgagacacttctgtgggaattggaataaagtgggttcactctgcagcagcagaccgaaggattcggatgcatccgtcagattgcatttcgattagctgccgagatacatgtgagaaagaatgttacaaataagcacagatttggtcaaaactttgtatttctattcaagttttagttggtccacttttaggctgaataatatatatatatttttttttgcttccgcagtgaacgtagggcagtagtaatatagctacttatctccgatgttaatcgagtattgattgatatggcgagcgatgtggtaagagcccagtttagataatacgttggctatttacaaatctttcttatcaatgtattgttaaaatgttacacttccgaatagccttagaaccttgacatacatttttaatgtaatatcagatacttatttatttacaagaaaatatttaataaatacaattgactagtgtttcataaggcatttctattaggaagttgattttaacagctaagagacaatcgctgttagatttgaatacacttgtgatcatatggaaatagatgggatggattgaatccactctgggcgctttggagcagtggatgagagcagctcgttgcgactggttgtgcgacaggtgtcggaataaataaaagcaaaaacattcgacggcttttgtttgcgctgataaacaacctgcgcatatgtacaagcaaagcaaaatactgctcgaataattgtttgttcaaaacaatcaggtgtgccttttataaaactaaaagtttctaatttctaaacgagtaggtgtgcgcgcttctaataaaaaatttcggtattaaaaattaagttgttttaaaattaaatgctcttcagctttttaagatgcagcagaactattgtgctaaagaaaataaacaagcacaaatcacaaattacggtaaatgcaaaaatataaacaaaaacgtgcctgaaagatacggggttactgcgatcgtggtttaaataaaatcaaaagatacaaaaccatagcgatacaatacagatgcagatacatgtgcgtctgtggagtttggaaaatcaaaaattataccaaaaataaaccataattgatataaaaaaagcttatcatcatttttctatatttattgcctctgacaattgtcgataacaattaagaatataaatatctcacttcttctgtggcaaattaagatatttcataactgtaactcaattataagtaatcaaatgagatctttagaaaccggtacttgggttaatttacacagtttctagctgtacagggtctctaggcgttcgcatatcaggttgcttatcagttcgcgtccgacgctcgacgacttcgcttcgcttttggtctgggattgggtttgggttttcgcatcgagccaataacatttatttgaccgccaaggtgattagaggcgtctgtgacggagacggcgacttggaaatgtcatccggaccgttttttgtgggcgtggacgtgggcacgggcagtgcgagggcggccctggtcgcctgcgatgggcgtgtcctggagcaggcggtgcagacgatccaaacgtggaatcctgagccgggctactacaaccagtcatccgataatatatggcagtccatctgccaggtggtgaaggtaggcaaagttgttcttatacataaaatagtaccattaactatatttaattatattcatatttcgaaatgcattgagaatttttaaaatgaaatgactctaaaaataataatttaacgactttaatttgggtctataaacccagtaatgatcttcccccatttgctctgtgcgataacctctgtcgttcggcgacgtttctcgcgaagattagattaacccagtgccgattttacagaaagtcattggcggcgtcgataagtcaaaagtcaagggcattggcttcgatgccacctgctccttggtggttctgggcccccagggatcgccgctgacggtgagcaagtccggtgaggcggagcagaacataatcctctggatggaccatcgtgccgagcaggaaacccaagagatcaatgccttcaagcactcgctgctgaaatatgtgggtggtcaggtttcgctggaaatggaggttcccaaattgctgtggctgaagaggaatctgtcacagacttttggaaatatttggagggtctttgacctgcccgactttctgacctggcgagccactggagtggacacccgatcactttgctcggtggtgtgcaagtggaactacgatgcagcgaatggcagttggaacaaggagttcctgaagcaggcggacttggaggagttgacacagaataacttcgagaaattgggcagtgatgtccagccgcctggccgaacggtgggcaaaggactcacggccaaggctgctggggaactgggcttatccgccggcactgtggtgagcacctccctaatcgatgcccatgctggcgccttgggaatgtttggatgccgctcaaaggagtccaagggtgccgacgatgtccagggtaaaatggctctgattgccggtacatccacctgccacatgagcatcacccggaaggcatgcttcgcacaaggtgtttggggtccctatcaggatgccattattcccggctacttcctaaacgagggtggtcagagcatcgcaggacatctcctagatcacgtcctcaagtcgcatgaatcctacgccgaactgaaatcccaattgggagaggataagtttatctaccagcatcttaataagttgctgccggaactggcagcagctcgaggattaagccaggtgggctgtctcacccaggatgtccatgtctggccggacttgcatggcaatcggtcgcccatcgcagatcccacgctgcgaggagtggtaagtactacatctaaatagatcttctttttattattgaaatgggaaatgattgctttcagattactggactggacatgacgcgaggaactgaatctctggccatcaaatacttggcgttcgtccaagctctggctgtaagtggtatccttataatttaattgtaaacttgatatttattcgttattacttcagtacggcacacgtcacattattgaaaacctttaccagtacggtagagctccctttcaaacgctacttttctgcgggggattggccaagaatcctctgtacgtacaatgtcatgcggacatttgcaatctgcccgcactgattccggatgaacaggaaatggttctggtgggcgctgctgccttgggagccgctgcctccggccacttcgacagcttggaggtgagcttaagaatatctaaatatctaactggtttataaactactcgttgtgctcttagagcgcctcgaaatccatgggtggcactggccagctggtgaagccgaacgcggaaacgcttgagttccacaatcgcaagtacaaggtgttcctgcagctgctggagaaccaacgacagtacaggcgcattatgcaggcagacacaaagtgattttttttcattccgatgtcaagactttcaataattttaaataaatgccgtacatgagcattgtaacaaataaaaagtttggcgcacacaggtacaaggtgatcttgttggcatcttcgttggttcctaggcgatgaaggcggctgccttggagacgatgctaccacgacacacggggcaggtgacggagattttctgggcacagtcctcgcagagacacacatgaccacatggcagtaggataatctagaagaaaaaaagggacgtgtttaataatggcagtaatcatataaacattacatcacttatatttagggtttatggtcatggtattgtaaaaactttactgcaatgggtcttattatctaagcattaaaaattatatttcccttatcttaattttggtaaactcattaaatatcaatacaagtagaataattaaatttcaagatacggattctcagaggatagaattatgtaaattcgcaataggaatgcaagggttatattcacctccttgggattggtggagcacaccacgcagagttgatcctgggacagagtgtgaggacgactcctcgccctccgctcccgacgctccgtatccaggcgttcgcgaattttggcctcctcccgctcctgctttcgttttcggtagagtttcttggcaatgaaggcaaccaggatggcagagatggtgctgcacacaaccagcttgagtctagaagggattaagtagaaagtattaagagtatacacccagagtaagcaccacccacatcgtcgttgtcttggcatcttcgaaccgcttaataagcgtggacttggtggcagtggtcaggaagagcggtccctcattggagggctgcatgcgcagagtatcgccatccaactccagttcaccaatagcggtcaggaagctgccttctctgagcacctcctccgtcgtttgcaatcccctctgacggacgccagagaagaaaccaaacacatggtcgaagagggacagattggagggctcgtagttgtcgtagaccacgtccacgtccaagacggcggcactcaaggcgtccacaatctccacaccatggct

SEQ ID NO: 36887 - DNA, 2602 bp, DROSOPHILA
ctcgttgcgactggttgtgcgacaggtgtcggaataaataaaagcaaaaacattcgacggcttttgtttgcgctgataaacaacctgcgcatatgtacaagcaaagcaaaatactgctcgaataattgtttgttcaaaacaatcaggtgtgccttttataaaactaaaagtttctaatttctaaacgagtaggtgtgcgcgcttctaataaaaaatttcggtattaaaaattaagttgttttaaaattaaatgctcttcagctttttaagatgcagcagaactattgtgctaaagaaaataaacaagcacaaatcacaaattacggtaaatgcaaaaatataaacaaaaacgtgcctgaaagatacggggttactgcgatcgtggtttaaataaaatcaaaagatacaaaaccatagcgatacaatacagatgcagatacatgtgcgtctgtggagtttggaaaatcaaaaattataccaaaaataaaccataattgatataaaaaaagcttatcatcatttttctatatttattgcctctgacaattgtcgataacaattaagaatataaatatctcacttcttctgtggcaaattaagatatttcataactgtaactcaattataagtaatcaaatgagatctttagaaaccggtacttgggttaatttacacagtttctagctgtacagggtctctaggcgttcgcatatcaggttgcttatcagttcgcgtccgacgctcgacgacttcgcttcgcttttggtctgggattgggtttgggttttcgcatcgagccaataacatttatttgaccgccaaggtgattagaggcgtctgtgacggagacggcgacttggaaatgtcatccggaccgttttttgtgggcgtggacgtgggcacgggcagtgcgagggcggccctggtcgcctgcgatgggcgtgtcctggagcaggcggtgcagacgatccaaacgtggaatcctgagccgggctactacaaccagtcatccgataatatatggcagtccatctgccaggtggtgaagaaagtcattggcggcgtcgataagtcaaaagtcaagggcattggcttcgatgccacctgctccttggtggttctgggcccccagggatcgccgctgacggtgagcaagtccggtgaggcggagcagaacataatcctctggatggaccatcgtgccgagcaggaaacccaagagatcaatgccttcaagcactcgctgctgaaatatgtgggtggtcaggtttcgctggaaatggaggttcccaaattgctgtggctgaagaggaatctgtcacagacttttggaaatatttggagggtctttgacctgcccgactttctgacctggcgagccactggagtggacacccgatcactttgctcggtggtgtgcaagtggaactacgatgcagcgaatggcagttggaacaaggagttcctgaagcaggcggacttggaggagttgacacagaataacttcgagaaattgggcagtgatgtccagccgcctggccgaacggtgggcaaaggactcacggccaaggctgctggggaactgggcttatccgccggcactgtggtgagcacctccctaatcgatgcccatgctggcgccttgggaatgtttggatgccgctcaaaggagtccaagggtgccgacgatgtccagggtaaaatggctctgattgccggtacatccacctgccacatgagcatcacccggaaggcatgcttcgcacaaggtgtttggggtccctatcaggatgccattattcccggctacttcctaaacgagggtggtcagagcatcgcaggacatctcctagatcacgtcctcaagtcgcatgaatcctacgccgaactgaaatcccaattgggagaggataagtttatctaccagcatcttaataagttgctgccggaactggcagcagctcgaggattaagccaggtgggctgtctcacccaggatgtccatgtctggccggacttgcatggcaatcggtcgcccatcgcagatcccacgctgcgaggagtgattactggactggacatgacgcgaggaactgaatctctggccatcaaatacttggcgttcgtccaagctctggcttacggcacacgtcacattattgaaaacctttaccagtacggtagagctccctttcaaacgctacttttctgcgggggattggccaagaatcctctgtacgtacaatgtcatgcggacatttgcaatctgcccgcactgattccggatgaacaggaaatggttctggtgggcgctgctgccttgggagccgctgcctccggccacttcgacagcttggagagcgcctcgaaatccatgggtggcactggccagctggtgaagccgaacgcggaaacgcttgagttccacaatcgcaagtacaaggtgttcctgcagctgctggagaaccaacgacagtacaggcgcattatgcaggcagacacaaagtgattttttttcattccgatgtcaagactttcaataattttaaataaatgccgtacatgagcattgtaacaaataaaaagtttggcgcacacaggt

SEQ ID NO: 36888 - protein, 548 aa, DROSOPHILA
MSSGPFFVGVDVGTGSARAALVACDGRVLEQAVQTIQTWNPEPGYYNQSSDNIWQSICQVVKKVIGGVDKSKVKGIGFDATCSLVVLGPQGSPLTVSKSGEAEQNIILWMDHRAEQETQEINAFKHSLLKYVGGQVSLEMEVPKLLWLKRNLSQTFGNIWRVFDLPDFLTWRATGVDTRSLCSVVCKWNYDAANGSWNKEFLKQADLEELTQNNFEKLGSDVQPPGRTVGKGLTAKAAGELGLSAGTVVSTSLIDAHAGALGMFGCRSKESKGADDVQGKMALIAGTSTCHMSITRKACFAQGVWGPYQDAIIPGYFLNEGGQSIAGHLLDHVLKSHESYAELKSQLGEDKFIYQHLNKLLPELAAARGLSQVGCLTQDVHVWPDLHGNRSPIADPTLRGVITGLDMTRGTESLAIKYLAFVQALAYGTRHIIENLYQYGRAPFQTLLFCGGLAKNPLYVQCHADICNLPALIPDEQEMVLVGAAALGAAASGHFDSLESASKSMGGTGQLVKPNAETLEFHNRKYKVFLQLLENQRQYRRIMQADTK

SEQ ID NO: 36889 - DNA, 4024 bp, DROSOPHILA
tcgttggtctgctggatgccaattatgagggccaagtcgtcaatgggcttccagcggcccaaatccttggtggccatctgacccatgggacgaccatttctacgctgcgcctttttgctggcaggacgcactgggcgcgaacggcgctcgctggtcgtggagcgctccatggccggtggtttgggatgcgcgacggcagtcacaattggggcaactggaaggggagtggccaagggagctggcgttgtgggcgtggccagtgacagcgatgcaacagtgctaggtgtccccggcagcagggaatcaactgaaagcggcgtctgtggcgtggaagtgggtatgttaagaggcgctaacgtggtgtgcggcacgcccaccaaagctggataattctgggaggtggtgcgaggcctgctgctgcgattggcgtctgttccgctgcgatttgtgggcaccgcaatgttgtactcaactatttcgtcatcaaaacgcttccttttaatcgtccgcgatgaactgtttcgatgcaaaaggagctgccacttaatctgtcaattttgacatatgtcatcgtctcaccttcttcgcttttgatcgttttgctgttctatctgcagatttgaaatgggatttcgtatcggcgttgaaattccaacggcactgctagctgtacttcctattgtggttgttgttgttgtggctgctggtgttggcatggttgttgttgctggcgacacgcctacctggattagtgtgctcgcagctgctgtgggaatggtggacactgtggggggattgggagcggtaacggacactgcactgctggcgatcgcggttattcttgatgcctccatcgctctagcgggctgtttatgggctaaaatgtatttattttcgcgacgcacagctcagcagtgtgaccgcaccagcaggaaaaagtatatcacttgcagagttgccacgtcttcgaaataaagtgtcactgcaagaaaaacatttgttaatagcttatataaatatatataaaattaattttctttcttaacagttcacttgcttaatatataattagcgaaagtgagaacattaagcttgactttaccattttaaaagttaccatcatagtgtcactggcctgccagatctccatgggaaacacatgtttcgcaacactgctacccacacaaacgcattcgcgaatatctggtaacctcgccactggagccctctcgaaattttgtttactggcatttaaaatcagcgaattcgggctaaaaagtcttacttatgcacccagcaccgatgcccggagcgactagatgagtgtctggatgagcgggccccgaaatttcgcactagccacacaaattatacgggaaactatgaggtaaatggttctttgcacgaaaacaaaaaggcgactgactaagatatgactaatcgatttgcagtttgcactacgcggaatcggaatcttcgccgtcagagagcaaaatggacatctcggagacgccgacggactcaacgggcgtctcgccgctggcggatgatgttttgcccaccgcgccggagaagaatatcctgaaattggagcaggccaagcaggatcacgataaggaggaactggagttcaagacgacctccgcgctggacaacagaatactgcgtccagagctgctgcccatggaggcgatgccacaacgacacaacatcatcgagcgcaccctggccaacagccatccgctgatgtcgccaaccaacacggactcagactcggaaccctttcagctgaagaagcaggagaaacagctgccgaggagcaactttccggacgttgtgcccaccacggagacggtgcaggtgaagaacaacctgaaccaatgccggaacaagccgcaggacgccaaggtcagcctgctaagggccaacagtccggatatcctgagcagcgagtcagatgcggatgtgtcccagtacttggccgccgtggagtctaactttcagtccgtttccctgatgcccaatggcaatggcaagaaatccaaacgatcgactgcactccctggtggcgaggacatatctagcctggattccatctccaatcacagcttcgacgatgacgaggacattgagcacaatttggcctctctaagtccatcgagctccctgattgatggcttagacggagaggatgacgacgacgactgcgagggtccggaactgctgcccgaccacgacgacgacttggaactggacctggagttcggtttggccaccacgcccacgccaaatgctccggcatcggctacggctgcctcaactctgccacagtatacggctgctgaagagagacgtgattcgcggaattggcagaagatcactttaccggatggacgtaccagggagatcgacatgcgggtcatagagccctacaagcgtgtgctgtcccacggcggctatctcaaatctggcggtcagaacgccattgtcatcttttgcgcctgtcacctgccggataggtcgagggccgactacagctacgtgatggacaatttgtttctgtacgtggtcaagaccctggaacagttggtcactgatgactatgtgctaatctatctgcatggcggctccaataggcgtaatgtgccaccttttccctggcttaaacggtgagttgttcggtctgttttttaaggagatttctaatgccgtgctatgataatcctttaggtgttatcagctgcttgatcgccgactgcgcaaaagcctgaagcacatgtatttggtgcatccgacattctggataaaatcgctggtttggatggcgcggccttttgtgaggtaagtaataataatcattgtcaaatgtagatctcatataaatactgctttatctctcgtagcacaaagttttggcgaaagctggtctacgtaaagtccctggaggaactgggcatgcacgtggtcgtggagaaggcagccattccggagaaggtcaagcaatacgacgccaagcggcactgaggccctgcgatgccccagacttgttaaacgcaaaacgctaatgcaaacttaacgcattcatgccacactcgctactcgagcctctgcattccccatcttcaataaggactgaggctaatcctccaaaccgatcgtttgcgctctctcgctatgctttaatttaagatctcaatctttgtgatactttatttttgccttctctcagccaagtcgaaatcccccccagcatttttctgtgtgaagcgtgaaggcgttcagcaaaacatcgaacaagtttttgtagttctttattggcagtcgtagaaatcgtattagacacagactcatatgtgttaggatcctatatatacacccacatacataatggtaccatgtagttatcgtgtagcttccgcttcatatattttatagaggaacatacatatgcaaccagaaaccaccaaacttccgaacatgttacctttcctttgtagtggcaaaaagaaaaaaaaaaaacacaaagttggaaacggagcaacacactaaactgaatctaaacataagtaattgaaaatctttagctgaattttgcatcttatatcgcatattgtatattccaagcgttccaaacacgacactttcgctgacacatgatggaccccatgccagtcgacagtaggtgccccatttatctcatccaccatcagagttagccgattagcctgtaagtgaaatagcgaccattctttgtggaatctacacacggacacacgtagaatctctctagcggataatgtgacgtacaattaggcaatgtaaccgattgatattaagagcgacattttgttggtttccttttaccgctttaaacaaacaataataataaagtgcaagatgattttttatttattacgcaataaaccttgtgaaaatcaaactcctatgagtaatagctctgatcgcagtcccacaggtcgttgtcctcatgaaattggatgagaacaagttcgtacgtgacgat

SEQ ID NO: 36890 - DNA, 1837 bp, DROSOPHILA
ttaatagcttatataaatatatataaaattaattttctttcttaacagttcacttgcttaatatataattagcgaaagtgagaacattaagcttgactttaccattttaaaagttaccatcatagtgtcactggcctgccagatctccatgggaaacacatgtttcgcaacactgctacccacacaaacgcattcgcgaatatctggtaacctcgccactggagccctctcgaaattttgtttactggcatttaaaatcagcgaattcgggctaaaaagtcttacttatgcacccagcaccgatgcccggagcgactagatgagtgtctggatgagcgggccccgaaatttcgcactagccacacaaattatacgggaaactatgagtttgcactacgcggaatcggaatcttcgccgtcagagagcaaaatggacatctcggagacgccgacggactcaacgggcgtctcgccgctggcggatgatgttttgcccaccgcgccggagaagaatatcctgaaattggagcaggccaagcaggatcacgataaggaggaactggagttcaagacgacctccgcgctggacaacagaatactgcgtccagagctgctgcccatggaggcgatgccacaacgacacaacatcatcgagcgcaccctggccaacagccatccgctgatgtcgccaaccaacacggactcagactcggaaccctttcagctgaagaagcaggagaaacagctgccgaggagcaactttccggacgttgtgcccaccacggagacggtgcaggtgaagaacaacctgaaccaatgccggaacaagccgcaggacgccaaggtcagcctgctaagggccaacagtccggatatcctgagcagcgagtcagatgcggatgtgtcccagtacttggccgccgtggagtctaactttcagtccgtttccctgatgcccaatggcaatggcaagaaatccaaacgatcgactgcactccctggtggcgaggacatatctagcctggattccatctccaatcacagcttcgacgatgacgaggacattgagcacaatttggcctctctaagtccatcgagctccctgattgatggcttagacggagaggatgacgacgacgactgcgagggtccggaactgctgcccgaccacgacgacgacttggaactggacctggagttcggtttggccaccacgcccacgccaaatgctccggcatcggctacggctgcctcaactctgccacagtatacggctgctgaagagagacgtgattcgcggaattggcagaagatcactttaccggatggacgtaccagggagatcgacatgcgggtcatagagccctacaagcgtgtgctgtcccacggcggctatctcaaatctggcggtcagaacgccattgtcatcttttgcgcctgtcacctgccggataggtcgagggccgactacagctacgtgatggacaatttgtttctgtacgtggtcaagaccctggaacagttggtcactgatgactatgtgctaatctatctgcatggcggctccaataggcgtaatgtgccaccttttccctggcttaaacggtgttatcagctgcttgatcgccgactgcgcaaaagcctgaagcacatgtatttggtgcatccgacattctggataaaatcgctggtttggatggcgcggccttttgtgagcacaaagttttggcgaaagctggtctacgtaaagtccctggaggaactgggcatgcacgtggtcgtggagaaggcagccattccggagaaggtcaagcaatacgacgccaagcggcactga

SEQ ID NO: 36891 - protein, 468 aa, DROSOPHILA
MDISETPTDSTGVSPLADDVLPTAPEKNILKLEQAKQDHDKEELEFKTTSALDNRILRPELLPMEAMPQRHNIIERTLANSHPLMSPTNTDSDSEPFQLKKQEKQLPRSNFPDVVPTTETVQVKNNLNQCRNKPQDAKVSLLRANSPDILSSESDADVSQYLAAVESNFQSVSLMPNGNGKKSKRSTALPGGEDISSLDSISNHSFDDDEDIEHNLASLSPSSSLIDGLDGEDDDDDCEGPELLPDHDDDLELDLEFGLATTPTPNAPASATAASTLPQYTAAEERRDSRNWQKITLPDGRTREIDMRVIEPYKRVLSHGGYLKSGGQNAIVIFCACHLPDRSRADYSYVMDNLFLYVVKTLEQLVTDDYVLIYLHGGSNRRNVPPFPWLKRCYQLLDRRLRKSLKHMYLVHPTFWIKSLVWMARPFVSTKFWRKLVYVKSLEELGMHVVVEKAAIPEKVKQYDAKRH

SEQ ID NO: 36892 - DNA, 3850 bp, DROSOPHILA
cgatagaattcagagcatagaagccaccgctccacacacgcaccaccaaaacgaaagacagccccagtcccacacaaaagtactatgatgatataatgatatatatgtatatgatatagaaactgttggaacgctatcttaacatatcaggagaagatgaagagccagttgaggaccttagttcaattcgttgatttcactttgtttgcaaacagagaatgttttcaaatatatcatatctatagccatgcgcgtacctttataaaaacaagatcgaaagagacctgtgcttgttaattgtatagacaaaccaaagagaggggatctgtgccgcagaacccatttagtccatgtatcgaactgtgctatatatagagacgtgaatacgtataatcgaattagttggagtttagtttcaacaaaatggctgacaagtatatatgtattgcccggagtcaattaagctcaattacgaatgttggaagattcagattttagttaagttttaatcagttagttgttccagaaaggttggtagtgaaatgtccctatatgaaaagaacacaatcagacattacattctacctgtgcacaaaactcgtttgtcaattccgcaaaagtaagaaaataatggcataaaaactacaataaattcaacaattatagtactttaaagcgtgttatctaagtttatccagcaccacgctcattttatgtatgtataaattaatgtatgtatatgtatttgcagatccaaatcaatgccaaacaagaattattccaacatctatataaatgcaaatgaatatattatatatatgaatatatgagtaaaataaataaaagtaatcaaagcgcaattaaaatttctcttcattatgtctaaggcgctctttacctttgggggcttggttttgctaagagagccgaaagatcttgtggtctgagcacctatataaggcggatcgtgaatagaaaatccctcagttgttatctagctcactctggctccgcgcacgctttttccgcttctctgcttcactttattgattcgcaccaacctgcccaagttttccactttgagtgcttttaaaatgtcccagagttttgtgccagtgccagagaacagcgattttccgctggaaaatctaccctacgctgtcttctcaaccgaaaacaatgtgagtgatatcatactgaaatcaaatcttatatttttatgagattttagaacaatggtctcgctgttgtaaatgataactaaagtggtaaatggcaaagcaaatgttcctttaactcagcctgttttccgtgtaatattttcaagtttttcttcagtttcatgtgactttggatcgttccacatgttctagaaatcaactttagaacagaaaccgctttggggcatagcatttgcatacatcatccaagacaaactagtttgtttacgaaaacaatatgctaatccaatctttaataccccagcaaccaggttctgataaggccccatatcatatatcgtatttgtatatcgtaaatggtgtttttcatcttaccatccgtagaaagttcaccgtatttgtgtggccattggagagcatgtcctggacctgaaagctgtctcgcagttgtttcctttccaagttcagaaaagcctgcaggccgaaactttgaatgagcttatgggattggactttgaagcttgggatgtggtaagaagccagactcaaaagctattgacgaagggttcagaattggaccacaatgtggacttgaaggcggtgtaagtcggatttattataataatttattattcatagttaataatttatttatttatcagttccattgtgccacagtctgagatcaagctgcacctgcctgcacagattggtgactatacagacttttactcatccatccaccatgccaccaatgtcggcattatgttccgtggaccagacaatgctctgatgcccaactggcgccatctgccggtgggctatcatggtcgtgcaagttctgtggtggtttccggtactcccatccgtcgtcctcttggtcaaacgtttcccgatggagcagagaagcccgtctttggcgcctgcaagcttctggatttcgaactagaaatggctttctttatcggtggtaagggaaatcagctgggtgaacccatacgcgtggatgaggcctggaagaacgtgttcggtttcacgctgatgaacgactggagtgccagggatattcagaagtgggaatatgtgccactgggccccttcaccgcaaagaatctgggaaccaccatctccccttgggtagtgcccacagctgccctgaagcccttcgtcttggacaactttcctcaggaaccggaggtgcttccctatctgcgccagaacattccctttaactttgatatcaacctcgaggtgtctttgaaacgtaagttgccgcctgttaaagatttgttacgttaattcacaaaatttccccttctcagccgccgatcaaaacgaagcgcttatttcaaagtcgaacttcaaacacctttattggactccactgcagcaaatcgctcatcacacagtcaccggttgtaatctgcgtcctggtgatctgatggcctccggaacgatctccggtgagactccagactcgtacggatcacttttagagctctgctggaagggcaccaaaacattggagcttccgggtggtaagaccagaaaattcctccaggactttgacgaggtcatcatccgtggccactgcgaaaagaacggactgcgaatcggattcggggagtgtgtgggtcaggtgctgcctgcccaccccgttccgcagtaggaccacttattaacataagtaaatgaaataaattctattcagtcttcctggatacgtcaatacattatgatgttcggaaaacttcaacttttcgttcaaaagcatactttttgggataaatggccatccatagtagcgtatacgtaatattttttctcggtgcacagtaataagctcaacaagtgctcaactctttcgctctctcgctacgatgccttgctctctttcgtttacacaactctcgctccaatcggagcctctgccattccacgcagcttcgtaaatacgcgcacgccgcttcttctttggctgcagagaagagcggagagcgccaatgggagcatagctgagcggagcagcaaaccgcattcattcctcgaaagtcggcgggcgaaggtgggcgcgctgcgaaaagtcaaacggcaaaacggcagaaaggcaaaacggcccgcctatcgggcaaacttgtttaaagtgccataaaaaagcctctaaaaagcgtagaaataaaaaaagctgccgtgcagcgcaaagcagacgcgactggcgccggtgccccaataataaattttccgacgagtgtgcaacttctttcggttatttaaaacaaaagaaataaataagtaatacaacttaaagtgcaagtgcagtggttgaatagcgccctgaattaagtgtaagtgctgctcgcaaattgaaattaaaattagtgcagaatagtgcaaatgttttccgcaaacaacgctgaatgtcttggaaaaatcaattttttactccactctgcgcaagtacacacacacaaatacgctgactagcgaagggcagacggcgggttggggtgggccacccaccctggcagaaaacactctgtctgctcacagtacacatgcactgttagaaatgttaatatcttttgcacattatcacatagtatgcatatggatgttctttaaagatatgtatgtagaacaattgcgttcgagtagtaggatcaaggggc

SEQ ID NO: 36893 - DNA, 1348 bp, DROSOPHILA
cactctggctccgcgcacgctttttccgcttctctgcttcactttattgattcgcaccaacctgcccaagttttccactttgagtgcttttaaaatgtcccagagttttgtgccagtgccagagaacagcgattttccgctggaaaatctaccctacgctgtcttctcaaccgaaaacaataaagttcaccgtatttgtgtggccattggagagcatgtcctggacctgaaagctgtctcgcagttgtttcctttccaagttcagaaaagcctgcaggccgaaactttgaatgagcttatgggattggactttgaagcttgggatgtggtaagaagccagactcaaaagctattgacgaagggttcagaattggaccacaatgtggacttgaaggcggtttccattgtgccacagtctgagatcaagctgcacctgcctgcacagattggtgactatacagacttttactcatccatccaccatgccaccaatgtcggcattatgttccgtggaccagacaatgctctgatgcccaactggcgccatctgccggtgggctatcatggtcgtgcaagttctgtggtggtttccggtactcccatccgtcgtcctcttggtcaaacgtttcccgatggagcagagaagcccgtctttggcgcctgcaagcttctggatttcgaactagaaatggctttctttatcggtggtaagggaaatcagctgggtgaacccatacgcgtggatgaggcctggaagaacgtgttcggtttcacgctgatgaacgactggagtgccagggatattcagaagtgggaatatgtgccactgggccccttcaccgcaaagaatctgggaaccaccatctccccttgggtagtgcccacagctgccctgaagcccttcgtcttggacaactttcctcaggaaccggaggtgcttccctatctgcgccagaacattccctttaactttgatatcaacctcgaggtgtctttgaaacccgccgatcaaaacgaagcgcttatttcaaagtcgaacttcaaacacctttattggactccactgcagcaaatcgctcatcacacagtcaccggttgtaatctgcgtcctggtgatctgatggcctccggaacgatctccggtgagactccagactcgtacggatcacttttagagctctgctggaagggcaccaaaacattggagcttccgggtggtaagaccagaaaattcctccaggactttgacgaggtcatcatccgtggccactgcgaaaagaacggactgcgaatcggattcggggagtgtgtgggtcaggtgctgcctgcccaccccgttccgcagtag

SEQ ID NO: 36894 - protein, 349 aa, DROSOPHILA
MGLDFEAWDVVRSQTQKLLTKGSELDHNVDLKAVSIVPQSEIKLHLPAQIGDYTDFYSSIHHATNVGIMFRGPDNALMPNWRHLPVGYHGRASSVVVSGTPIRRPLGQTFPDGAEKPVFGACKLLDFELEMAFFIGGKGNQLGEPIRVDEAWKNVFGFTLMNDWSARDIQKWEYVPLGPFTAKNLGTTISPWVVPTAALKPFVLDNFPQEPEVLPYLRQNIPFNFDINLEVSLKPADQNEALISKSNFKHLYWTPLQQIAHHTVTGCNLRPGDLMASGTISGETPDSYGSLLELCWKGTKTLELPGGKTRKFLQDFDEVIIRGHCEKNGLRIGFGECVGQVLPAHPVPQ

SEQ ID NO: 36895 - DNA, 13759 bp, DROSOPHILA
cgaaagacacttttcaagtgccagagccctcgcaacgaaaatacgctgacgcattggatcctgcccagggagcaggagctggagcagcagcaggaccaagtgccaagtgccaagtgtgtggtaacatcctacgccagctgctccgtgtgtcagataagaatggaagtggagtgggtggaactcttttgcggcaagtattcctagggttctcgttgtttaagcttctccagtttgatggacgtcctttttggtcctgctgctcctgggctctttacccaagttgcataacatggccatagatgttctctggccctcaaaagtatgctacgaaacgcgttctattggaaatgatgcaatttcactctgagatacatatctattttgcatagcccaagtgggcgggcggcctagctttgacccaaatttcgtttttgttctatataccaggaatctatatgctttggcttctatatctaagcgcacatatgtacatatatgcgggaaatgaaagtaattatagggttatttttttttgtttcattcgacaggaaactctcataaaaagttgtgggtcattgtaaatgtcagaaacagtggcaaaattagtttgttaattagcttttcatttggtcgccccatcacaatctatattttcctttccctttatcccgttttattatttctttagcattcaccaggcgtgcgcacatatttcatgtgtatctgttggatactttggggcgcgcatggccgaagctccgcccacgcaaaatggccttaacaaagatggtttccgaaaaatcaatgacgtcacccggagaatttcccgcattttcctcagccccactgttgttgtcgttgtcgctgaaggttatgcaagagattgaggagtagtatgtatatacataggtacgcttgtagtggtatatgggcagccattttttggatgcgaaaagcttcgtaggcaactcaggcggatgctgctgctcatagctccgcagatcgtcagcgagtgtaggctgctcagttccctaagtttcccaaaccgaaagtgaaagttgcccgaaacctgtgaacctgtgaaaatatatatacatttcaaatccaatagtaattcccagtccgttcaatcagcgaattgttgctcctccgtttcgcgagtgattttcagtgttttttgttgttgctaggaagaagagaactctgtaagttgtcgttggtttagaccacaagtagttaatcgcagctccatctcagagatacatttcgatacatttcgtactcgcacattcctctagctatatcttttcgaaagcctcgtcggtgattcgtcgccccccgcagacagtcaaagtgaattacctaaagcagtatatcgacgatatccgcaggattatcggtaagactcccagacgattttgttgcataagtttcgcactgtccaaggttttcgccattaattgcagctgtcgcgctgtctgtatccccatgtaaatcaagcttatgtatatatataagcttatatatatatatactatatatgttcgttccgtcgcaggaaattggcttaacactcactgcgcaatagcagatggcgccaaaagtgaaaaggaggggccctgaaatccgtgtatatgtggcatataccaaatacttacctcccacttggagcttgcccttcagttgtccttgtaccaacagcccccccccccttctcgttcgccaaactccgcattccattttccattttccactctgtttatttacacgcccattgcattttcgcaccgtttgtttgtttgcttgtcttggttatgcaatttgtgtgtgtgggttgttggaaaatgggggctttcgaagtgcaaggacttatgtaacacctgccccgaggacccacggccttcggtcgattgcataacattgactcacttcatttggccgagctccatttttccttatcttgctgagtccgcactttgcgtttcccccctaataatttcatcacgttttttactctgtatcttttcagaggagaaaatgtcgctgaatcccaacgggtataaactgtccgagaggacgggcaaactgacggcatatggtgagtatctatttgaatttaaaataatataatgtttcataaacaatataagaaaacagattcgggaagatgaattaaatatgcgtatgtatatttactctctagagaactcaggtttgttttagtctaccaaaaaatccttttgtaacccgattttaaagagcctatattagttttagatacgaaatattagaaagcgtggtattatcgttgttttgttttaaaaatgttattttgataagatttcaaaatgcttaaaaaagtcctttggttatacaacacagcaaggaatagaacaaggaccctacagttaagttccctgactgtcagatagtaaacactttgctgaggtatctgaggcatctgaggtaaaagtaatgaggtaaaagtatttttcccttttggtataagtattgtacattgtatctgcagcgttttgtcgataagtaattaatattccatcgggtagctccttgtcataaccataaattgcaagaaaacaaggacttagagctagccgagagcaagaatttattttcgaattgtgcaactccaacctgtcacattccggcacaagaaacatattttgcgatcatgtgtctggggggcgattacttcgccttggtaataatcctggcaaacattggtcctacgcataactgcactcgaatcgcatcgcttttggctgggcaaataataaacgagtgttaaactgacactgccaggaacagggaacagaaaatgggcaagctgggcaactggcgcacaggagtctgctgtttaaggacatggacaagcggtgggctgtccaggacactcgtgtgtccttgataaatggccccgcactggaagctccttgtgtttcgtgtgcgtttgctgcctctggtgaagcgtgaaactggcgactgttgccctgtaacagatttctgctcgacaaacacgcaacaaacagacagaacagaacagaaagtcaaacaaaccaccaccattcgatgtacatatgtatgtatgtgtgttgcacaaggaccagaaaggtggcaggactctccccgaggcggcagacgcgtgcctcagattgaaaggccaacaaacataaaccgtttagtcacaggatattgctcacgctcgattccaggacgctcgtgtgcggcggctgctcgtaatgccttccaaggactcgcaggactctcggctgggccaacgtctgcctttgacactgagcacccaccgaagcagacgagcacattaaattttatttaacttcttggccgtaaagtcgtggaatttttcaaactgttacaatttgtcgcaccacctcccccaacgaaaatggtaatcatgcgcaacgttaagtttgcaattgatttccaagctggcttctaatggagctgctcccatttgctcgctggcttagtggccactgccgatgcttaaacgaaagccccagtaattaattgcagccaccgcagaaggacgaaggcaaggacaccgagaccaaggatatgtacaacccacaagggtgtgatgcccaaatcctgctagtttccgaataagcttcgctgatgtacagcgttttaatcccagtgtttcgttattccgggcagtaaaattaaataaaattgtaattgaaagacatgaaaattacactcttaatgtataataataaatgcaatcgctataaaagttttttattaccgctaagtgaatattaacgtaatgggagaatagaggtacttcaatgcaaatagaaatatgtttaaaacatagaaaaaattaaaaattataaagaaattcttatgattattccaaattctcgcagtgaatggatagaaatagtctaaaaaaataattgaaatctcatcttgccccgtaggacattcgacttaacttaccttaaagccagtcatctctttttacgactgcgccagcccacaaatcattgtaataataatagccatatatcacgataagagaggaagaccattttttctgtcagcggtggggcacgcttttcatatttaccgataaggaattctcatttggttttttccgcaccctcttttcataccgctattgtttttcctatccagatctcatgcccacaacagtgaccgctggaccggagacacgggagttcctgctgaaggtaatcgatgtgctgctggactttgtgaaggccaccaacgaccggaacgagaaggttctggacttccaccatcccgaggacatgaagcggctgctcgatctggatgtgcccgatcgcgccttgccactgcagcagctcatcgaggactgtgccaccacattgaagtaccaagttaagacgggtaagttaaggatctctattattcccgaccaataaatctgaacttctattgaatccctggtttccccgagatgtgtgatgaatatattcagaggtgatctaagcttgctgacttccttatcatcaccttgtgaagtttgctcagttggggattaatcaaatttgtccctgcttagcatatgccttttgtccgtggaatatggttcactttttaaggacgagcgcaggacgcgtgcctctggaccttgcggtggcattagggcacaaagtgtgcagccctctagataagcacattagcatattgatggcactcgggcagatctactcgtcctggtcgcaggaagcagacagcatacagcagacaatgccattttatggcccattgagcagcaccccggcttgtttacacctttcaaaaacactcgcctgggggtccgtagtctgtagtaatccacgcgattcagatccactcggccatcaatcataaatcgggcaaaagggttctttgtgggcgcggctttagcagccaaaagtcattcgcacgtttcacttttaactttttcatacccactagtggatgaaaaaggggatattagggaggattaagttcagtactcactagtacttattcatatatgtaagatgaggttttgacttgggatctgatggaactacctgccagttttacaataagatttataaaaatatatataataatgaggactacattggtatgctacttggaatgtatcaattgagttcctaatataatttcgaaattctatggtatccccaagtcgattgcttctcacatatttcgctccagcttgttttgaatgtccttgctgatttgatttcattgaaaattaatgcgagaggcagtcgctccccaggcgagcgacgctgtctttgtcctttgtccgatgtttgtgcagtcctcgcacgtgaccgcaattgtgtttggagtatcgataataagcgtatttactctagccaacccacaccaacgcacaccacccactccaacccatgtggaagcaacgcccccaacctccggaaactgcggccttgtctcggaagcaggcgtcgcttcccccgatttttctcgcaggaaatgaggctgctgctgtttagccgtctgctcccatttggcttgctaaaaattgaattaaaactctacgcaatcaaggctgcaactgaataagctcagattgcatgatgcgaaacttttgggaaagaaaaagaaatgtaattaggatgcgtagtgccatggaatatgttcaagttgtggcctaagtttgaattagtttcttgctcattacgcttggcaagtgggctattgttaaaataaagttttaatgtcataagttgtcataagtttcgaataaaggggactaagtctctcgcaattggaattgctatttaaaatagtaactaattttagtgctatgtttagtgctaatgtttctcctcagaagatagcactgtcaattattttcctctgagccagctcttctccctgcagacccgataagagtcccatttatgatccttaatctcacataatgcgcgccctgtcaaacgggcaacctgatacgaaggaaacgacttctcttccttcggcgaggactccataaaaacgaggggagctttaatcaaaatccgttgttattttctgactcgctgcattcctgatcctttgatgcgaatgaatggctgactgccgacgcgggggtgaatccgctcgattcgaggactcgagtccttccaacgagcatatcctggccacatgcgcaaattgaaatgtttggatgccaacgctctgtcagtttacacatggggaaattaataaaagaaaaaaaacggataagttgtaaaagttcagtaaactggaaaatattattaaactgtttttttttagattgtttgctttggcttatacgaaattttagtatgatagtttttatgttgggtaatgtttgctgtgttctttggcttgcaattattttttaatcattacttagtggacaattttttttttccaagtgcatgtattttatttctgtgggtggatttagccttgtgggcaatgggattttaatcacacgacttatggcactcaagatgtgaactgacagacgccgaagggttcaaactggagtatagtggagcggggtaaaaatccggcagttggacagcttcctgatggtgactgaaagcattttgtgattcttcgtgggagttttgccccactctgcacatatttcaccccaaaatcgaagctcggcaagtcgcaattagctacaataaatgagcaatttatagagctcacagaatgcggggtctaaggattacagggcaaaacttgttgagccggggacacggatttcgagcagactatccgctattgattcaccaggaccttgtaccgtctgcccttgaacatatgcacttccggcagtctattcctatacacattcttcttcctttcgggcccagtcagccgtgttttggcccggcctttgtttcacttgccactggcctcgaatatatttttaataaaacaaaaaacgaaaaacattgggtggctgatggggcgggcgatgggttgttgggtgaaggcagaggcacagctgccaggcacatctgctgtcagcttagaatcactcggttctccggagaagcgagaaaagtccccagaaaagacttggagagacagccagacagccgtggctaaatggaaagcattttcagctacattaggcaggcacatacaaactgtcaaaagtattaccactggaaatattaattaaagtttggaattcaaatttagagggcggacttacaaaatatttgatgaaaggtctctactaaaaacatatacatatattttctttaacaatttccaggacatccccacttcttcaatcagctgtccaacggtctggacctgatctccatggcgggtgagtggctgacggccactgcgaacaccaacatgttcacctacgagattgcaccagttttcattctcatggagaatgtggtgctgaccaagatgcgtgagatcattggctggtcgggtggcgattccattttggcacccggaggttccatctccaatctgtatgccttcctggcagctcgtcacaagatgttcccgaactacaaggagcacggctcggtgggattgcccggcacactggtgatgttcacctcggatcagtgccattactcgatcaaatcatgcgctgccgtttgtggactgggcaccgatcactgcattgtggtgccatcggatgagcacggcaagatgatcacctcggagctggagcgcctgatcctggagcgcaaggccaagggtgacattccattctttgtgaacgccactgccggcaccactgtgctgggtgccttcgatgatatcaacacgattgcggatatctgccagaagtacaactgctggatgcacatcgatgtaagaacaaaacaatctaattgagtagaaaaaaaacaatagatacttaatagttgcaaggatcgtatattgtaatattaattactaattttttctgattttttccaggctgcttggggcggtggattgttgatgtcgcgtaagcatcgtcatcccagatttactggtgttgagcggtaagtttttagaaaaatatatattacatttttcaaataatatttttggagttgtagtagttaagtcctagtaattttctaagtgcggtatactttttatgtagcaaattaagccatcttttactccttcaagttccagtgagctgctcagaagtgctttaaaaaccccttggaaaaccttatcttttgtcccaagcaattgctgtgcccattcatcatcgttcttgacatgaactttgtgccttgggcgccctcatcttcagggccagtcaaaacaaaaaattgaaatctctttcccggtttgggtaaatttaaatctaaatgctcccaaatggcccgcatcgctcgactttgccgcccccttttgaaggtcggcggcgtgctgaacatgtgggaaaaatctcaatttgtcatttagtgcctccatcaggtgttcagagcttacagggattacaattcacaagccgagtgcattttggaccgaacaaacaaatgaacaaagtggatttccccttctcccattcccaaccaatccatctagcccaggggggtgttttggatggccatgggcattacttacacaacaattacgccaaacaatgaatgggcgggcaagtcaggaatagggattcatccccggggctaggaatttttaattttaaagtcgcaacctgaaatgcactttactccatctccagcacgacctacgtttccaacccgaatccatttacttcggcaattcatataacatctttaattctactcagcatttcgggaagcttaggcaaatgcggcaagtgcagctgtcgtggaatcgacagcttgcggtcaagcagccgactccacagaacactttcaaattgattgccatcgacggaggaggacttaacatccactcccgttcccatttcgacttccttccgtccatccatcacccaggcgaacgccttcaattagtttgaatggatcctaaggcccgaattgttgtggcatgcaaatcgaggtccttaattgaaaggctctcagcgcgaattaatcattaaaatgcccatgcagctgacaatttgtggccttcggcggcttacgcaactgattaatggtccttcgatggaggaggctcttaaatccgctgagtttcaatttgcgaacaaacttaaaacaatcgaaaatctcttcttaaaagtttagcttcacatgccaccgctcaatcaaataagcattagacgtcaaaagtgttacgactaaatgatactcctctaagtttgaagtcaatctacattaaagcacagagtttcaaacttatttcaaatttactgcaacaaaatatttaaaatactttctttataagtttatgactaatattatagtatttaaattatttgttatatgctaaaccgttaaaacaaaccatataccctttttcccatagcagcagactgcttgaaaaagtgaagcatacttcaaggcactccataaggatcatgtttatagacacccactcactcactcacacttacaagcccagcccacacacaggcacacactctcagtgcccacataactgtaaatagctcccacagggatgtttagctgtcaatgtcaaccctccagtgccgcagggggttgtcctcgctcttttgaattcaattaaagtgctgcggcctgaaattgccacaatttatggcacttgccaggaccttccgcatccctccccccattagattttttttttttggaactcttgtcgaacagcagggggtgggattggtgtccttgggagtgggaattgtaccgcagtgcggcagcttagtgttaattgtttgtaattcgtaattgaatgtccatttaacgccgtgcgtttaactcttgcagtgccgattcggtcacctggaatccccacaagctcatgggagccctgctccagtgctccacgatccatttcaaggaggatgtaagtatactattacagagatatcaatttattaaatcatttatgctaggtgttttaacatttttttaaatttaaataaagtttggcaagatttcaaggcttagaaagtggtagcatcgattttgcagagcttgtggaatttcgatgggagttgtggcttaagtccatgttacaaaagtatgcaacgtacaatttgttctgcagccccaccaaccaaacgaaattgtatatcctttacagctgtgacctcacatttttcgtattttattacccaaaatcactgaaatcattgtttgcaaagtaataaacgaataattgctctttgagttgcaaattaaaattaaaggccagcctgtcggaggagtcattccaccaccaatcccccccgcagaaactcaaaccaagcgatacaaattggaggcatacccctagctcaaccccatgctttaaattccttttccaaccggcccattccccctcgacggttcacccaaaattcttctggatgcacatcgaacaatgtttgtgtaaagaattccaattgtactccgaacaattccttgttgtttcgttccgttcgttctgccaaaccaggagcgaaatggccaagggtagtcgcacacacaatgcgtaatgaaatctttgacgaaccaaatgcgccaagtcaccaccctggcttttttacatcccgtgcaatatgttaccatcggtcacagttgcgtcttttggcaggcggaattttaattaaaatttcagcttgacttatggacagcggagttacgtctgctgcgtagtgagcgatttcatcccaaatcgatatgttcatactcgtatatctattgtacatctttcacgcagggcctgctcatcagctgcaatcagatgtcggcggagtatctcttcatgaccgacaagcagtatgacattagctacgacaccggcgacaaggtgatccagtgcggccgccacaacgacatcttcaagctgtggctccagtggcgggccaagggcaccgagggcttcgagcagcagcaggaccggctcatggagctggtccagtaccagttgaagcgcattcgcgagcagtccgaccgcttccatctgatccttgaaccggagtgcgtcaacgtctccttctggtatgtgcccaagcgactgagaggagtgccacacgatgccaagaaggaggtggagctgggaaaggtaagatcgtcattatatagcggtatagtgctaaacactttccaattatccttgcagatctgccccatcatcaagggccgcatgatgcagaagggaacgctgatggtgggctaccagcccgacgatcgccggcccaacttcttccgctcgattatctcgtcggcggcggtcaacgaggcggatgtggactttatgctggacgagatccatcgcctgggcgacgacttgtaaggggtttcagtctagtttggctcggctcgtctcggttcggttcggcttcgattggtaatggtagatctcacacaaccaagaagtatcatttaggtaaaagcatatcaggagaccggctgaagagcccagagatccgagagccggcgattatgggtatcccggtaatcatcagagttcaatgttgaatgtacatttgtttgtatctataacgtgttgctagatgttcctttacgatttctcattctgttatccgttgaccgttattcgttaagcgtcgttatccgttcgtcccggagttggaaaaaaaagtactatgtataatcgaggcgttttacttttacgttcgttggcaactatatctaaatcaatggacggcgagaggagaatccacaagttatatttgaatatctatatgtataccgaaaaataacgatagaattcagagcatagaagccaccgctccacacacgcaccaccaaaacgaaagacagccccagtcccacacaaaagtactatgatgatataatgatatatatgtatatgatatagaaactgttggaacgctatcttaacatatcaggagaagatgaagagccagttgaggaccttagttcaattcgttgatttcactttgtttgcaaacagagaatgttttcaaatatatcatatctatagccatgcgcgtacctttataaaaacaagatcgaaagagacctgtgcttgttaattgtatagacaaaccaaagagaggggatctgtgccgcagaacccatttagtccatgtatcgaactgtgctatatatagagacgtgaatacgtataatcgaattagttggagtttagtttcaacaaaatggctgacaagtatatatgtattgcccggagtcaattaagctcaattacgaatgttggaagattcagattttagttaagttttaatcagttagttgttccagaaaggttggtagtgaaatgtccctatatgaaaagaacacaatcagacattacattctacctgtgcacaaaactcgtttgtcaattccgcaaaagtaagaaaataatggcataaaaactacaataaattcaacaattatagtactttaaagcgtgttatctaagtttatccagcaccacgctcattttatgtatgtataaattaatgtatgtatatgtatttgcagatccaaatcaatgccaaacaagaattattccaacatctatataaatgcaaatgaatatattatatatatgaatatatgagtaaaataaataaaagtaatcaaagcgcaattaaaatttctcttcattatgtctaaggcgctctttacctttgggggcttggttttgctaagagagccgaaagatcttgtggtctgagcacctatataaggcggatcgtgaatagaaaatccctcagttgttatctagctcactctggctccgcgcacgctttttccgcttctctgcttcactttattgattcgcaccaacctgcccaagttttccactttgagtgcttttaaaatgtcccagagttttgtgccagtgccagagaacagcgattttccgctggaaaatctaccctacgctgtcttctcaaccgaaaacaatgtgagtgatatcatactgaaatcaaatcttatatttttatgagattttagaacaatggtctcgctgttgtaaatgataactaaagtggtaaatggcaaagcaaatgttcctttaactcagcctgttttccgtgtaatattttcaagtttttcttcagtttcatgtgactttggatcgttccacatgttctagaaatcaactttagaacagaaaccgctttggggcatagcatttgcatacatcatccaagacaaactagtttgtttacgaaaacaatatgctaatccaatctttaataccccagcaaccaggttctgataaggccccatatcatatatcgtatttgtatatcgtaaatggtgtttttcatcttaccatccgtagaaagttcaccgtatttgtgtggccattggagagcatgtcctggacctgaaagctgtctcgcagttgtttcctttccaagttcagaaaagcctgcaggccgaaactttgaatgagcttatgggattggactttgaagcttgggatgtggtaagaagccagactcaaaagctattgacgaagggttcagaattggaccacaatgtggacttgaaggcggtgtaagtcggatttattataataatttattattcatagttaataatttatttatttatcagttccattgtgccacagtctgaga

SEQ ID NO: 36896 - DNA, 3042 bp, DROSOPHILA
gatcgtcagcgagtgtaggctgctcagttccctaagtttcccaaaccgaaagtgaaagttgcccgaaacctgtgaacctgtgaaaatatatatacatttcaaatccaatagtaattcccagtccgttcaatcagcgaattgttgctcctccgtttcgcgagtgattttcagtgttttttgttgttgctaggaagaagagaactctaggagaaaatgtcgctgaatcccaacgggtataaactgtccgagaggacgggcaaactgacggcatatgatctcatgcccacaacagtgaccgctggaccggagacacgggagttcctgctgaaggtaatcgatgtgctgctggactttgtgaaggccaccaacgaccggaacgagaaggttctggacttccaccatcccgaggacatgaagcggctgctcgatctggatgtgcccgatcgcgccttgccactgcagcagctcatcgaggactgtgccaccacattgaagtaccaagttaagacgggacatccccacttcttcaatcagctgtccaacggtctggacctgatctccatggcgggtgagtggctgacggccactgcgaacaccaacatgttcacctacgagattgcaccagttttcattctcatggagaatgtggtgctgaccaagatgcgtgagatcattggctggtcgggtggcgattccattttggcacccggaggttccatctccaatctgtatgccttcctggcagctcgtcacaagatgttcccgaactacaaggagcacggctcggtgggattgcccggcacactggtgatgttcacctcggatcagtgccattactcgatcaaatcatgcgctgccgtttgtggactgggcaccgatcactgcattgtggtgccatcggatgagcacggcaagatgatcacctcggagctggagcgcctgatcctggagcgcaaggccaagggtgacattccattctttgtgaacgccactgccggcaccactgtgctgggtgccttcgatgatatcaacacgattgcggatatctgccagaagtacaactgctggatgcacatcgatgctgcttggggcggtggattgttgatgtcgcgtaagcatcgtcatcccagatttactggtgttgagcgtgccgattcggtcacctggaatccccacaagctcatgggagccctgctccagtgctccacgatccatttcaaggaggatggcctgctcatcagctgcaatcagatgtcggcggagtatctcttcatgaccgacaagcagtatgacattagctacgacaccggcgacaaggtgatccagtgcggccgccacaacgacatcttcaagctgtggctccagtggcgggccaagggcaccgagggcttcgagcagcagcaggaccggctcatggagctggtccagtaccagttgaagcgcattcgcgagcagtccgaccgcttccatctgatccttgaaccggagtgcgtcaacgtctccttctggtatgtgcccaagcgactgagaggagtgccacacgatgccaagaaggaggtggagctgggaaagatctgccccatcatcaagggccgcatgatgcagaagggaacgctgatggtgggctaccagcccgacgatcgccggcccaacttcttccgctcgattatctcgtcggcggcggtcaacgaggcggatgtggactttatgctggacgagatccatcgcctgggcgacgacttgtaaggggtttcagtctagtttggctcggctcgtctcggttcggttcggcttcgattggtaatggtagatctcacacaaccaagaagtatcatttaggtaaaagcatatcaggagaccggctgaagagcccagagatccgagagccggcgattatgggtatcccggtaatcatcagagttcaatgttgaatgtacatttgtttgtatctataacgtgttgctagatgttcctttacgatttctcattctgttatccgttgaccgttattcgttaagcgtcgttatccgttcgtcccggagttggaaaaaaaagtactatgtataatcgaggcgttttacttttacgttcgttggcaactatatctaaatcaatggacggcgagaggagaatccacaagttatatttgaatatctatatgtataccgaaaaataacgatagaattcagagcatagaagccaccgctccacacacgcaccaccaaaacgaaagacagccccagtcccacacaaaagtactatgatgatataatgatatatatgtatatgatatagaaactgttggaacgctatcttaacatatcaggagaagatgaagagccagttgaggaccttagttcaattcgttgatttcactttgtttgcaaacagagaatgttttcaaatatatcatatctatagccatgcgcgtacctttataaaaacaagatcgaaagagacctgtgcttgttaattgtatagacaaaccaaagagaggggatctgtgccgcagaacccatttagtccatgtatcgaactgtgctatatatagagacgtgaatacgtataatcgaattagttggagtttagtttcaacaaaatggctgacaagtatatatgtattgcccggagtcaattaagctcaattacgaatgttggaagattcagattttagttaagttttaatcagttagttgttccagaaaggttggtagtgaaatgtccctatatgaaaagaacacaatcagacattacattctacctgtgcacaaaactcgtttgtcaattccgcaaaagtaagaaaataatggcataaaaactacaataaattcaacaattatagtactttaaagcgtgttatctaagtttatccagcaccacgctcattttatgtatgtataaattaatgtatgtatatgtatttgcagatccaaatcaatgccaaacaagaattattccaacatctatataaatgcaaatgaatatattatatatatgaatatatgagtaaaataaataaaagtaatcaaagcgcaattaaaa

SEQ ID NO: 36897 - protein, 510 aa, DROSOPHILA
MSLNPNGYKLSERTGKLTAYDLMPTTVTAGPETREFLLKVIDVLLDFVKATNDRNEKVLDFHHPEDMKRLLDLDVPDRALPLQQLIEDCATTLKYQVKTGHPHFFNQLSNGLDLISMAGEWLTATANTNMFTYEIAPVFILMENVVLTKMREIIGWSGGDSILAPGGSISNLYAFLAARHKMFPNYKEHGSVGLPGTLVMFTSDQCHYSIKSCAAVCGLGTDHCIVVPSDEHGKMITSELERLILERKAKGDIPFFVNATAGTTVLGAFDDINTIADICQKYNCWMHIDAAWGGGLLMSRKHRHPRFTGVERADSVTWNPHKLMGALLQCSTIHFKEDGLLISCNQMSAEYLFMTDKQYDISYDTGDKVIQCGRHNDIFKLWLQWRAKGTEGFEQQQDRLMELVQYQLKRIREQSDRFHLILEPECVNVSFWYVPKRLRGVPHDAKKEVELGKICPIIKGRMMQKGTLMVGYQPDDRRPNFFRSIISSAAVNEADVDFMLDEIHRLGDDL

SEQ ID NO: 36898 - DNA, 9673 bp, DROSOPHILA
atgcaaattttcacaaaacaacacgtcgcgggcgacgagacaaagcgaacgagccgagatagagagaaattaatttataaataaaccagcagcagagcagtatgaccgtttgtctgcgcatatcgatggttcgcgccagcgaaatcgaacttatcggaacggatggtaagaagtatagtttaaattttgttaaaaattacatcgaaaattaagcaataccatttaccgttaattctcgtgcttagttttttgttattaaacttactgcaagagatattaaccaccatacattcttataaattctactttcacaattgaaccgtggatagggcatacctaatacattagattcgcatgatttaatataattcgtattcgacttgaaacgaatttgtgtatggcaatctattgtattgtatcaattgtattgtatcataatatcggacaggcaaagaacaatgaagtcgtggagattggcactattgttcctcatttatttcttcgaattggcttattccatacgtacctgtggcccaggacgagaaaggaactgtcatattaatactaagcaaaaatatcaaaggccgaaacattattaacgtaaccacatgttaacagtaagcacatattttaaaatgagggtacaaatatgaaaagtgtatcgatatttatttttttccagaaatgggggtcacaccggcccaatggtcatctctaagttatcgtaacgaaaaatatagttctgttgttttaataattttagtagaaagcaaatctgctattatgaatatcaatttaaattaacgcatgttccagttaactaatttgttataaagcaaaagtacatgcatatataaaaacaatactggtttttctcctcctctctcgctgtttcgctctttccgctctttttctccacaccgcattcgtaaacaaagacaatgaaagctccagttgaacggctaaagaggcctcaaagcccccagattgtttttcgccgttgagccgagcgcacgtattcgaaaaaacaactaatagtgtataatagtgcagtattgtgtaaaacacgcgcgtctctgctttctcgctctggcacccacccatacactttcgcgtgcccatacacacatacctgtaagagagcgagatacgaaaaacggtgcatggaaaataggaaaatcggaactgaaaaagtcggaatttcgtttaatcaagttagctgcgcgtactactgtcagtttcgaattgaaagtgccggcccagggtttttcaaatagtcatatcgttaagaaattcgaaataagacacacacccacaagttctcggacaaaaacatctcggcacgaaaaaatcgatgcagcaatgtaaaaatttgacaaactcccgtaccacagaatgaaagcaacaattgagttacacacatatacatagtgtagttaagcggtgtgttacgttcatatacatactcgtaacaataataaaaaaaagcgcggcgcaacaacccgagcggcttattcatccatgcaggagattcgagatacaaaacatcagatacaatagcaaaacagcagtctagcatcgaaattttagtcagttgaaaaaaaccgaaaagcacaagaaattttcattttgttcggtcccttaacgataaatcctaacgtttttggcaattaacgaatattgtagctgtggaaaggagccacactacagcaaatacaccaacattaagcggttgataaacccgaactcagagcaacttgaagactggaagacatacgtaattacaacaaattgcagcaacaacaaagcaacgcctacgacacgccagtgattacaacaataatagcagcaaaagcaaaaacgaaattatttaccacaacaaggcataacctgttgtagctatttcactgtactgcattgttgctcacctctcggcatctaaaattgggcattcacaagcggcttatagtaaatacgcgtttaaccatcggctgtgaatacacaatcattatatagccggaatctgcaagtggcacacctgtggccacgggtcagttgaacaccagttggagcaacagcatcgccatcatcatcaccatcaccatcacagccacaagtacacacaatgtcgagactcaccgaggaaatggtgatagcgcgggccaagcaatccgatttgtccctgatcaaaaagctaaattgctggtaagtagacagcccaaataactagaaatatttatagaatatatcatcatatcatactgaataacgaaaggaatgcttgcattagtgcaataactagattgtttgtaaatttttagtcagcggcatattaatcatgctttagcaaagttaggacgactaattgtttattattgttcagactcaacccactgttaatttcatcgattttcgatctaattttcgcctgtgcattgatctattgctaatcgtgctggggcaggtgcagccactatagtgaaagcttcgatctgtgttgaatgggtctgcgatctggtgtctggggtttgggggatctgcccactttgctgctcacttcggtcgctccggctgctttcactcgacccaattccaggggcaatcttctaaccagtttagaagtgtccactttggagcgagtcacgatttcctggactggaaaaacacgcgcccctcgagaaaaacggttggaaaagcgtgaaaagcagttgaactactttccgtgatgggcccccaactcttgacccatctgcgataagcgtgttgcctgctaagagggctccactgtacattatttatctttattaaaatgccatctattctgtgcttatttcaggggcagtgatctcagcgatgtgtccatcatcaagcgaatgcgtggagtggaagttctggctcttaggtaagtcacaagtcgtgaaatatttcttctataaggatcattttgatttcctgactcggtgccttttgattgatacaaagtgtgcggctcgccgccgagagaatgcggtagagatatatatattaaaaagctagcgagatatttgctttccagtgatgtcatcgccccatcattaggcaagctcaaatacgaaagatactttggcacgctcaagcgcgtaattaatgcaaaaagctggggacgcagaaaactacagaaaataagctaaaagtcgtgggagctcccaaattggcaatagcaactggccgcgtacttttccaagtcgcgtaggccacactgcgtagtgggcagatactatagttatgactcgtatctgctagatacttttgtatctcgctgtgccttgtacctcatctggtactgctggatacttgttgtacttgcatgtcgctcgataagtttgcatgtgctgctgctgctgctgctgcttttgctgatttcgccacttttgccataaaaggcgacaatcattttgactgccaaggtcgccgaaatccatttcacccccccaaaaacttctgtcatctgttggcaatgtgctgaaaactctcgactcttgcgattcgtttaattatgcataaaacagatatagatggaggtgcatatatacaagagttcgtggccttatagggagatttggcattgaacttaggggaaaagaaccgtgagaataacaggaaataataatttaggtatgggcgaatcagctatttcagatgaagcgaataatatgtcgacccagtgaacaggaagctataattatggtattgaagttgtagatatcgcaccttaaacagaaattagatcttatatatttatttcattagaaacaggaaatcccaaaggaggtgtagtagttatcagaataagaaaaaaccaacattaagcaaatatggatatcatatatattcatggggtgaagtaaagtataaataaaataaccttgaacatgaattgacaccgatcttgatcaaaagcaaaagtgctccttttttggcaagttgttttcgtatctttatttctcaatgagtcatataaaaatatatgtaagtctgttagatatttgaaaaaatattttttcttgctactgcattgctaaatatgtaaacaatatgttcttaaaataatagaagcttatcttgagtacatttttgtgccctaaattcgccaaaaaaatagagcttttgggttgcttcttgaaactgaattaacttgatagctctgtaggcacttctattatcaggaagctattaccgcaatcgagaactactcaactgtcgtagagctacatatatcagtctatagataatggtacgcgtttcctatatacaaacgtgaatgaataaattgataacaaattgacatggcaagcgtgtaagcccgagggcaataacttcttatagaagtctgctctgtttgcattactttacgtggttaaacaatatacaaggaaaacctttcagtctcaaaccgatggatagtagtgttttacgtggggttccctgctttgtggagcatttgttgtgctaggcgtggagtagtgttcgcaatgaatgagccataaatcagattggtttaccatacttcaggtaaaatgcgttggcgtagtctccatttcttggcagtatactcgcccattttgctcattaccattttcctacccatttccctgcgttgcatgagtgtgcatattgatttgacttgcgtgctgcaagcacttttctttttacctcccatattatttccacattcggtggtaggcctcaagtgctagataaccttgactcttcagaggaaacattgatattatgcatacttaagcagtggcactcctgcttctggtcctactcccgattggcctgatttatttggcgaactatttatagtgccacgaattccagataccagacattcactaaggcaatgcactcgtgtgccatttagcgatcttcctggctaagtttagacagttggttctgccatttcccacactgcgaaataggaaaagatgttttaggtgtccacacagggagaagagtatatagaaagtatatagaaattcattgaattgagagattctctctacatatctatgataatttggaaatacaattcgctcagtgtagaaaaatatattttctttacctattcaatcagttgggtgggcaacaaaatcatggcacgcttttggccatcggcaattggccacttcagagggtaattagcattgttgggagttcaggtgctaagcgggtatcgcccggaacatggggagggaggtttaaacctgacctagacgaagacaaatgatgacaatcagcttttccccctgccgagattctttaactgttattggtggggtattctgcgaagaatccgacgagttaatgaccagcacgcagctgccggagaatcttttgtgtgtcttttgagcatgagtcacggcagttagtttgctgtcgcctttgtcccgccaaagagaaagtttcttgaacctaaaatcttatgcttctgttgcagtgtcaacaagatcagcacgctgtcgaccttcgaggattgcaccaaactgcaggagctatatttgcgcaagaacagcatctctgacatcaacgagatcgcctacctacaaaatcttccgagtctcaggaatctctggctggaggaaaatccctgctgcgaacgagcgggtcccaagtgagtaacttcaatggataaattcatagtaatctattatcaataaaacgtgatatattctggctaaaagcattaacgtttgtcaacgtgccaaacgatgagatcgctctttgttcgaaaagcatataaatagttagttgttcataaattatagtatgtattatatagtatgtagagaagccctaataatcggtctcacctctgtctaaccacaatcacagctatcgttcgatcgtattacgcgccctgccgaacctcaagaaactcgacaatgttgaggtcacacagcaggaggtggaggatgcgctgcgtggaggcggagtcgccgcacccgaggacgaggtctacgaggatgcataccagcaacagcagcagtcgaggcgatcatcgccgcagcagatactgcagcagcagcaacacagctacccgcaacactcgccgccgccgcagcagcaatatcagcagcagcaacagcagcagcagcagcagcagcgcggctgcaccactcccacgaaagaggtaagtggctgccattgtctgtgtggattttcacacaccacgccccggtttagctgctataatctcttgccttggcaatgaactctgtaatcaacacttgcgcccgttttggtctatttctgttaacaccgaaccaccacctactaccattaacactgcatttccgaacaagccgccccagttgcccagtccgctggtcaaaaacagcagcgaaggaagcatcagccacagtgccagcgatctctaccaggtgcaggcggctcagccgctaaagggttcccagccacccacgcccaccaaggtaatgggaggtcagctagttgggagtcgggagatttccttttttcatttgctatatctatttggttgtttctctgtattagtttcgatttttaattccatgtttcttttgtatatgggtggtacatgtctaaaggagtgtaatgcaatgatctgagattagtctatatacccctatggtaccttagccataaatccccactaatcttgtttcggctttttgtccaggaacccgtgcatccgccatcgcccatgtataacaccataaccaaagagcagcgcacctcctaccaccagtacgatgtaagatccacaactactaaataacaccatgtgtaacagccccactccgcatccgacatgacaaaatattcagcttgtgtagccgggcgggcccactttaggggggggccctattttcgaggttcgatgttcgaggttcgagggtgtgggctcgtcacactcgagtggagaggaggtggaactcagatggggctagggactgggcatagccatcacgcgatggcatggttctcttgctttccccgccgcccgtctgtttgacgacttttgtgggttaagtcactcggttgactttggaatcgagtgcagagagatgggaactgggggacgaaccatgatggctcaagaagcccaaaatgagccatataaaataggtctttatgtattcatgcacgtggggaaaatatttaaccaaatagttgggagtattgtaatctttacgagatcggaaagtagaatgacgctagtaaatatgtgatataaatatttaaatatttttaagctaattgcattttaattacacattttctctctgtgctgagaaagggctagttcctccgaaaaaccactgaaccagtagagaattagccctcgccaaatgactggctgaacaatttgtcatgtgtggattgccccccccgggggactggggatgtggatgtgggggaggggggggggagagatatcaactcgtatctaacgtttctcttctgctgcttctctcaccaaccatgcactgatcccaattgcaacgcacaaccaaaacaactaaaaacgacccaaaactaaaatgcaaaccacaccactaacgcctcacccgcggactcgacgagcagcgctcgccgggatccgaccaggagagtagtccgcacacgtacagggaggtgcggcccacgccgttcccgcccagcatttctgcgcactcgatgaaggtaagactggccagcctctgtgttggagatgtagccatgaatgtagccaaggcacttgagggaaatgacactgtctaattgtcgcattctcgtacaggaatactaccagtcggacagacccgcctacccggcgcactaccgccacagccagacggacctaaccgagtgggaggagcaccagcaggtgccccaggtgcaccacaatccctatggcagccagaagcagttgcaccagccgcagcgacgcagcgcaggtccggagatgacgccctatcgtaacggcagtgcccgggagaacggcggcgaatgggatccggaggacaggtcgagggcgaggtgaggtcatcgaccaggtcatttggtggtcgtggctattagcttatttcattaagtgtaaacaacgcgacatatcacagatagccaggcagcttgtgtttattttaaatacgtacttcgtttatttttaaatgtgttaaaagcgcgccatttaaacaaataacctgtatgcatacaatttttattgaaaatcgattgattcgtttatgtaatttgcacgaagtgaaacactttggtacagaaaactgtagaacagttgtatgcatatagagtaattggtttatttgctaagcgatctgaataaaaattggtaatataaatttatgcatacacatttttcaggcgacccgagggaagatatagtgatgggacctcgtcattgtcggcctctgtgatgaatcactactcgggctaccatcgcaggcccataaatagggtgagttttacgagtatagccaaaaggccaccattgataaagttgacctatagctgaatcgcatcccgctttcgcagaattcaaatattctctccgccgcgctgtgtttggtgaaggagttagactacgccagtctggaggttctggagcacgctgtgcggtgtcgcattgatgagctggcgaacgaatgatgaagacgactctctaatcgcatgtcgattagctaatccaacgcctcagcggcgttgcaaaatacaaatgaccaggaaaactgaacacacataaaagacaagacacgagcagctgtaggggttgcgagaggaaaggggaaaactgatattatactaacgtcttaagcaacaattaacaattacaaatcagatacttaacgaggataaggattcatacttgccaattgaaaactgtcatagtgtaactagcaacttttgtaagcattttgttatgtaacgaactttgctattgtaaacacataacgaaacagtaagctagaacataatccgcctattgatcccagatcctgttcatttgatacccaatcaatcccaagcacagaccacaaaaactagccctttttttgtacttaactcgagaagatcgactagcgaactaatgtcgcccaaggcgaaggagcacaatgtatcttcctagattcttaataagattagttgaaatcatactcatgactttgttaaatatttgtacgcaaaagcaaataacgctaaaccttaattttaatatatttacctaaaatgcaatgaacacgtccagtttatgtttgccgttctctttttaacgattacgttggaaactaaaatgcaaaaaataaacaaattaacagaagatggcctctttcgaggagtattattattttaatgtattattaatgcttaatgtaatgtaaaagcttattcctgtttatagttcgatggtaactgaccagcagcgaatggaacactgttggagttctgggccatgtgctcatagatccaatcccgaaacatttcaacatttgtgtagactgctggaacgttttcctcttgacagccgatgccccagttaacgatgccagcctgctcatagcgcgatgggtccgcctccatggggcagaatagagcggatcctccgtcgccgaggcagtctcccgcatccttctcgccgccggcgcatatc

SEQ ID NO: 36899 - DNA, 2490 bp, DROSOPHILA
ttgagccgagcgcacgtattcgaaaaaacaactaatagtgtataatagtgcagtattgtgtaaaacacgcgcgtctctgctttctcgctctggcacccacccatacactttcgcgtgcccatacacacatacctgtaagagagcgagatacgaaaaacggtgcatggaaaataggaaaatcggaactgaaaaagtcggaatttcgtttaatcaagttagctgcgcgtactactgtcagtttcgaattgaaagtgccggcccagggtttttcaaatagtcatatcgttaagaaattcgaaataagacacacacccacaagttctcggacaaaaacatctcggcacgaaaaaatcgatgcagcaatgtaaaaatttgacaaactcccgtaccacagaatgaaagcaacaattgagttacacacatatacatagtgtagttaagcggtgtgttacgttcatatacatactcgtaacaataataaaaaaaagcgcggcgcaacaacccgagcggcttattcatccatgcaggagattcgagatacaaaacatcagatacaatagcaaaacagcagtctagcatcgaaattttagtcagttgaaaaaaaccgaaaagcacaagaaattttcattttgttcggtcccttaacgataaatcctaacgtttttggcaattaacgaatattgtagctgtggaaaggagccacactacagcaaatacaccaacattaagcggttgataaacccgaactcagagcaacttgaagactggaagacatacgtaattacaacaaattgcagcaacaacaaagcaacgcctacgacacgccagtgattacaacaataatagcagcaaaagcaaaaacgaaattatttaccacaacaaggcataacctgttgtagctatttcactgtactgcattgttgctcacctctcggcatctaaaattgggcattcacaagcggcttatagtaaatacgcgtttaaccatcggctgtgaatacacaatcattatatagccggaatctgcaagtggcacacctgtggccacgggtcagttgaacaccagttggagcaacagcatcgccatcatcatcaccatcaccatcacagccacaagtacacacaatgtcgagactcaccgaggaaatggtgatagcgcgggccaagcaatccgatttgtccctgatcaaaaagctaaattgctggggcagtgatctcagcgatgtgtccatcatcaagcgaatgcgtggagtggaagttctggctcttagtgtcaacaagatcagcacgctgtcgaccttcgaggattgcaccaaactgcaggagctatatttgcgcaagaacagcatctctgacatcaacgagatcgcctacctacaaaatcttccgagtctcaggaatctctggctggaggaaaatccctgctgcgaacgagcgggtcccaactatcgttcgatcgtattacgcgccctgccgaacctcaagaaactcgacaatgttgaggtcacacagcaggaggtggaggatgcgctgcgtggaggcggagtcgccgcacccgaggacgaggtctacgaggatgcataccagcaacagcagcagtcgaggcgatcatcgccgcagcagatactgcagcagcagcaacacagctacccgcaacactcgccgccgccgcagcagcaatatcagcagcagcaacagcagcagcagcagcagcagcgcggctgcaccactcccacgaaagagccgccccagttgcccagtccgctggtcaaaaacagcagcgaaggaagcatcagccacagtgccagcgatctctaccaggtgcaggcggctcagccgctaaagggttcccagccacccacgcccaccaaggaacccgtgcatccgccatcgcccatgtataacaccataaccaaagagcagcgcacctcctaccaccagtacgatcgctcgccgggatccgaccaggagagtagtccgcacacgtacagggaggtgcggcccacgccgttcccgcccagcatttctgcgcactcgatgaaggaatactaccagtcggacagacccgcctacccggcgcactaccgccacagccagacggacctaaccgagtgggaggagcaccagcaggtgccccaggtgcaccacaatccctatggcagccagaagcagttgcaccagccgcagcgacgcagcgcaggtccggagatgacgccctatcgtaacggcagtgcccgggagaacggcggcgaatgggatccggaggacaggtcgagggcgaggcgacccgagggaagatatagtgatgggacctcgtcattgtcggcctctgtgatgaatcactactcgggctaccatcgcaggcccataaataggaattcaaatattctctccgccgcgctgtgtttggtgaaggagttagactacgccagtctggaggttctggagcacgctgtgcggtgtcgcattgatgagctggcgaacgaatga

SEQ ID NO: 36900 - protein, 454 aa, DROSOPHILA
MSRLTEEMVIARAKQSDLSLIKKLNCWGSDLSDVSIIKRMRGVEVLALSVNKISTLSTFEDCTKLQELYLRKNSISDINEIAYLQNLPSLRNLWLEENPCCERAGPNYRSIVLRALPNLKKLDNVEVTQQEVEDALRGGGVAAPEDEVYEDAYQQQQQSRRSSPQQILQQQQHSYPQHSPPPQQQYQQQQQQQQQQQRGCTTPTKEPPQLPSPLVKNSSEGSISHSASDLYQVQAAQPLKGSQPPTPTKEPVHPPSPMYNTITKEQRTSYHQYDRSPGSDQESSPHTYREVRPTPFPPSISAHSMKEYYQSDRPAYPAHYRHSQTDLTEWEEHQQVPQVHHNPYGSQKQLHQPQRRSAGPEMTPYRNGSARENGGEWDPEDRSRARRPEGRYSDGTSSLSASVMNHYSGYHRRPINRNSNILSAALCLVKELDYASLEVLEHAVRCRIDELANE

SEQ ID NO: 36901 - DNA, 2804 bp, DROSOPHILA
aaaaatattggtaccacaaataaaaaacttttagatatgagttgtgaagatagcaacgctgttcaatcaaactttatctatagacaaaaaaaaacaatcttatcaatatatttgaaacatatatttgatcaaaaattcattcatatagtactgagtagtattgtataatattcagctcataatatattgcgaacagtttttatagctccactaacttagtttttagtacttgttcttaatctaaaatcagtttgtgacagcgattcaattcaatcaaataaaaccaataaatacgtgttaagtgagtcgctgcgatataacccgtagtttgctaaacattttgatttagatttttattggcaagctggcaaatggtaacccaacacgcaacgactttgcggtttttgttttgggactccggctttttgtggctttgccaatggagtggaaatggcaatagaagtgggggccagctgctcaacaagtggctttttgtctgtggccaaaatcggtgcgaaggacgcccaagcggccggtaaacttacgaccatatatggtcaagacgatcagatttaaagcgggctcaaagcgggcagccaatcgaagctatcggcattggcaaatatggatacttactattctacatgagaacatgtgaacgaacgtgactgacttttataagttgagcaaatcgagtaatatggggatatttgggaaaaatggggagtgccggtgggagaaatgagagttgcaatcttatccttatcgcaacttgaaatataaccgccaaattgtcacgagtgcgagacaagggaaaggcaaagagagagagagagcagcacttttataaccaattaatgataagtctgctatcggtgatatttcatatgataagcgaggggaaatggcccacaaataaaataatggtctgtacttgatttaacccccgattgggtattcagtctaccaagtgcagcagccagtgtgggattagccaaaaatgtaccagtccaaggtacataaaaggataccttactctcttaccaattactacaattttattaaacatcaactgtctggctactttgcagattaactccaagtacagcgaggagctggcccaggagagcctcgagtggatcaaggccgtcaccgaggagcccatcaacacatccggcgacaccgacaacttcttcgaggtgctcaaggatggcgtcatcctgtgcaagctggccaacgccctgcagcccggctccatcaagaagatcaacgagagcaaaatggccttcaagtgcatggagaacatctcggccttcctcgcgtgcgccaagaacttcggtgtccccacccaggagaccttccagagcgtcgacctgtgggagcgccagaatctgaactcggtggttatctgcctgcagtcgctgggtcgcaaggtgagctgattactccagcttaagttgataatacggtctaaggatcaaagtattgagttttgcgcatagaaaaccatgcattgcattgactcttatcccatgcattgataagttttataagatatatgagactgggtattaatatgttttgcttttgcataggcctccaacttcaacaagccatcgattggccccaaggaggccgacaagaatgtgaggaacttcagcgacgagcagctgcgcgccggcgccaacgtcatctccctgcagtacggatcgaacaagggcgccacccagtcgggcatcaacttcggcaacacccggcacatgtagatcggtgtcctgcagccaggatcctccgccccacacatcgctctcagacattccgcaacgaaagaccaaaccaaaacgccaacatcttacgacgcagccgcttttgggttccacacacttttcacgttttgagctagatttgggtagagcccctgaatgatatgatatcagatggatatggatatatatttatgataccaatttgtatttgtattccaattgaccaggcgtatgctgttatgtaataacataaactactttaatttaatattattaagtactcgtacatacggatcttaggatgatttattctattttcaacatttgcattcgcaacacgatcgttttgcatactttcgttctatataaaccgcactcagcttcatccttgtgccatcgaagacagttggagatggagtcaccatgcagagtgggataataagtgatccacggatcgaaatcgaaatgaattgtgtttgatgaatgtgtcttctatctcgtagagtaacgattacaatgttgtttcgaactaaccacctgaataccaatcaaaaacgcagagcatttacaataatgtatttacaggcagagcaaatatatacatacatacgtgttacacacttttgaatgatctattttaaataatgtcccctgttgaaaataaataattattcttttaacacatattgcttgtatcttgagacggaaaaatgttgggttttatctttattatttctggtttctatttccatttagcagtcgagttagtgtaacttacctttttggttgcaaattaaaaaaagtgccgtgttttgtaacaatttcatataatttattcgataaacaaatgaattgttgcatacgtttgacatttttgaccttaaccggccgaagcgaaccgaggtcttcattcgaaagattcaatttcgagtgtgaataaaatattcggggcatctcagaaaatgcggacatcgaataacaattataaaataattttatacgatcgcttacattaaatagaacaaattgtacagtcgt

SEQ ID NO: 36902 - DNA, 566 bp, DROSOPHILA
atgtaccagtccaagattaactccaagtacagcgaggagctggcccaggagagcctcgagtggatcaaggccgtcaccgaggagcccatcaacacatccggcgacaccgacaacttcttcgaggtgctcaaggatggcgtcatcctgtgcaagctggccaacgccctgcagcccggctccatcaagaagatcaacgagagcaaaatggccttcaagtgcatggagaacatctcggccttcctcgcgtgcgccaagaacttcggtgtccccacccaggagaccttccagagcgtcgacctgtgggagcgccagaatctgaactcggtggttatctgcctgcagtcgctgggtcgcaaggcctccaacttcaacaagccatcgattggccccaaggaggccgacaagaatgtgaggaacttcagcgacgagcagctgcgcgccggcgccaacgtcatctccctgcagtacggatcgaacaagggcgccacccagtcgggcatcaacttcggcaacacccggcacatgtagatcggtgtcctgcagccaggatcctccgccccacacat

SEQ ID NO: 36903 - protein, 175 aa, DROSOPHILA
MYQSKINSKYSEELAQESLEWIKAVTEEPINTSGDTDNFFEVLKDGVILCKLANALQPGSIKKINESKMAFKCMENISAFLACAKNFGVPTQETFQSVDLWERQNLNSVVICLQSLGRKASNFNKPSIGPKEADKNVRNFSDEQLRAGANVISLQYGSNKGATQSGINFGNTRHM

SEQ ID NO: 36904 - DNA, 4265 bp, DROSOPHILA
tttttgtttatcctttagaaagcatgcgtatatttttacagtgtaatggccagttaccagcaaatgcaactcaaattcttcaaactcgataaggttgcccctggaggtataccataaatataaaccgatgcactaagaaggcaaataaaacgcttgttagccccgataagcaggcaaataaatgatactttgttagcgctgaggagccgtatttaagggcatgatctcatgggtcgcttatcgccgggttccactgtagacacaaagcaagtggtccgagcacacgcgccacctacagattgttttatttattgagccccgataagcacacaattctttgctgttctcagaattaagtcctcgtattttaaggcatgatgtcatgtgttgtctgtaggcaaaatccactgtagatagtatttaagtgcttcgagcattcgcgcactttagagctttggattatttagcaccaaatgagctttaaacagctgagtacaaaagcatgctgaaaagcttttgccatctttcaaggttaagctatgaatacacccatccgaaaactacagtgcaacctgttgcgttttccccatttttattaccacataaaaactggttttcagccacgtacactctgatttttatggccgacgggcgaaattaagaaataccacatttttagaagcctgacactttttccaaattagtacgcttaaaacaattctaacaatttctaatgtgttatttacttgtgttcaaaatcagttgttatgttcgatttcactgacaaattttcccacactcgttttgttttccttgatagccggtcgaaatgttgggaagcactacacagtgccgcctaagcatcttcggcattttttaaatttctaaagttttttctaaatttgaaatagaccaaactttttgccagtgcagccggtttgataaccccccattgaaagctcttttttgccagtcttcaatcggttgtgggcacttgcagtccgttttgtttttctttaacgcagattgagggatcgaagatcatccagctgttgcgatgaaccgtcgccttccaggaaccatcagccagtgccagaagcttctcctagccacccacaaccatgctccaacggccttctccaccagattcctgtccacatctcgagtgaaccgcgagcggcaagagtaagtttgtttatatagctgcgaaagtttatgacattttccgcgaaacaaatggcatggcaaatctatatctatatctaccaaaacaaattgaattagtatgtttaggctagtaactaattaatggcgataacgaagagataacttgttggccatggttagatggcactgatggtgggtgtggtcatgcgactgtactaatctcccttgaggtgtctgtcattgtatattccagcaattaagtaaatcctattttttccagatgccaagtgctggttgtgggcggtggcaccggtgggtgtgccatggccgccaagttgtcctcacgtttgggcagcgacaaggtggtcgtcctggaaccggaagatgtgagtaagcccaaaggcagtaaataatccattatgacatagcgcgataattccccatagaaacattactaccaacccatgttcaccctaataggaggtggtatgaagagattggatcagagccaccgccaaatggccgatgtgctgcccacaaaggccaaatgggtgaaggagaaggcgctggagttcgatccggataataatacggttagcacttctggtggcaagaccatcaagtacgacttcctgatcatcgccaccggactgcagctcaattatggaaaggtacgtagggtatcagtacgtttaatagttgctaatatccatatccacatatccatagatacctggcctggtggaggccctggagacccccgacagtaatgtttgctccatctactcgcccaagtacgtggatcatgtgtacgaatgtctgcgcaggaccaacaaaggaaatgctatattcacgtttcccaattgtcccattaagtgtgcaggtgcaccgcagaaaatcgcctatatatctgagcactactttaggaaggtgtgcatcatttagatagaatatctggcaaacaacttcaatttgaaacccttttcagatgggtcgtcgcgacaacgtcaatatcatctacaatacatcgcttcccgtgatttttggtgttaagcattacgcagaggccctgatgaaactgatcaagaggagaaatatcacgcttaatgttcaaagaaatctcgttgaagtgagacataaagataatatagccgtgttcgaggatctcgccaaaccaggagttcactatgaggaaacggtaagtgctggtcaattaattgggtattctagatactatatagatctagatctagatcctagaactatatctttctacttaaagcgagaaatatgaagagtaggttaactaagatcaattttaaagtcgtatagtattgcagaaataggagaattgaaggccatgaaattaaacttatataagtattatatctttctcagtactccatgcttcatgtgactccgccgatgagcactccggatgtggtggccaactgcaagaaactggtaacccccactggctttgtggacgtcgaccagttgacgctgcagcacaacaagtacagcaacgtgttcgccatcggcgattcggcgtccagtcccaactcgaagacggccgcggcggcaggtaaatgggttgggaatcctgatcagaatattcaattgatttttcacctccagccgcccaatcaccggttgtgttcaaaaacgtaatggcggcgatcgagggcaaagccccaacggatatctacgatggatactcgtcctgccccatcgtcaccggctacagctcctgcatcctggctgagtttgattacaacctcacccccgtggagacctttccattggaccagtccaaggagaggtactccatgttctttatgaagaaggagctgatgccggtgctctactggaagctgatgatgaacggctactggaacggaccggcactaatgcggaaaattttctcagtgctaaagtttaataaaaagcaatagggacctcaaatgatctttaattaattttaaaagaatatttggcatcatcataaccattccataccttaatatcatactaatttataaacattgtacttttaatttggtatgtgagatcataaataaaagtattaaattagtttaaaatctagtatatctaaatattttaacctattcaaatggcacgcactgtacatagcctcggtttcagtatgtatcaagtatatattggagcaggggatggtatttgcagcattaaccgctttctaaagttcggtcactctaaaaccaagcgtggcgtcgcttggcgctgtaaatttgaaggtaacgaactaaaagagagatcgattccagcaacaaaacaagaagaaacccaactcccgtatatcaaattagttgcaaaaacgagctgacaacatgaaggcagtgtaagtgatatgacagttcccgaaagaacaactccatcaatgagaatacccatttgcagacccaggacgccgatgcgtgtcgtcccgaaaactccgcgggtgcatcaaacggtggagaaacagcgacgagacacctccgacaaggccagggatccagtgaatgtgttctgtcgagtgcggccactacaatccgacgcagatctcacctccctaagggtcaagaactccacgacgatcgcactgaatccgcaggatcagctgctgcagcatcacaagccacacaacggcgcccagcgcgaggttcagtacatattcaagcacgttttccagccggatgccacgcagcaggatgtgtacgcagctgtggcccagccgttggtggagaacctactgaaaggccgaaacagtctgcttttcacctacggcgtgactggaagtggaaaaacgtacaccatgaccggcaacctgcgacaccgcggcatcatgccgcgctgcctggacgtgctctttcgcaccatttcagattaccaggccaagaagttcgtcttcaagccggacaagcttaatggcttcgagatcctgtccgaagaggatgcgcttttggagcgccaacacgagatgaaccagcgttttgctggctcaggacgatttgccttcaggcacaaggactcggatccggaaattgcatcccaggcctccgtggagccaattccgc

SEQ ID NO: 36905 - DNA, 1574 bp, DROSOPHILA
tccgttttgtttttctttaacgcagattgagggatcgaagatcatccagctgttgcgatgaaccgtcgccttccaggaaccatcagccagtgccagaagcttctcctagccacccacaaccatgctccaacggccttctccaccagattcctgtccacatctcgagtgaaccgcgagcggcaagaatgccaagtgctggttgtgggcggtggcaccggtgggtgtgccatggccgccaagttgtcctcacgtttgggcagcgacaaggtggtcgtcctggaaccggaagataaacattactaccaacccatgttcaccctaataggaggtggtatgaagagattggatcagagccaccgccaaatggccgatgtgctgcccacaaaggccaaatgggtgaaggagaaggcgctggagttcgatccggataataatacggttagcacttctggtggcaagaccatcaagtacgacttcctgatcatcgccaccggactgcagctcaattatggaaagatacctggcctggtggaggccctggagacccccgacagtaatgtttgctccatctactcgcccaagtacgtggatcatgtgtacgaatgtctgcgcaggaccaacaaaggaaatgctatattcacgtttcccaattgtcccattaagtgtgcaggtgcaccgcagaaaatcgcctatatatctgagcactactttaggaagatgggtcgtcgcgacaacgtcaatatcatctacaatacatcgcttcccgtgatttttggtgttaagcattacgcagaggccctgatgaaactgatcaagaggagaaatatcacgcttaatgttcaaagaaatctcgttgaagtgagacataaagataatatagccgtgttcgaggatctcgccaaaccaggagttcactatgaggaaacgtactccatgcttcatgtgactccgccgatgagcactccggatgtggtggccaactgcaagaaactggtaacccccactggctttgtggacgtcgaccagttgacgctgcagcacaacaagtacagcaacgtgttcgccatcggcgattcggcgtccagtcccaactcgaagacggccgcggcggcagccgcccaatcaccggttgtgttcaaaaacgtaatggcggcgatcgagggcaaagccccaacggatatctacgatggatactcgtcctgccccatcgtcaccggctacagctcctgcatcctggctgagtttgattacaacctcacccccgtggagacctttccattggaccagtccaaggagaggtactccatgttctttatgaagaaggagctgatgccggtgctctactggaagctgatgatgaacggctactggaacggaccggcactaatgcggaaaattttctcagtgctaaagtttaataaaaagcaatagggacctcaaatgatctttaattaattttaaaagaatatttggcatcatcataaccattccataccttaatatcatactaatttataaacattgtacttttaatttggtatgtgagatcataaataaaagtattaaattagttt

SEQ ID NO: 36906 - protein, 457 aa, DROSOPHILA
MNRRLPGTISQCQKLLLATHNHAPTAFSTRFLSTSRVNRERQECQVLVVGGGTGGCAMAAKLSSRLGSDKVVVLEPEDKHYYQPMFTLIGGGMKRLDQSHRQMADVLPTKAKWVKEKALEFDPDNNTVSTSGGKTIKYDFLIIATGLQLNYGKIPGLVEALETPDSNVCSIYSPKYVDHVYECLRRTNKGNAIFTFPNCPIKCAGAPQKIAYISEHYFRKMGRRDNVNIIYNTSLPVIFGVKHYAEALMKLIKRRNITLNVQRNLVEVRHKDNIAVFEDLAKPGVHYEETYSMLHVTPPMSTPDVVANCKKLVTPTGFVDVDQLTLQHNKYSNVFAIGDSASSPNSKTAAAAAAQSPVVFKNVMAAIEGKAPTDIYDGYSSCPIVTGYSSCILAEFDYNLTPVETFPLDQSKERYSMFFMKKELMPVLYWKLMMNGYWNGPALMRKIFSVLKFNKKQ

SEQ ID NO: 36907 - DNA, 11707 bp, DROSOPHILA
tatccgcgtgtaattgttttattgtttacaggctacctatgtatctgctcgactagctgcgaacagtatcagcaaataatttcaattgaatttccttatttcctcctctttcctatgttttttttttttcgtttgtttcgttttgtttaaataaataatacctcacgattcgttggctcaacgtattaaacttaacttacagaacaactgtgcaaagttgggcaaaaaataaagagggggttcgaatatgccctcctagcagtgaggcgctgtaaatgtggatgggttaatggtatgtggataccgcgtcttcgtattcttttattgcttgctcgggacccgtccacacacaattcgatctgggtgccccgtagaatctcgcgttgttgtttatactaggggtttgttgtctactaattttatataattttcaattatatacgctgcttcggcgtcggcccaggcgattatcctgctctctggctcaagttatactcaatgtaagcatgcactttcaacttttgaagcgagtttgtaattatattagatcgaaacgcaacgattcgaatcgaaaattgcatcaaatgttcttttttttagcttagttgtagtacttcacaaacagatttctttgatattaaattgcttcgcaaacgatccccgatctctgaggaggatgtccccaccatatctcacgctttctcttttagggtttgtcttagttcttaactaatttttatctgcagctgctcgggatcggtcttatcgttactcccgctctgattctgattcagatctatctatataatgtgtacgtttaaatatataggtttttttaagcttttacgttttcctgtttttagtaaccataatttgtcgcactgtccactcgcattcctatatagatctcatcctataaataaatactccgactccacacacatttagctatatcaagatttaggtttagaaaacaatcagtttggtttcctcatccaattcacagcagcgatatatctgtcgttggtagaaacaggattatattaaaggactattatgagcaataaatgaaatcaatggtacctttattttcgtgactatcagcagtgactagcgtggtggttgccgctgtgctcgtcagcaagctgttgttattgttcaggtgtagatcttgtgactcgatgctcaggtcaatcagctgggtggcgaccggagcgactacgtcctgcagcagattgatgtcactacaatttgttgaacgttaataataattgagagaatatcacttccctccactcacttcttgttgttgacattctcgatgtgtccattgccgttggccaccgccggcacagtattggtgctctcaaagtccaccagcaacttgccgttgctcacctgctgcaggttcttggcattctcatcgatgatcatcgtggagaagctattgatgagcgagttctccttgtctagcaccgattgctcgtacatcgcctgactgtttggcgcctcctggacagtttccgttgccgttggtgctggcgtggaatctgctgcgctgggcgagccctcagccgagttgttgctgctcccggtgacgctgctgttgctgctgctattattctctggagccgttgcggcaggagctgctttgtcgttagcgtcctatatacaaacatttgaacaggattaatgaattgaagatttacgcttggttgtaaatttccaatgctagaacataccttggagggtgtggtggcagcgcctcccttgcgggtgcgcagcatgatggcctccacccgcttgcggcgttcctcgcgctccttctcctcccgcttaaggcgctcagccacctcgacgcgctgcttctctgcctcctccttggccttcttctcggcctcctcacgttccacgcgctgtttctcctcctcctcgcgccggcgtttctcctcctcctcacgctgttgggcttcctgcgaagcaaagtgagtaataaattggagtcctttgttttctttgtttccggttgggcgtcgccaacttacctcgatggccttgcgcaggcgctcctcctccccgcggcgctgttcctcggccaggcgagtggactcctcctcgaacaggcgttggcgctccgcctcctcctcttgggctttgatctctgccaggcgttcagcctccagtcgttggcgctctaattccgcctgtcgttcggcctcctcgcgggccaggcgtcgtctctcggccaaagcggccttggcctcctcctcggtcgtgatcttcttggccatcatcgaagcggtcatcagatcagcaccctctggtggggtcagttcccgcacctctgagttctccttgctgcgcgatggtttcttgggcgcagcctgctcctggggcttaggaacctccttctcattgccctcatccgatttttcctctacattaattgaggtaaccaaagcttcgggcacagattccaccgctaaaatttgctcctcctcctgacgcgccccttcctccgttttctccgtgttcaatgcttccttctcagccttgctcactgatggaacaacaacgggagcctcggtaggaacttcagcctcaggaactggctcatctgcagtagtcttctctacctccttggccacaccgttctgctcgggaactggagcggatgtgggtgcgaccggggcaggagctggttttgtgatggtggaggtactgctgctggtgacaatcatcgacctagtcattgcagaggtatccttggttttcggttccttggtaagcctactgatgcgctcggaactggctgtgcgacttggcagcgcctttgaagctgatgctgccttgggtaccggaggttcctgtagattcaaatacgattcaataaacgtaatgggcttcaaaggaatacgaatcttacccgcttcgaaggcgtcttcttttcggcgctgctcagccgcgatgagctggaggtcacgatcagggaggtggacataaggtttgcagttcgtttgggtgtcgtttgtgcggatggcgaggcggctgtcgtcttcacgggcggcttctgatccctcttgagtttgttaatctctacgaggtttaagggtttcatgtctgacgttctaagtgttcttcaagcggacttaccctcgagagacatgcccgttccggcgatactggcgggcctcggtttccggggtgccgttgccggtcgcctgggcaccagcccggatgtggacatgtttgtcgatgtggacatggcgctgccgggccttgagttattgaagtgtccgccgggcgtggcatttcccgatcgcgagcctaaagattacagatttcattagaacagttacggaatgagagattacagggggcaagggggtgtcattatggatgagcttatgtggagcaccaaataaagcgtacgtgagtagtgaccgtcaccagagtttaccattattgcaggggggaaacacagggaaacacaataccaaatgtaggacacaagttaaccaaagatccaacagagttcaattcgtacacatatagcgagcgaacacataatgaggatacagaacataaaaccaaggaccaaatatcatatacctaggagtacacagactcatctgagcccataaatacttatgtttatatgcgtattcaatgttatgatatggctaaaatgtaaaataaatcaaaatgataataatgataacaattaaataaatgtaagtttcgcttcaccatctaataaaacccgatcaaagcaagtgtaactatggatacatacgaacaaaacgaccgacagacggcgacaggcagcaaacaatatggaccagggaagctccgaaaaggatcgattatgataatgtgattatgatgatctagaataatgtgaaatgtgaagcctatatgtatgctttttgaaattcttttttaagatcttacaaacgtttaacatgtggtttgggattaaatgatcaaatgaaaacacaatgtgttttactggatttatcatataaacggacttgcggatgtaatggactaacatatcaaaggttgttgaaaccgcatgagatcacatgtggatcacaaattgctgctcagatgaactacaaacaacctcgatcggtcgttcttcgtatgtcctctatgaaccgagggaattgggaaacaaaagcctatgcgggtgtacgagttcgatttttggagtgtggtgaaagttcaagttagtcgatttcggtgcgcgagttgttgttctagtggtttgtggtgggggctatcagtaggtactcgagtaaatggatagatggctacaacgctatacgcaatctgcggaggatttagattttagatttagtgagtagtgtggtggtggtgctagcgtgttctttggattggtgttttttgattggtagttcgagatgtttggttgtaatttaggtttttgtttaaatcgcacacacctgcattcactaacaaactagcagagttcatgagcaacaatgagttgggatcgagatcgagaaaacggtgggggttagtagagatcgcatattgctgctgccggccacgaccagtcgcgttcgcgcggaaggatgcagagttgaaggatgaggctgaggcaaatgatgactggaggtatttcttagttgccgcagtttgcaggccgagtgtggactggcgcaggtggtgcaggtggttgggtggtggttgctgtggtgctgtgctgccataaaccgaccaactgctaatctgtgtcatgctcttactggtggagtcccgctgccctccggctccgctggccagcggacggaagctggtcgatatgccgcctcccagcgagtactttccgcgctcccgctggccacctcctccggccaggtgtgtcatgctgcgggacattatgccggcggcactggagctaccgcttccggcgcttcccgcccgccgtgcacgcgcgctggaccccgcaccgcgtcgcccccctcctccgcccagcgaggcggtctcgtccagcatctccagctcccgctcgcggcgttcccgctccagaatcgcacgcatgtgctccccattgcggcgtatcggctgcgccagctggtccaagcggttcatcgagtaggcccgtcctgcggttcagttgaaagttgaaattggtttcgtgaatctttttttgagcctggctctggctgtggatccttagggagctagctaagcttaacccacggatgcgttcgaaatagttttcaaggaattttcaaaattgtcttaaatatatctattgtattctgaaaatcattaagatacgagaatacctgatataacttttataaaataagatttaataaaactttactatttcgaacgcaactgcagttacaggaagacttcacaaaaagatgtggacaaactggtctacaaaatggtgtgtacaaggtgtgttttgaaaaaggtgtgttcaggtggctggtgtgttttttacagtgtgtgtttcaagtgcgtggaataaagttctggtgttttcaggtgcctggaagagaaagtgttccatattttctcactatatctctgccgaaacagcattgaacccgggaaacgacagtaaaaagtcaggggctaagggcaactcttggtccggaatgggctaaaccaaaaggaaacacaactaatcggatggagggatgtcgaatgaagagctgttgatgcgtagatagacgatgaagctgatcgctggatgagcatgattcagatagctatgggggtgtgtcggttggatggactggaggatcgattgggtgggtcttacctggggttctggccggcgtcgagctcagggagcctcgcgaaccataatgcccgtctcgggggctaggtattgtcggcataaggtccgttttcctgcggtaaacgcttcggaacaccatgggtgatgagtcaacgctatcttctgcaatattcgggttttgggttgttttggtttttgttttgtacatgattttggattttgatattcgatttttggatgcaactgccgaaatgattcacttgcgatttcggtctcaaaattatatatgaaaaaacttaatatctaggaacgatagaaaccaaaagcgaaatagctaaaacttaagtgtttacactgatactcctgatggtttcataatagattattaattttagaatcggtaattaatacagtcagccagtgtaaacactttcggtacaaaataaccatgctgttggggatttacgttgaattctttacagacggtcgatcctgctttcgagggttagcttcaacgaagagcgcttgggatctgtacaatctggagggcgtaaaaacatcatgcaaaactgagaagctcaaggcatgccattggtttgggttacgggggtagagacaacgagagttacgagcttacggcggggttacgaatacagggttaggtttggcattggggttacggcaaaacaaaaaacggggtcagaacgagaagggttaagaacgagaaggaggagctgagtagagtagaagaaccctcacccttacgatacgagttattgttgttaaagttgttgtggcctgcagtagtggtgcttgttgctgtggttgttgtgagatttgtaggtctgtgcgcgttggctgtttgtttggaagtgggcggcggatggggattggccggcccatcgatatttatctcgctgccggcaatggagagcgagaaccgcttgggcggctcgtcattggaatagccccaattgaacacctcgtacatggaggaagacttgcgtcggtgatctgtgtgaagtcggtagttttttcgatttgtttcaaatatagaagtgaacgttacagaggtgtgattgctgtttgcttttgggtgcaaatcatattagaaaacaaatacaagaaaaaaaaataaataaaaagagaagaagggagcagaagtgatcgtgccgtgtgagaagtctgtgggtgctaggggtttgtatctatacaataatagtaattcacatgtacaccaactgggcacagtgggagataacatggtagagggttatagaaatctccggtttgcggggcacatgtaaacaataactgggacttgtcaattacaagatttacgagtgtctaaggtaacgataacgataactgcaaagtaaaatttaatctcattatgtgtgtctggtgtctcagcgagtgtggagtgttcaagagtgtgtgtatatctgtttcggggatgactcaagtgctgccgggggcagcgcgactcaccatcttgtcggtccgtcgatgaggaggcacgcttcttagcaccactgtcggcaagttcacgctctgaacttcgacgtgtgagcgaggcgcccgctacgttcgatatagatgtggacctgcaaggggaagtcatgtttagtactcaaattcaaatatctaagcgcaaaaatataaacttcgaattgcctcaaaatggccttgctacttcataacgataaaacaattagctatttgccattaagaatatcaaagtttacaatgaaaacctgcttaatcattgtgaaatgggttttttcaacaattgattggctactagctcactatctttagtttcatgttagccaattatttgctttcatttcgcgacatttactaagtcaataattatactaattgtgatttatatattttggcaaacaatttcgtcattaaaagttcaagaactgataaaaataattaagtaatgccagtcagagtgcagcgctaattagtcatgtgcagcgcaaagcacatatgaaatcggccaaaatatatactaatctagatagccatgaatggctacatattagtgtgcgcgttttgtgtgagtttttggctttgtgctcagataactttcattcggatctcacctccgctgaccccaaaaggcactgggcgataccagaccataatccgcgggcacatccagcaggcggggagtcgaggagccaaatgcgaagccgatggagtttctgtcccgttttttcacttctatccgggactcgcgttcctgtggatgatcaaaaacaagaattataatagaagttcattggaatcgaagcgataacgcacgcacctgattctttttgaggatgtactcgcggcgctccttctcggcctcgaaaatggccttcttgcgctcctccacctggtggcgcttctctgtgtcccgggtacggatctcctcgatgcgtcgacggcgctcctcctccttttgttcacggtaccgctgggcggcctccgcctgggcacgcagttcctcgattttccggtggcgctcctcattttggcgatcgcgggcatattttagtttctcctcacggtctttggacgctaaaagcgtagcaaaatgaatagagattcgaattcgcacatacttataagggcataaattgaatttggataaacaagttacggttcgcaagcaaataaaactgggaatattttcatcagttgctacctgtggcccaacaaaaatcgataaatatctgcttaatatgtgtagtattataccccatttttcgacttttgccggcgagttatttacatgagagccgagagctgacgtcatcgacaatgtacactcgcattttgtgggtcaattgacaaactagcagcagcaacaataacaaatatggcacaaatactcggacaacaataccgccgcccccgcttcaaatttgcctatgtgcaaaatgggcgaacaacaaaaaaaacaaatgataaaaggaaaatagaaagcaaattgctaatgcaggcgcacattttgttctattgaaatgacattgaggcggaaaaatgcaaaaaaaaaattaacaataataacaataatattggtagcatgcggtttggctgccaaagtctgcataatcgaactgggaactggttcttatcgccttatcggttaagatatttttggaattccatgacgtaagcaagacgacaaaggaacaactgcaagtcaatctttttgccagttacaggtgcgaaaatatcttgcaaatgggaaattatcagctgtcaaggtcgcaggcaaaattgctggattttaacccactgtatgccatatttacttgtgtttttggaaagccaaaaacattgcaattgatttttcgcttgataaaatccatttcctttttgctctcgtaataacatgtagttcaatttaacttaacaaactttgagaacattgttattaagatcaaattcccaataacttaatcattccttgttttgcattctcacaatgatttagtcaaatatgactatacatatttttaaaatttgtataattagagttggacttgccatctaaaatcaagctagaccttaagtgtagataacattttgatcttttaggtgttaattgaagatgctttgagtttttaataacccactttagtgggtaacatctagacagtttagaaactacagtgatttaaagcgtgtcactgggtgagaatagataagaagattttcttattagaaaaacagctatgaaagacttgcaatagaccagtgacggttaaaatcgcgataaggcggactatgggtcttatttgttagtgagatcatgcggcaaacattcggagcattcgttttggaggcggaacagaacggggcgtggctgtggaagactttggagcagcctgaatggaatgccaactaccttgagagtcgtcttcactggcggagatttgaccgcccacctgggcgaaccaatgcaaggttgcgccggcgctgcagcccgagatcttggcaggtgcgaatgcgtgggctgtggttcgagttataggtgatgttaaagcgattacatatagtgcgtatgtgtgatatacattggtgccgattttatgtaactcgcaagataatccgcatagaaggcttaccttttcgctcggcgctgccctcgcgactttcgggtcgcttggctgtgttttccactgcaaaagaagtacgagaaaaatggacgattgagtttcgctgcgattttccggagttttacacggacttttggctttcgtgtgtggggaaaatcaattgccgttgcgttttggcaaaaaggaaaggtgacaagaaggcgaaagagcgaggaaggagggggacacaaaaacacacacacacacgcacgaacacaagcgcacggcagcagctgcgatgacgaagcgagagagacagtgagaagtacgagaaaataatgtatgtttccctctctcttgttccaacgacttttccgactggaacttatttataaactcaaaactccggttcggaatcggggaactcgaaatacatatatcccccatttctagggggcagacacttttggcttctcggcttttctcttcttttcttttctgtgcctctcgcctcgctgttttttttcttcgtttttctctcttcactccgtttttgctttttggccgtggtgtgagtgccgttttgctgcgcagtcgaccagcactttttggccactgaaaacgccccgaaaacgcgtagatcctggccgattttcgacgcgggggcattcgtccttcgatttcgcactctcagcgggttgttttcaatgcgtaccttctggattagtcgaaatatttccgtgttggcccccaagactcgccatatttcactttactttagcgctgcaaacagtgtggccagctctgtagtgctgcgataatctacttaatgcgaccgtactgttgtatagtggtgtgctctacgaaaatactagaaatgttaactaacgtattggtttttatgtataaaaactaactccggttttatgtataaaaactaatgatcattcggtcctataaatacattatctaatgttgtatgataatttcagcttccgataccaagggcgcaataattaacactccattagggacgatatgctctaagtgcgctgacatagaaattaacattaatctgttaactaacggtgcccagtttaaaatttaggtacacttgtattcaatactgaaaaggacttatttatctccaattttatttatctctgagatttctttaacctatagttcatattaaatctaatgcttctcggcggcaatgcagagtttggccagaagggcggtgagctgcagcagcgagttgataccatcgataatcttcatgtgggtgattccgatctcacggataaagtccagcttcaaatgctcatcgatgttgatgcgcttgcagacacggaatatgttcgcaatgatgtcctccggcgagtatcccagcttccacagcttggccaggattttgtaggccttgtgtatgtcgttagcagcgcaatggtggatcatctcctctaggagctttgggtgcggctcgtcgcagaccttaaagacgttctcagcggtgatgtcgccaaatccctgagcggtggactgcaggttgttcagtccctgtcgcatatcaccttgggcagtgaatacgatggcctcaagtccgtcctccgtgtagttaagcttctcccacttggccacctcgatgagcttggccagaacttgcgcatcggacagcttggtgaatcgtagcatggcgcagcgggactggataggctctatgatcttctcgctggtgttgcaggccagggcaaaacgagtggtgctgctgtagatctccatggtccggcgcagtgcctgctgg

SEQ ID NO: 36908 - DNA, 2581 bp, DROSOPHILA
agctggccacactgtttgcagcgctaaagtaaagtgaaatatggcgagtcttgggggccaacacggaaatatttcgactaatccagaagtggaaaacacagccaagcgacccgaaagtcgcgagggcagcgccgagcgaaaagcgtccaaagaccgtgaggagaaactaaaatatgcccgcgatcgccaaaatgaggagcgccaccggaaaatcgaggaactgcgtgcccaggcggaggccgcccagcggtaccgtgaacaaaaggaggaggagcgccgtcgacgcatcgaggagatccgtacccgggacacagagaagcgccaccaggtggaggagcgcaagaaggccattttcgaggccgagaaggagcgccgcgagtacatcctcaaaaagaatcaggaacgcgagtcccggatagaagtgaaaaaacgggacagaaactccatcggcttcgcatttggctcctcgactccccgcctgctggatgtgcccgcggattatggtctggtatcgcccagtgccttttggggtcagcggaggtccacatctatatcgaacgtagcgggcgcctcgctcacacgtcgaagttcagagcgtgaacttgccgacagtggtgctaagaagcgtgcctcctcatcgacggaccgacaagatggctcgcgatcgggaaatgccacgcccggcggacacttcaataactcaaggcccggcagcgccatgtccacatcgacaaacatgtccacatccgggctggtgcccaggcgaccggcaacggcaccccggaaaccgaggcccgccagtatcgccggaacgggcatgtctctcgaggagattaacaaactcaagagggatcagaagccgcccgtgaagacgacagccgcctcgccatccgcacaaacgacacccaaacgaactgcaaaccttatgtccacctccctgatcgtgacctccagctcatcgcggctgagcagcgccgaaaagaagacgccttcgaagcgggaacctccggtacccaaggcagcatcagcttcaaaggcgctgccaagtcgcacagccagttccgagcgcatcagtaggcttaccaaggaaccgaaaaccaaggatacctctgcaatgactaggtcgatgattgtcaccagcagcagtacctccaccatcacaaaaccagctcctgccccggtcgcacccacatccgctccagttcccgagcagaacggtgtggccaaggaggtagagaagactactgcagatgagccagttcctgaggctgaagttcctaccgaggctcccgttgttgttccatcagtgagcaaggctgagaaggaagcattgaacacggagaaaacggaggaaggggcgcgtcaggaggaggagcaaattttagcggtggaatctgtgcccgaagctttggttacctcaattaatgtagaggaaaaatcggatgagggcaatgagaaggaggttcctaagccccaggagcaggctgcgcccaagaaaccatcgcgcagcaaggagaactcagaggtgcgggaactgaccccaccagagggtgctgatctgatgaccgcttcgatgatggccaagaagatcacgaccgaggaggaggccaaggccgctttggccgagagacgacgcctggcccgcgaggaggccgaacgacaggcggaattagagcgccaacgactggaggctgaacgcctggcagagatcaaagcccaagaggaggaggcggagcgccaacgcctgttcgaggaggagtccactcgcctggccgaggaacagcgccgcggggaggaggagcgcctgcgcaaggccatcgaggaagcccaacagcgtgaggaggaggagaaacgccggcgcgaggaggaggagaaacagcgcgtggaacgtgaggaggccgagaagaaggccaaggaggaggcagagaagcagcgcgtcgaggtggctgagcgccttaagcgggaggagaaggagcgcgaggaacgccgcaagcgggtggaggccatcatgctgcgcacccgcaagggaggcgctgccaccacaccctccaaggacgctaacgacaaagcagctcctgccgcaacggctccagagaataatagcagcagcaacagcagcgtcaccgggagcagcaacaactcggctgagggctcgcccagcgcagcagattccacgccagcaccaacggcaacggaaactgtccaggaggcgccaaacagtcaggcgatgtacgagcaatcggtgctagacaaggagaactcgctcatcaatagcttctccacgatgatcatcgatgagaatgccaagaacctgcagcaggtgagcaacggcaagttgctggtggactttgagagcaccaatactgtgccggcggtggccaacggcaatggacacatcgagaatgtcaacaacaagaatgacatcaatctgctgcaggacgtagtcgctccggtcgccacccagctgattgacctgagcatcgagtcacaagatctacacctgaacaataacaacagcttgctgacgagcacagcggcaaccaccacgctagtcactgctgataatatatcgctgctgtga

SEQ ID NO: 36909 - protein, 846 aa, DROSOPHILA
MASLGGQHGNISTNPEVENTAKRPESREGSAERKASKDREEKLKYARDRQNEERHRKIEELRAQAEAAQRYREQKEEERRRRIEEIRTRDTEKRHQVEERKKAIFEAEKERREYILKKNQERESRIEVKKRDRNSIGFAFGSSTPRLLDVPADYGLVSPSAFWGQRRSTSISNVAGASLTRRSSERELADSGAKKRASSSTDRQDGSRSGNATPGGHFNNSRPGSAMSTSTNMSTSGLVPRRPATAPRKPRPASIAGTGMSLEEINKLKRDQKPPVKTTAASPSAQTTPKRTANLMSTSLIVTSSSSRLSSAEKKTPSKREPPVPKAASASKALPSRTASSERISRLTKEPKTKDTSAMTRSMIVTSSSTSTITKPAPAPVAPTSAPVPEQNGVAKEVEKTTADEPVPEAEVPTEAPVVVPSVSKAEKEALNTEKTEEGARQEEEQILAVESVPEALVTSINVEEKSDEGNEKEVPKPQEQAAPKKPSRSKENSEVRELTPPEGADLMTASMMAKKITTEEEAKAALAERRRLAREEAERQAELERQRLEAERLAEIKAQEEEAERQRLFEEESTRLAEEQRRGEEERLRKAIEEAQQREEEEKRRREEEEKQRVEREEAEKKAKEEAEKQRVEVAERLKREEKEREERRKRVEAIMLRTRKGGAATTPSKDANDKAAPAATAPENNSSSNSSVTGSSNNSAEGSPSAADSTPAPTATETVQEAPNSQAMYEQSVLDKENSLINSFSTMIIDENAKNLQQVSNGKLLVDFESTNTVPAVANGNGHIENVNNKNDINLLQDVVAPVATQLIDLSIESQDLHLNNNNSLLTSTAATTTLVTADNISLL

SEQ ID NO: 36910 - DNA, 3160 bp, DROSOPHILA
tcgctgcgattttccggagttttacacggacttttggctttcgtgtgtggggaaaatcaattgccgttgcgttttggcaaaaaggaaaggtgacaagaaggcgaaagagcgaggaaggagggggacacaaaaacacacacacacacgcacgaacacaagcgcacggcagcagctgcgatgacgaagcgagagagacagtgagaagtacgagaaaataatgtatgtttccctctctcttgttccaacgacttttccgactggaacttatttataaactcaaaactccggttcggaatcggggaactcgaaatacatatatcccccatttctagggggcagacacttttggcttctcggcttttctcttcttttcttttctgtgcctctcgcctcgctgttttttttcttcgtttttctctcttcactccgtttttgctttttggccgtggtgtgagtgccgttttgctgcgcagtcgaccagcactttttggccactgaaaacgccccgaaaacgcgtagatcctggccgattttcgacgcgggggcattcgtccttcgatttcgcactctcagcgggttgttttcaatgcgtaccttctggattagtcgaaatatttccgtgttggcccccaagactcgccatatttcactttactttagcgctgcaaacagtgtggccagctctgtagtgctgcgataatctacttaatgcgaccgtactgttgtatagtggtgtgctctacgaaaatactagaaatgttaactaacgtattggtttttatgtataaaaactaactccggttttatgtataaaaactaatgatcattcggtcctataaatacattatctaatgttgtatgataatttcagcttccgataccaagggcgcaataattaacactccattagggacgatatgctctaagtgcgctgacatagaaattaacattaatctgttaactaacggtgcccagtttaaaatttaggtacacttgtattcaatactgaaaaggacttatttatctccaattttatttatctctgagatttctttaacctatagttcatattaaatctaatgcttctcggcggcaatgcagagtttggccagaagggcggtgagctgcagcagcgagttgataccatcgataatcttcatgtgggtgattccgatctcacggataaagtccagcttcaaatgctcatcgatgttgatgcgcttgcagacacggaatatgttcgcaatgatgtcctccggcgagtatcccagcttccacagcttggccaggattttgtaggccttgtgtatgtcgttagcagcgcaatggtggatcatctcctctaggagctttgggtgcggctcgtcgcagaccttaaagacgttctcagcggtgatgtcgccaaatccctgagcggtggactgcaggttgttcagtccctgtcgcatatcaccttgggcagtgaatacgatggcctcaagtccgtcctccgtgtagttaagcttctcccacttggccacctcgatgagcttggccagaacttgcgcatcggacagcttggtgaatcgtagcatggcgcagcgggactggataggctctatgatcttctcgctggtgttgcaggccagggcaaaacgagtggtgctgctgtagatctccatggtccggcgcagtgcctgctgggcaccctccgtcatgctgtccgcctcgtccagaatcacaatcttgtgcctgccccgcggcagtgtcaccttctgctgagcaaacatcttgatcttgttgcggaccacatcgattcctcgttcattggaggcattcagctcgaggacagcctccttgtagctgtctcccaggagaatcctggccagacactggatggtggttgtcttgcccacgccaggaggaccctatagatcacaattagtggcgccaaactaattttactcctcacaaactcacagcaataataatattgggtgcatttccctgggtggcgaatacggatagtcttgctacggtatcctcattgcccactatctccttgaacttcacggggcggtacttctcaatccacggcaagtgactgcgcttgtcgtccgccgttttctctggttcttccggcattttatgtgcaatttcacaaattcgcacaaacaaattgaagcgtggggctgtagtgtggccgtttcttgggcgccaaaacacaacggttaggcctggtattttttacatttatcgatttcttagcaacaccgataggtccataaaggtaattatttgaaattcaaatataaaaaaaaaacgttcagatcataaaatattctgtaaatgaggaaaagaacacacgctcaacaatatataaaaagaatatgttttaagcaaacattagttaaaaattcttgtttacaatgtaaacgttagatagatgaggatttcaaatcaggttaaaaaaaactaaaaaagttaaatttaatttaagaccaaatagtttttttttttcgttaagctttattgggtattgaagaaattacaatacatttagatgcatcaggtgccaaaaatttgaacttgcatttgaatatagttcgaattatatcatacgatcagtgaccaattgcaaagtatatcataagtttttgaaaagtactcggattgtaagacaacttggttcaatagtttatctttagtgttaacatttcaataatttaatttatgtcattttgccgaatatgtgtattcttgcacaggctcaaccataattctttcaatttgactaattcggaaatacattaaacattgttgcaatccgcggtgaatattttatggtgctgtgtgagttgcgtgtcccgtgatttcttctacatttcgtactacagtatatgagccagtataggggcttaattgaaataatactacgcgtattattgtagttaatatttatttatattcggctaagaataaaatactatatatttgtaatatatatattatgtaatgcgtatataatttatgtattgtatttttaatatatattgcaatatgtaattagtataataatttcttaaggaatcattttgaacctccggtaaggaataacaaactatttttaaacacgacaaatgtgacaaaaccattaacaagattatgacccaataagttc

SEQ ID NO: 36911 - DNA, 1108 bp, DROSOPHILA
aatttgtttgtgcgaatttgtgaaattgcacataaaatgccggaagaaccagagaaaacggcggacgacaagcgcagtcacttgccgtggattgagaagtaccgccccgtgaagttcaaggagatagtgggcaatgaggataccgtagcaagactatccgtattcgccacccagggaaatgcacccaatattattattgctggtcctcctggcgtgggcaagacaaccaccatccagtgtctggccaggattctcctgggagacagctacaaggaggctgtcctcgagctgaatgcctccaatgaacgaggaatcgatgtggtccgcaacaagatcaagatgtttgctcagcagaaggtgacactgccgcggggcaggcacaagattgtgattctggacgaggcggacagcatgacggagggtgcccagcaggcactgcgccggaccatggagatctacagcagcaccactcgttttgccctggcctgcaacaccagcgagaagatcatagagcctatccagtcccgctgcgccatgctacgattcaccaagctgtccgatgcgcaagttctggccaagctcatcgaggtggccaagtgggagaagcttaactacacggaggacggacttgaggccatcgtattcactgcccaaggtgatatgcgacagggactgaacaacctgcagtccaccgctcagggatttggcgacatcaccgctgagaacgtctttaaggtctgcgacgagccgcacccaaagctcctagaggagatgatccaccattgcgctgctaacgacatacacaaggcctacaaaatcctggccaagctgtggaagctgggatactcgccggaggacatcattgcgaacatattccgtgtctgcaagcgcatcaacatcgatgagcatttgaagctggactttatccgtgagatcggaatcacccacatgaagattatcgatggtatcaactcgctgctgcagctcaccgcccttctggccaaactctgcattgccgccgagaagcattagatttaatatgaactataggttaaagaaatctcagagataaataaaattggagataaataagtccttttcagtattg

SEQ ID NO: 36912 - protein, 331 aa, DROSOPHILA
MPEEPEKTADDKRSHLPWIEKYRPVKFKEIVGNEDTVARLSVFATQGNAPNIIIAGPPGVGKTTTIQCLARILLGDSYKEAVLELNASNERGIDVVRNKIKMFAQQKVTLPRGRHKIVILDEADSMTEGAQQALRRTMEIYSSTTRFALACNTSEKIIEPIQSRCAMLRFTKLSDAQVLAKLIEVAKWEKLNYTEDGLEAIVFTAQGDMRQGLNNLQSTAQGFGDITAENVFKVCDEPHPKLLEEMIHHCAANDIHKAYKILAKLWKLGYSPEDIIANIFRVCKRINIDEHLKLDFIREIGITHMKIIDGINSLLQLTALLAKLCIAAEKH

SEQ ID NO: 36913 - DNA, 4937 bp, DROSOPHILA
gcggatttgcataactcaggaggggatggaatgcccaaggtatcgcatgggcgccatctactggaggggaacaaagggttgccttccccaatcttccctcttgctttcttttctccagcggcagatgaacaaatcaaatgttggagtacaaaagcacgacgaatcctttttgaagtcagaacgcctcccgcgcatttgcggccatgtggtctggtttcccttcagattcaaatcgcatctggcagatgatttatttcgaagaaagagttcattaaactgcattcccttgaactattctatcctgttctctttacaattaagatgcaatcacaagagcgaaagtaaatcgttcttagatcatcatccgatcatcatcatcatcaataatgccaaccaaatttgcatgccccgcgatttttgcaccacatttgcatacctaagtccatgccacaagggtgttaatttgctcattacccgatcccttagatcgcacttcttcatcgccaatctgaaagatatttttgcaagggttcgcaaggatcgcaatgatcgcagggaggttcgccaggatcttgcctttttgcggcgtcaagaggcgaacaaaggaattgcccacaatcgcaaatgtaaacacgatcagtcaatttcaatgggtgcaattgtgatctatgatctcgatgatctttcaatttgccatgatcaatgagggcaattgtcaggtattgtatttttatctcctctaatttctctatatttaaaattagcttgttgcatttaaaaattattataactttttattgatagataaataatgattttattacagtgttttagtatagatcacagagactacaaaataatcgttgtcttaaagctccttaaataaagttatgtttttagacgatactaatctagttgaattgcactggaatcaaaacgatttgggtgtgggtaacccaatctggcactacgaatggcatccatccaattttctccagaactaagtctctggtgaagcagcactcctcttgagcgcgagcacctcgttcaaagcgggactgagtgccagggcgggattggccaccgcgataatgttgtcccccgccgcggagatgacctggactccacttagagctgcgcccgaggatgtgccactcagatccactgattcccgtggcggcgacgatgtctccatctggcgagagacgggcgatcgctcaccttccattccattgcatggcgtctgtggaggattaaatgtatttctcttattcttcggcctttcccgggtaacggaatgccctcgtagagctccaacacatactcactggcatggtcggcgagcttgagttgctgaacgagaagcgcgaatcgttgtcctcataatcagccgccttgctgactctgaaaattaatttaagtattataaaataatgtttagcttgtatacgtatatatatataaatacattatatattaatataaaatatattaagctaattttaagttttgaccttatactcacgagaacttggcaatttccgacagatcaaatggcggcttggcaaacttttggtacatggcgaacagattgtagcgcgaatcctcgacagcttcctttatttttgggttggatttatcaacaagatcggggattagagactctcaatcgcatttcaatggaaccaaatggaagctaagcgaggcaagaggcagttgcgtggaaagagtttttttgtaggccaaggaagaagacacgtggatcgttggttttggcaattttgtaggatttatttattgactcgtaagtgggaaaaggtacaagaatatattgcaaaacgactactgactaaataacttgggtttatatctaataagattcaattgtaatgggttagtgattaaattataaaggattaaagcataggttaatctaataaactttcaagcaacaaatactagcaactcaacagtaaaaactacaaaaaacacaaccatttacgaatatatattagttcatgctaataaagctagacgataaggattaaagaattaaatacattagtgatttagttattttcaaaggtctttaagaccaaattgactacacagactatatgggttatagtcagttttttaactacaagattagaagtaagatttatcaagtctagttcaaaaatactgtagtgtgaacttggatccctctccacaggtcgggatattctgagaagaacctctcgactaggattagtaattgtgttctggcgttcgcgaaagctgcaaggcaaattgttgggttatcagggagcacctccgtccggaggactctgaagcgaagctgaagcactgcaccgggcaccggacctatagctctacggtatctagcttccttacccgattcaagtcgagcggcagctgcgcagcctccgtagaggagagtcgctgtcgcttggagggcacggcggcgtcactggactcgcagtccgtgtcgccaggagcccgtcctccgcccaatcccgctccctgcgacggcagctgggtgagcagaccaccgtaccgggcaatgctggccgagtggccgaacccggcatccttgacaatctgccgtgccagggggaacagctcatcccggcgggtcagcagccagatggtctggggattccgacacagctgggccgccgcctcattgacgcacacctcgtgcaaggtcagcggcttctccggccgccttttgcaatcgaaacggccgtagatggccgagtacttacggatctcgtccatgcgccgcggatcctgttcccccatggcgataacctgctccagttcccgggtggttcgcttcctggtggtctgggcgcgcggttccctctggggcagttgcctgccaatcttatcagcacacatggttatccgctggatctgcgcttcggtcagaacaggtgtgagctggggcgaactggaggagacctggtgggcggtgttcgccggaaggttactgttcgccgagggatgcggactgctggtcagcgggttggggggcagtaccagcggcaagggcaccgaaggagctgagggacagctgatctgggtagccaaggggacagtgggagcgggaaccgaggcggaagcgggcagtggagctgggggaaccggcgagggcataaaggaggaacccgagggattgaacgagggaaatttctggcggggcagagcgggcgtggtgtccggattgaagatcaatgccggtttcggtggcgtttcgcagagacctgcaagtaacaaggtattagcaaaagtgttttacagaggcggaaattcatcaaatcaactaaatattgtaaaagtctcattttccttatatcatatttcttaaacttacccagatgcggcatcatgggtccctggaagagacccggattgttggcccactcgtgcagcgccttctgcagccggcggacgtgaagtggcttggaagccatgccgaccagggccatgatctcgaggaactcctcctcgccggcgtcgtacaactgctgcacatcatcaccgcccatttccagcagggtgtcgtagtaggccaacagactggccctctggagtacccggtacagctgcacctccgcctcgttgcccggtcgcgatgtggtgatcactggaagatacaagcaaacgtatgcataagaaactggcttgaagaagttccagcaaaaaatgatatttattaagttctggcctgcgacgttctcacaatgctacgcgcctataagaaaaaaattttaattaaattcgctttttcttacccaaaaaaaaaaaaaaactcgacggacgtctggaccctaacccttttttcgtagaggctgagcagagcaaaaaaaaaaaactcgaaagcacacaaaaaggatgaggcaagagctgggaaccaactcatctgcataagcatggtggttcaaccccttctgaaagaccaaggatgcgatacgatccgctttgagtcggcaaactcgttagaaatgcgtcacgcatgcgcaagatgccagcaaggattgccaggatcatcatttaaatctaacctattctctctttttttttgtttgcttttatcactttcaatttttggctcaaaataggtaaattttcatgggtatatgggatggcatcgtgtgaaatatatatgtacatacatataaagtcgtacctacactcaagttcataggaaaccatcctgactagccagcgatttattgctcatactaatgaatcccccgatcgaggagactgtaactgttatggcagcacagctctaaatggacgacgccgatgacgaggatgatgattatgtcaaatcgtaaataattatgtgagaatatttcaggcggcgacaacgtctgcagccagctttaattaatagaaaaacgagctggtcggctaaattataacaaactcagggcagaaaaagctgcctacatcgattgccatcctccgattccactcgctctgtttttttttttgtggtttgtattcagttgccttggccaactggaagccacaagcgcatccaccgacgtgcaacaccaaggatgcgcacttcgcgccattaacccacgctccgctccatggggttgttgcgatttatggccaggcagcaagaataattcgcattcttagccgcttaattgggtatatcataaatagtttggaaactaaaatatcagaccagttgcgtccacttgaaagctgtgatcaactgagctgaactggactgaaattagtgtcgactttgaaagtgcttataaatgtacgctaaatccagcaaactagtagctaagtgacaaggttattaaaactagttaatgagagggttataatagacacatttggccagttttagtgaaagtttatgatctatatatctctatatacatataatatattta

SEQ ID NO: 36914 - DNA, 1569 bp, DROSOPHILA
atgcagatgatgatcaccacatcgcgaccgggcaacgaggcggaggtgcagctgtaccgggtactccagagggccagtctgttggcctactacgacaccctgctggaaatgggcggtgatgatgtgcagcagttgtacgacgccggcgaggaggagttcctcgagatcatggccctggtcggcatggcttccaagccacttcacgtccgccggctgcagaaggcgctgcacgagtgggccaacaatccgggtctcttccagggacccatgatgccgcatctgggtctctgcgaaacgccaccgaaaccggcattgatcttcaatccggacaccacgcccgctctgccccgccagaaatttccctcgttcaatccctcgggttcctcctttatgccctcgccggttcccccagctccactgcccgcttccgcctcggttcccgctcccactgtccccttggctacccagatcagctgtccctcagctccttcggtgcccttgccgctggtactgccccccaacccgctgaccagcagtccgcatccctcggcgaacagtaaccttccggcgaacaccgcccaccaggtctcctccagttcgccccagctcacacctgttctgaccgaagcgcagatccagcggataaccatgtgtgctgataagattggcaggcaactgccccagagggaaccgcgcgcccagaccaccaggaagcgaaccacccgggaactggagcaggttatcgccatgggggaacaggatccgcggcgcatggacgagatccgtaagtactcggccatctacggccgtttcgattgcaaaaggcggccggagaagccgctgaccttgcacgaggtgtgcgtcaatgaggcggcggcccagctgtgtcggaatccccagaccatctggctgctgacccgccgggatgagctgttccccctggcacggcagattgtcaaggatgccgggttcggccactcggccagcattgcccggtacggtggtctgctcacccagctgccgtcgcagggagcgggattgggcggaggacgggctcctggcgacacggactgcgagtccagtgacgccgccgtgccctccaagcgacagcgactctcctctacggaggctgcgcagctgccgctcgacttgaatcgggaagctgtcgaggattcgcgctacaatctgttcgccatgtaccaaaagtttgccaagccgccatttgatctgtcggaaattgccaagttctcagtcagcaaggcggctgattatgaggacaacgattcgcgcttctcgttcagcaactcaagctcgccgaccatgccaacgccatgcaatggaatggaaggtgagcgatcgcccgtctctcgccagatggagacatcgtcgccgccacgggaatcagtggatctgagtggcacatcctcgggcgcagctctaagtggagtccaggtcatctccgcggcgggggacaacattatcgcggtggccaatcccgccctggcactcagtcccgctttgaacgaggtgctcgcgctcaagaggagtgctgcttcaccagagacttag

SEQ ID NO: 36915 - protein, 522 aa, DROSOPHILA
MQMMITTSRPGNEAEVQLYRVLQRASLLAYYDTLLEMGGDDVQQLYDAGEEEFLEIMALVGMASKPLHVRRLQKALHEWANNPGLFQGPMMPHLGLCETPPKPALIFNPDTTPALPRQKFPSFNPSGSSFMPSPVPPAPLPASASVPAPTVPLATQISCPSAPSVPLPLVLPPNPLTSSPHPSANSNLPANTAHQVSSSSPQLTPVLTEAQIQRITMCADKIGRQLPQREPRAQTTRKRTTRELEQVIAMGEQDPRRMDEIRKYSAIYGRFDCKRRPEKPLTLHEVCVNEAAAQLCRNPQTIWLLTRRDELFPLARQIVKDAGFGHSASIARYGGLLTQLPSQGAGLGGGRAPGDTDCESSDAAVPSKRQRLSSTEAAQLPLDLNREAVEDSRYNLFAMYQKFAKPPFDLSEIAKFSVSKAADYEDNDSRFSFSNSSSPTMPTPCNGMEGERSPVSRQMETSSPPRESVDLSGTSSGAALSGVQVISAAGDNIIAVANPALALSPALNEVLALKRSAASPET

SEQ ID NO: 36916 - DNA, 2327 bp, DROSOPHILA
cttgagcattttttccaacgagaacgcgtctcgttggttgcctccccttccgccaactgagatttattgaaatattttactaccctcatcgcttggggtgagttttttccgtttccttacaacgttttttcatatcacccctaagacgcgacctatcatcatgaggttcatctaacggctgcctaggaaaaggcatcttacctgggtctggcatggatcctattggatgaagtctgccattgctgccttaagaaatcctagaccttgagcaaatatgcaaagtaagacaccccaagcaatcgagcaccgaggaaatgaaaaccggaacagggtccgctattttttaagaaattaaattattacccagcaaaggtaactttcagcttcctttgttaatagacggaggtccttgaaggacagggacaagctccttcggttttccgttacataacatcgccagacaatggaagctcgcgaaaagagcgcgaaaattgcagcatgtggctggatgaggattcctttgtcaaaggattcgttgcggtcgaaggatcaggattggacacaataacatttatacaaatgaagacatctgcatgagccaatgacgaaaggatgtgcatggctttcggagataattagaacctgtatcagcaaattttttttggtatttttaacgacaaaaactatattcaattaccatcaacataaaccattttgaaagcctttagaacgcaaagaaattaactgacagaaaatagtttataattatgaaaacaggcatccttcacaaagaatttctattagaaacttttaatttgtttcaaaacaattagttccctttctacaattgtactttgattaccaaagtttattttttaagtgagagcatagaaaaccttttacttctatccacaactgtactgtgttcactagtgtaacacagcacagtaatatccttggaaatccttttcaccatattacagcatcagttaataataaactacttacttgttccattcgcattccttccaaagatcttgccctgcggactcataatgggactggaggaggccgacggagcgcccgagagcgatctctgtccctcggatagtccgctggctacggacagattgtacagatcctccgtcttgggcatttccagactggtggtcagcagctgtgactgtgtggcggaggcggatgcagatgctgttgcggattggctgtgtcctttgctgctggtgctggcagctggcgatggactggatgtggatgtggtggtggccaccgccgtcgtgggtgttgtgggattcgagctcgcctccattgcgataaaacacgttggcaaacgatgacggattaaattaacgcgattggcacgaaaggcgatcaaataccaggcacaaacacaaagaaccaggacgaaatgcatgcaaactaggatctaggatcagggatcgaggatcggaagagtactacaggctacgattaactacactagataagtatataagactctttagggagagttaaacagaagattgtaacggcagtaacgaaactcgcgccactttcagtctctctaatctctgcgatccgctcagctcgaggccagacgaacttctgtgcacgaatcccagaacggacatctgaggaacccttttggaaccggccgacgacaacgaagccaacgaagccacccgaagtccacccgagtgccgggcgctttcgttttctatcagccggggcaaaaaaaaaaaaaagggttaaaatcagggataaaaacaaaaccaaacaaattgttcggagggttaggaacgtaggacattggtttccagatttgagggttactttttatctgccgatgctcaagattctcttagagaacaatcattctctctctcttttcgcaattgagcgacattgagtgagtttttgtgctccgcctcttgagaagcactcaaagattcggaatgccggagagactttccaaaagatccttttaatgtttttttggtgaagaattccgttaaatctgttgggaatattcaaatttcagcaaaaaaaaaataggttgtataagattgcataacccttttcccatgtcaaatgaatcattatgcaactgcattttttcgtactagaaaagaaaaatctgctctcctttgccgccaaaattcgaaaatatttaaatatctttaggaaaaatatatatttgaaattttgtaagcagtttcttgtggaaaacgaagaaacagcttattgtaaaatatgatcatatatttaaaaaattaattaaaccaaaccctttttacccaaccaaatcc

SEQ ID NO: 36917 - DNA, 327 bp, DROSOPHILA
atggaggcgagctcgaatcccacaacacccacgacggcggtggccaccaccacatccacatccagtccatcgccagctgccagcaccagcagcaaaggacacagccaatccgcaacagcatctgcatccgcctccgccacacagtcacagctgctgaccaccagtctggaaatgcccaagacggaggatctgtacaatctgtccgtagccagcggactatccgagggacagagatcgctctcgggcgctccgtcggcctcctccagtcccattatgagtccgcagggcaagatctttggaaggaatgcgaatggaacaagtaagtag

SEQ ID NO: 36918 - protein, 108 aa, DROSOPHILA
MEASSNPTTPTTAVATTTSTSSPSPAASTSSKGHSQSATASASASATQSQLLTTSLEMPKTEDLYNLSVASGLSEGQRSLSGAPSASSSPIMSPQGKIFGRNANGTSK

SEQ ID NO: 36919 - DNA, 5646 bp, DROSOPHILA
cggccgacgacaacgaagccaacgaagccacccgaagtccacccgagtgccgggcgctttcgttttctatcagccggggcaaaaaaaaaaaaaagggttaaaatcagggataaaaacaaaaccaaacaaattgttcggagggttaggaacgtaggacattggtttccagatttgagggttactttttatctgccgatgctcaagattctcttagagaacaatcattctctctctcttttcgcaattgagcgacattgagtgagtttttgtgctccgcctcttgagaagcactcaaagattcggaatgccggagagactttccaaaagatccttttaatgtttttttggtgaagaattccgttaaatctgttgggaatattcaaatttcagcaaaaaaaaaataggttgtataagattgcataacccttttcccatgtcaaatgaatcattatgcaactgcattttttcgtactagaaaagaaaaatctgctctcctttgccgccaaaattcgaaaatatttaaatatctttaggaaaaatatatatttgaaattttgtaagcagtttcttgtggaaaacgaagaaacagcttattgtaaaatatgatcatatatttaaaaaattaattaaaccaaaccctttttacccaaccaaatccatactcaaatgtttatataactgaagattttttgtatttattttgtatatacaaaaacattttaccatagggcgttatcaaataggggaatacttttaaagattgccgtctacgctaccgataatcataatagttaatatagttgctttctggatttggagtcattagagttaggtttaggtatgaatagattacactaggatggagttacgttagcagtcgaagagcgggaacccctggaaacaatcgtaggctacaccaggctagtcgtcagtcctggaaatcgccacaagagcggggttcctcccgcacatggtgtcagtgtgtcctttgcgagattcctcactataagttattcacgctgatgatctggttgatccagccgatgaacgaggacgtcttcacatagacgccgggcacatcctgtcgcccgcagccgaatccccaggagacgaggccggccagctcgtagaacccatcatcttggcaaactagtggaccacctccatcgccctggcaggcatcgtgtccctcctctccgccggcacagaaactggaggcgggcaggatgaagatcttctccgtcacggcgttcaccttccgtatgcactccgtatcgctcacaatgggaatctccgcctcacgcactcgcaggggaatgggaccagcttaaaagatgaccaaaagttagaagctatcaaagtaatcataaggatctagtcgctaccttcacccatatatccgtatccggtcaccgtgcatcgcttgcccgccgcatggctgactcctcgtgcaggaagacacaccaagcacactccatctcgaagctccgcttgaccatggagcttcaggagagcaatatcgttgtccagggtctggctattgtggttgtgatggatgtaggtggtggccacgcgcaatgtctgtgctcctggactgccgtatttccgggttagatcgtaatcaccaacccgcacgtagatagcatctccggaacgaacaatgctggaacaggaataacgttaggaatcatatattccttgttaaagaagtcaccacttacttggtcacacaatgggctgcggtaagaacccactgggttccgattaaagcagctccacatagatattgattcaaggaattgatcaaagccacctgccagcaccactctccattctcgccatcctctcctcccaccactcgtgcccttcgtcttccgctgaagttcgactggagtccgtaaagagacctctgttggtagtattccggatagaccagatccggctgatctgcctgagcttggtgattgtggtacgaacgtaattggttgctctgtagactgctggactccactaggtcacccagtttgtcgttgtgaatctggatgggcacaatggcggatcctaggaccaatctctcattggatttgttgaagttgggagagtatccggcggcggaggtcatctggcgagctgttctctgtactccgtacttggcacgggcgtaggagacgaaagatagagcctgggatcttcccgttcgcagagttcccttcacaccacacacatacttggagtagacatgtggccgtggagtcgtggtggttgtagttgtcgtcggaggcgtggtcatcggtggctgaggttgtggaggtagtcccggtccggaaactggatagtaatctgcgtagttgggcgccggtggcggtggctggtagggattggggtggtgaggcgccatctggggtggaggtccctgtggcggtggattgttcatgtaggagtagggtggtgtctgtgggggatatgcctgtggtggaccaatgggcggtggcggcggtgccgggtagtaggcggtgtcgttgcgcgtctggaactgctgcttctcaaggatcttgctcttgggcgcacagcaaatctggccggaacgcttgcagcggaacaagtcagtcatctcggcgttttctgggggaactttatattaatctattatcctaagaaagaatccaatgagtacttactgaagcaagtgaagctgagcaggctgacgatacaggatcctgggcattcttctcgcggatcgggactcggggtattgggcaggacatatggtggagcagtgggcgaggccgtgggcgacggcgtcggtggtggcaacttgggcttgggagctccggctcttgagttgtcgcagcataccgaacccttggcacacgttgtgggtgtggaaaccagcaccgagggtctctcgcagaaggcggccataatgttgagcagacagaatcctggacagcgaggcacctgaatcggagcctgaggtggtggcggtggtggagatggcgagttcagagtgctctccgcaaaggatatgatttgagagaggaagtcaccacctcctccgcctccagaggtcgaagatggtggtgctggcggtggagacgcgggacgagcgggcttggctgctggcttgggagcatgcttgatggccggcttggtgggtggagccttggaggagggtgttgcctccgaggcacctccagtcacacaacagctttcttctccgggacagaaagcatcggaatcgatgtcatcacagaagatcgcaaatattccattcatgcactcgccctcgcattccttcaacacctgaccctgaccttgtccggacttcagcttgttgctcagtggtggctcctcctcctcgccatcctcctccgtctcctgctcctcctcttcctcggctgcctccgtcgttgtggtggtcggatgcttcttgtgtttggtgggcttcggagaactgttgtttattctagccggttcgggtgttgtggtagtgctggtggtggtagtagtggacgtcgtggacgtactggaactcttggcgggagccgatttttcggacagcgtctggttgggcttcaagttgctcatatgttctatgttaaagtcaagtgttcataaagtttaatgatattatcatatgtggattacttactggctggaatatagatatccttgggcagcttgccattggaatactcatccagggagacgcagcacttggtgccttccttgcacagtccatcgctggtcaaataggcctcacagtactccgctatgcgatcggccacgcaaactccagtgcagtcttctgaaaatattgaatatatgaagatttcgaaagtcttatatgtctataaccatttgctctctcaaactctaggaaacaaactcactgtttgcatcatcggccttggtggcctcctccttgtccttgggtttggccgtagccactttcttggtggtgctcggtttctttgtggtggccacagtggcttttgtggtggagctagtggcaggtcgcttggtctgtggctttggttttggttttggagtggtgctcgttgtggtggttctctttgtggtgctagtagtggccaccgtggtggtggttctctgggtggtagtggtgctagcagtggttgtggttttaggcgttgtggttgctctcacagcagtggcattcttgccggctaaaaggtagatttgattaagatgttaaattaaaagtgatttatttttttttagctttacctggagcattttctatgcagcatttcatgctgggcgaaggacaagccacatcgtctagaacttcgtagcaaattaaagttgccaaagtgtggacacatactccagggcaatccttggagtctgcggtgctcgttatggtgtccaaaagacctaaaaagaaagacaaattatatatattctttggtctccagaattcttaagaagcacgaagttaattcttacctgataggaaactgccagccagggattcatcctgagcctgtgatggcgatggcttactgaccagcaaaatgctgaagatcaggggcagaacaaggcggctcattgtgctcgaatgtcttggcataattcgttggtccaaaatggtcagcacgtgttcatttcttaccaagaatctgcgggagagacagagagaaagatagaggtgagataattagcgatggtcaagtgaaagtcgaggtggccgccactgaatcatcatgattccgggccgagtaacctcgggccccccagtgacgtaatgcggcagcttggagcaggggcatcatctgccacgagcccagagatcattggcctagaaagaagatcatcaacagcatcatcatcgagatattaccacggggaggcaaggtgtgtgataagcccgaaaccagtttggacattttgattctggttctgtgttgcaggtgccccatttcaatattacgtatacgtagcggtgcctgccgccgcctaacggacaccactccagctccattccggccataatccatgtatctgggttgcccagaacgagtatggaaaccgaagacccaaaactggttacacatactcaagaaaactgaacaacaaatttaaagaagaccatgcaaataattatgggcaggcagagaggtcggtaaaagccagggcattcttgggccacaattaacgaaaccgtttaatgaatgaaatagaaagtacttagtacgaaatgaaacctggccgatagagatctcggatgttccagcgaaagtgcactttgagtttcggaaactgaatcggaatgggattcggaatcggaatcggaatcggacttccccaatcacgtgcggtccaaacaaaagctttctacaaaccggaaatttctcaacgttgcgagcagaaaatgtgaaaaaaaaaaaaaaaatgaaaacattattatgtttatttggccagctgatgggtctagaaagtgctagcacgtattttgggtcaagtgagtcgtttcgtttctcctctgggtaacacattcctgccccattctgtcactccaaattcaccaataccagcggtatcgccacgcctacgccaccatgaataccaagtccggcaccaaaaccaaaaactaggtcagatgcataaggcgcgacggca

SEQ ID NO: 36920 - DNA, 3196 bp, DROSOPHILA
attcttggtaagaaatgaacacgtgctgaccattttggaccaacgaattatgccaagacattcgagcacaatgagccgccttgttctgcccctgatcttcagcattttgctggtcagtaagccatcgccatcacaggctcaggatgaatccctggctggcagtttcctatcaggtcttttggacaccataacgagcaccgcagactccaaggattgccctggagtatgtgtccacactttggcaactttaatttgctacgaagttctagacgatgtggcttgtccttcgcccagcatgaaatgctgcatagaaaatgctccagccggcaagaatgccactgctgtgagagcaaccacaacgcctaaaaccacaaccactgctagcaccactaccacccagagaaccaccaccacggtggccactactagcaccacaaagagaaccaccacaacgagcaccactccaaaaccaaaaccaaagccacagaccaagcgacctgccactagctccaccacaaaagccactgtggccaccacaaagaaaccgagcaccaccaagaaagtggctacggccaaacccaaggacaaggaggaggccaccaaggccgatgatgcaaacaaagactgcactggagtttgcgtggccgatcgcatagcggagtactgtgaggcctatttgaccagcgatggactgtgcaaggaaggcaccaagtgctgcgtctccctggatgagtattccaatggcaagctgcccaaggatatctatattccagccaaacatatgagcaacttgaagcccaaccagacgctgtccgaaaaatcggctcccgccaagagttccagtacgtccacgacgtccactactaccaccaccagcactaccacaacacccgaaccggctagaataaacaacagttctccgaagcccaccaaacacaagaagcatccgaccaccacaacgacggaggcagccgaggaagaggaggagcaggagacggaggaggatggcgaggaggaggagccaccactgagcaacaagctgaagtccggacaaggtcagggtcaggtgttgaaggaatgcgagggcgagtgcatgaatggaatatttgcgatcttctgtgatgacatcgattccgatgctttctgtcccggagaagaaagctgttgtgtgactggaggtgcctcggaggcaacaccctcctccaaggctccacccaccaagccggccatcaagcatgctcccaagccagcagccaagcccgctcgtcccgcgtctccaccgccagcaccaccatcttcgacctctggaggcggaggaggtggtgacttcctctctcaaatcatatcctttgcggagagcactctgaactcgccatctccaccaccgccaccacctcaggctccgattcaggtgcctcgctgtccaggattctgtctgctcaacattatggccgccttctgcgagagaccctcggtgctggtttccacacccacaacgtgtgccaagggttcggtatgctgcgacaactcaagagccggagctcccaagcccaagttgccaccaccgacgccgtcgcccacggcctcgcccactgctccaccatatgtcctgcccaataccccgagtcccgatccgcgagaagaatgcccaggatcctgtatcgtcagcctgctcagcttcacttgcttcaaaaacgccgagatgactgacttgttccgctgcaagcgttccggccagatttgctgtgcgcccaagagcaagatccttgagaagcagcagttccagacgcgcaacgacaccgcctactacccggcaccgccgccaccgcccattggtccaccacaggcatatcccccacagacaccaccctactcctacatgaacaatccaccgccacagggacctccaccccagatggcgcctcaccaccccaatccctaccagccaccgccaccggcgcccaactacgcagattactatccagtttccggaccgggactacctccacaacctcagccaccgatgaccacgcctccgacgacaactacaaccaccacgactccacggccacatgtctactccaagtatgtgtgtggtgtgaagggaactctgcgaacgggaagatcccaggctctatctttcgtctcctacgcccgtgccaagtacggagtacagagaacagctcgccagatgacctccgccgccggatactctcccaacttcaacaaatccaatgagagattggtcctaggatccgccattgtgcccatccagattcacaacgacaaactgggtgacctagtggagtccagcagtctacagagcaaccaattacgttcgtaccacaatcaccaagctcaggcagatcagccggatctggtctatccggaatactaccaacagaggtctctttacggactccagtcgaacttcagcggaagacgaagggcacgagtggtgggaggagaggatggcgagaatggagagtggtgctggcaggtggctttgatcaattccttgaatcaatatctatgtggagctgctttaatcggaacccagtgggttcttaccgcagcccattgtgtgaccaacattgttcgttccggagatgctatctacgtgcgggttggtgattacgatctaacccggaaatacggcagtccaggagcacagacattgcgcgtggccaccacctacatccatcacaaccacaatagccagaccctggacaacgatattgctctcctgaagctccatggtcaagcggagcttcgagatggagtgtgcttggtgtgtcttcctgcacgaggagtcagccatgcggcgggcaagcgatgcacggtgaccggatacggatatatgggtgaagctggtcccattcccctgcgagtgcgtgaggcggagattcccattgtgagcgatacggagtgcatacggaaggtgaacgccgtgacggagaagatcttcatcctgcccgcctccagtttctgtgccggcggagaggagggacacgatgcctgccagggcgatggaggtggtccactagtttgccaagatgatgggttctacgagctggccggcctcgtctcctggggattcggctgcgggcgacaggatgtgcccggcgtctatgtgaagacgtcctcgttcatcggctggatcaaccagatcatcagcgtgaataacttatagtga

SEQ ID NO: 36921 - protein, 1047 aa, DROSOPHILA
MPRHSSTMSRLVLPLIFSILLVSKPSPSQAQDESLAGSFLSGLLDTITSTADSKDCPGVCVHTLATLICYEVLDDVACPSPSMKCCIENAPAGKNATAVRATTTPKTTTTASTTTTQRTTTTVATTSTTKRTTTTSTTPKPKPKPQTKRPATSSTTKATVATTKKPSTTKKVATAKPKDKEEATKADDANKDCTGVCVADRIAEYCEAYLTSDGLCKEGTKCCVSLDEYSNGKLPKDIYIPAKHMSNLKPNQTLSEKSAPAKSSSTSTTSTTTTTSTTTTPEPARINNSSPKPTKHKKHPTTTTTEAAEEEEEQETEEDGEEEEPPLSNKLKSGQGQGQVLKECEGECMNGIFAIFCDDIDSDAFCPGEESCCVTGGASEATPSSKAPPTKPAIKHAPKPAAKPARPASPPPAPPSSTSGGGGGGDFLSQIISFAESTLNSPSPPPPPPQAPIQVPRCPGFCLLNIMAAFCERPSVLVSTPTTCAKGSVCCDNSRAGAPKPKLPPPTPSPTASPTAPPYVLPNTPSPDPREECPGSCIVSLLSFTCFKNAEMTDLFRCKRSGQICCAPKSKILEKQQFQTRNDTAYYPAPPPPPIGPPQAYPPQTPPYSYMNNPPPQGPPPQMAPHHPNPYQPPPPAPNYADYYPVSGPGLPPQPQPPMTTPPTTTTTTTTPRPHVYSKYVCGVKGTLRTGRSQALSFVSYARAKYGVQRTARQMTSAAGYSPNFNKSNERLVLGSAIVPIQIHNDKLGDLVESSSLQSNQLRSYHNHQAQADQPDLVYPEYYQQRSLYGLQSNFSGRRRARVVGGEDGENGEWCWQVALINSLNQYLCGAALIGTQWVLTAAHCVTNIVRSGDAIYVRVGDYDLTRKYGSPGAQTLRVATTYIHHNHNSQTLDNDIALLKLHGQAELRDGVCLVCLPARGVSHAAGKRCTVTGYGYMGEAGPIPLRVREAEIPIVSDTECIRKVNAVTEKIFILPASSFCAGGEEGHDACQGDGGGPLVCQDDGFYELAGLVSWGFGCGRQDVPGVYVKTSSFIGWINQIISVNNL

SEQ ID NO: 36922 - DNA, 4255 bp, DROSOPHILA
tctagcgcttagctaaatcctcaaagaccttgaccccaaagatcgttgaggaggcgttgaacctcctgcgtggtggtgtcactattgtatatcccatgcaattgccgccccacgactccatacgcatggagttcaccaataccgaggatctgactggcacccaggcctccaaggaggtcatcgaaccgtccaaggctcagttctggtttgcaggacaccagatgctgatggggaagctaatgagcgactatttgggtcacaacgacaaaaccaaggtaactgtccctttgatatcctaaatatatttccttcataacccatcctaatacttaaccaggtggtcgtgaagctaaatcaaattggtgaaggaccaccgggacgcgaagccgtgatctccgatcccttgcgtcgccagatgatggccgaggcctatcgccgccaggaggaactcaaggtaggacctttgctttgtagagagaattccaaatggtgttttatttgctataattcgagtataagtatatcagatataagtaggtactattgctccaccggttaaactagtttaagaaatcgctgaatattgcatagctacaaagtcgagagttaaggcgagtcggatgcctatatccttggtctgtcctggtgttttcttctttggtttcgttcagcagatgtcagttggtttatgctatatactctatataaatgcaactatgtctaaggcccatctgctgcaacggttagagtggggatcgggtatataaagctcggccatcccatcgttgttcatctgggagctatatgtccagtatttatatatgtgtgattatcatttttcaaccaagcaaagtaaagatccgtttcattaatctgttagttgttgtaaacgttgtataaatgcgctgattagaatttaaattcagttccccttgtacaatgcacaggtccttaaagtttggtgctgttttgtatccttctttcgatgcggttaatccgcttatagtatgactagtggtttctcgggaacatcgcacgtagttgctttctcctgatcctggtcaaagatttgatcactagttccggattctccgacgggactgattggtatcaacgacttggtgctaccgattagctcttggttgtccagcggaagtccgtggtccgatagttcttgaccatccaccgcttggtgctccaggtcaactacatcgtcgtctgtatcgtacatctgatcctgctgcttgtttgctagtcctgggccaaaggggccatcattatctgaatcatcgccggcacaaacacagcgcatcttggcatcgtcacccacctgaaaaaaagatagaagtattatatagtaagatcaattcatctgatttcttctcgaagtaagccacccaccttgacggatttggtgatgatacataacgatatagatgagatcacaaagagcacaatgggcacaatcagcgagactagaagctccctgtaaaccttgtccaaatcgtagcgtgcaaccacaaactccacattcgagtcctgtgagaggtaatagaaacgtcaggtaaactgataccagaactggaattcaaatggagtttaatcccccacaaaccttgttatagtagcactggtagcgtgactgggcggtgttgttatcgccatcgttgccatagcgagccacaaagtccttgcactccccacgcagtgtgttcacgcagccctccaggttgatgaacagtttcttccagctgtagatggtcaggttggcctggttgggcaggtacctctgctcgggatccaccgacctggtgctgttctcatagatggcccaaaactgggtgaagttcatgaagggagcgggcaaggtgtcatgttccaggagggttccatttatgcagtccgtggcacttttggaataacagattgtaggcaaaatctttttcgatgcttttagacttacgtgatgcgattgtccgactctcttgtgactgtggcgcagttggtcagcaggttgccatcatcctctttccaaaactcaaagggttcgatacgcacaccgtgctcggatcctcgggcttggttgaaagccactgcgttctcacaatcggcggcaataagattatcctcctaaaagtattatggattttacttccattttatatagttatttttatccttatttccagcttacgtgcataataagggtgttcacattggtagttgttatcttggaacagtagcgatcgcagctgaagggcttcttgatcttggtgcagtgcaccccgtgacactcgaagaatccattcagcttggtgttatccttctgcgaattgaccgtaagtccatcggctttgtggtgacacaagaagaactccgacatattcttgcagtgtcctgcaaggtgaaaagcaatcagtaattgaaaattcacatagggggtctccagtatggaacttaccattggagcagttgaagacgcctctgatattgttgcaggcggtgccgttgttgcaattgaacttgttcagccgactcaggtcaatctgtggggagagaacaaaagaaggataatggtcatttgttgatcgttaaactctcgtggcgccaagtggctattaaaatggaggggcaaatacttgacacgcttcatcgtctttccaccaaaagcaaagaatgagtcatggcagaacttttcctatagcaggatgcccaagacgatgacgtcttctactagtttgctcagtttaaggcagtgctacagttggtcacaaaagttaaccagttgttgcttaggaacctttcacctaagggaaatgctataaacttaccatggcgcacgatgtgttggtgactctggtgcagttgttcagctggatatcggtgccgttgcgacgcactattgagtggatctgggggcaaaagccactggtcttggtcaggcaccactcgccgcaggatgcccaggggcagttgttgggcatctggcgatccaccgtctggcacatgacgggatccagctcgaagccggacttgaaggccctagaaacaataccaagttatgagtgggttatgggttttagaggggggctataaagtaggtacccactttagggagggcgagtagatggccacgcttaggtagacgatggacacgcaggacagcaccatggtcagctggcacaggcagatggcgcgacagatgcgcgcatcctgttcgggaatcacccgcggtttgtccttgcgccgccccatttatccacctggtagtggttcctgggtgtgggttcagtagtacctagtgctcggctaatttacgacttgttgatttggtggcccacttccggccctgctccacctatgtattgtcaccctacgccgttctcaaggtgattccttttgggtttggtgggtggtggttgctcgggtgggtgggtggtttgtttggggtggtggtgggtgtgtttgtggcttgtgccgttctattttatttagcttggctcattggaatttaaaattactcggacgtgtggggtgggttagcgatatgtggaatgtcaggtgggaatctgggacgtcttatgttcaaacgccgacaaggcgagattcaaccagttaacgacttgttcaatttgttcttcatttgcggacggagttgccacctaaatcactcggagcttccagggttgcgactcaccctttcacgcatttcattggaacgtttgttttcgtttatgcacacgcgtgttgacacttttcatgaaacgcagtgcgtgaaaagtgcatcgcataaacgcaataaatgtttgatggatgcgttctgatggcttgaagtcgcctatttggccgattttcgcacgtccactcccgacggcaacagagtcctgactgaatcccggagcggaaggagtgtggatagccaggactgccaaaggacactgcgcacttttactttttcgaaagcgaaagcgaaagtggtggggcccaggccaaaacaagcccttgagtgaaatggaaaaaaaccgggacagggatggagccagctcaacaaacggttccggatcctgggaagcacgcctgcgcctggagaggatgccctccacctcatttgtcctcgttttgcgctactctctccccaaatttcgtaaatgaaaacagctttgggttttgtttagcatttctccacatttgttttggtttctttcatttttgaattgtttattaaataggccgttagctggtttaatttgtttat

SEQ ID NO: 36923 - DNA, 1551 bp, DROSOPHILA
atggggcggcgcaaggacaaaccgcgggtgattcccgaacaggatgcgcgcatctgtcgcgccatctgcctgtgccagctgaccatggtgctgtcctgcgtgtccatcgtctacctaagcgtggccatctactcgccctccctaaaggccttcaagtccggcttcgagctggatcccgtcatgtgccagacggtggatcgccagatgcccaacaactgcccctgggcatcctgcggcgagtggtgcctgaccaagaccagtggcttttgcccccagatccactcaatagtgcgtcgcaacggcaccgatatccagctgaacaactgcaccagaattgacctgagtcggctgaacaagttcaattgcaacaacggcaccgcctgcaacaatatcagaggcgtcttcaactgctccaatggacactgcaagaatatgtcggagttcttcttgtgtcaccacaaagccgatggacttacggtcaattcgcagaaggataacaccaagctgaatggattcttcgagtgtcacggggtgcactgcaccaagatcaagaagcccttcagctgcgatcgctactgttccaagataacaactaccaatgtgaacacccttattatgcacgaggataatcttattgccgccgattgtgagaacgcagtggctttcaaccaagcccgaggatccgagcacggtgtgcgtatcgaaccctttgagttttggaaagaggatgatggcaacctgctgaccaactgcgccacagtcacaagagagtcggacaatcgcatcactgccacggactgcataaatggaaccctcctggaacatgacaccttgcccgctcccttcatgaacttcacccagttttgggccatctatgagaacagcaccaggtcggtggatcccgagcagaggtacctgcccaaccaggccaacctgaccatctacagctggaagaaactgttcatcaacctggagggctgcgtgaacacactgcgtggggagtgcaaggactttgtggctcgctatggcaacgatggcgataacaacaccgcccagtcacgctaccagtgctactataacaaggactcgaatgtggagtttgtggttgcacgctacgatttggacaaggtttacagggagcttctagtctcgctgattgtgcccattgtgctctttgtgatctcatctatatcgttatgtatcatcaccaaatccgtcaaggtgggtgacgatgccaagatgcgctgtgtttgtgccggcgatgattcagataatgatggcccctttggcccaggactagcaaacaagcagcaggatcagatgtacgatacagacgacgatgtagttgacctggagcaccaagcggtggatggtcaagaactatcggaccacggacttccgctggacaaccaagagctaatcggtagcaccaagtcgttgataccaatcagtcccgtcggagaatccggaactagtgatcaaatctttgaccaggatcaggagaaagcaactacgtgcgatgttcccgagaaaccactagtcatactataa

SEQ ID NO: 36924 - protein, 516 aa, DROSOPHILA
MGRRKDKPRVIPEQDARICRAICLCQLTMVLSCVSIVYLSVAIYSPSLKAFKSGFELDPVMCQTVDRQMPNNCPWASCGEWCLTKTSGFCPQIHSIVRRNGTDIQLNNCTRIDLSRLNKFNCNNGTACNNIRGVFNCSNGHCKNMSEFFLCHHKADGLTVNSQKDNTKLNGFFECHGVHCTKIKKPFSCDRYCSKITTTNVNTLIMHEDNLIAADCENAVAFNQARGSEHGVRIEPFEFWKEDDGNLLTNCATVTRESDNRITATDCINGTLLEHDTLPAPFMNFTQFWAIYENSTRSVDPEQRYLPNQANLTIYSWKKLFINLEGCVNTLRGECKDFVARYGNDGDNNTAQSRYQCYYNKDSNVEFVVARYDLDKVYRELLVSLIVPIVLFVISSISLCIITKSVKVGDDAKMRCVCAGDDSDNDGPFGPGLANKQQDQMYDTDDDVVDLEHQAVDGQELSDHGLPLDNQELIGSTKSLIPISPVGESGTSDQIFDQDQEKATTCDVPEKPLVIL

SEQ ID NO: 36925 - DNA, 4260 bp, DROSOPHILA
aacagctttgggttttgtttagcatttctccacatttgttttggtttctttcatttttgaattgtttattaaataggccgttagctggtttaatttgtttattgataaagacacgttaagtaaaaaattttaatcgttttgcattcaaattggtttgttcttcggtttggtttgtatgatttaaaaaattctcataagcaacgtgcgttatatcggttctgctaagctatatgtatacgtatatatctatatatatatataagtttatatatatactgttataatccgtttagatgttggtttttacataagatcgttaaaactatttcaaaaatgttgagagtgtcccaatgtgagcgtgtgtgagtgaataatttggttccgctgcttatccccaatggattgtatctggtattttgtggttaatctatctttctgggtttatttcgttttggagttcgtaccgccccgtttttatgaatcttcgccgtgttttggagcggcctggagcggattcggttctatacaattgtttgtttgattggtttctttggttttcgcttccgttttagttagttttacgaatttacttaatatttttatgactactatcacaatttgttgaaaacaagcgactcattaattggtattggtattatctctgtgaaaatcgaagtcgagattggagcatcgctgccgcctccaaaaaagccattgaagcaaccaaatttccatataactagcataacaatatgatggcaaagtgtatgttaacaaatctcttgagcgcacaaatgtttaataaattggctgagaaaaagtgactccttcggcgatgctccgcttgatttatatatatatgtatatatcgtccgatgtgatggcaaatggaattctatatgcttgtatatatatatatatatctaggtaagctatgtgtggtacagactacaaagttgaatttgctatttgttaagggcgttaactaatattatttttgctagtattccatatcatcatcttcgtcactgtgacacagaagtttgctagaattggaatgcgattggaacagatttcttaatcaatgctagtcagatataagcggtatatatattatgctaaatagattgggataaacggatcatgccattctagctagtttcgaaattaacaaacattcattaaagatcaaaagaaaagcatgcaaaacattttctaaaggcattctaatataagatcgttaaaacttgagggtattcgatatgttattatatcattattgattatagaaaaaagggaaatgctgcgatcccgagtgttaactaaattttgttttagcctgaaagaaaccttttgtttttatctgtattgcttgagcctagacctttaatattttgagtatatttcttgtgatttttgattgtatatcttcttttttttttgagtgatcgtgtgtttaaaattcctttcgaatggtgttttgtttttgtgcgataaagaaaacaagactactattggaaatattaagaaaggcagtaattgctaaggacacttcagagtaacaatttgtattgggcttcaaatagatgcgggtgttttttttttttcagtggactagctaggactgggtgccacacaatatgtgcaagatatctggatcgagggatccagggattatagcaaataccatcgcacttaacctatcacaatacatttctggggatcaaaggtcgggcactcgcgctttagttcatattcaaaatacattcaaggacaacgacttttccgtgttacatttcatgcagttaacgatcctgaaagtaatatagagtagtaaagagaagataacaaaagctaatagaatacaaaggcttttgggaagtaaataaactggaaaactaagagttacattcatggttcgacttatggatctggccaatttcttaacaattaacaaaatgaagacgttacaatcataggaggaggatacagcatgacaaaacggaatttttttttggttctcgacaatatcttcatacaaggcacaatgagtacatggtccatggatctgagtgagtgtctactacaatatacagatacgaatacgaatacggggaattcaaatttgccaaacttttcgcaatgaatgagaacaagatgcgggacagctggtacggaatagcactcactcttccttggtcgggaacttctcggcgtagacccgcgaggatttgttgcacgccttctcgcagcaggggcagtaccaatagctgagcaccccgatcgagatggcaaagagcacgttcggtatgatcagcgaaaggattaggtggtacagattgttctcccacgagtaccgaccgatgaccacctccggatacgccctgctgtagaagcaggggaagggctctccgatgtgtgaaaacctggcaaggattagggttaggactctcgttgtcatggctactattcatatgcgaactcacccatattgcctggcaaatatactgcaattggtcgtgggcggatagccacaaccctctgagttgatcagaaacttggtgtagctcacatcccagttgaccgtgtctaggtcccgaggattgcgctcccattcgctgaacgggatgcgcgtatagttgacaaacaactgatggcacctggacataagaggagttagtatgtagatataatcaggcatatcgatacccacttggtgagtgatgatgtgcagccctcgcggcaggagctccagctgcaattcttgatgccctccgcgtagatatggtcgatgacgatgcaggtcaccggcactggatcatagtcggctatgatcgttgagatggcgggatccacgacgaagggtatcaggaagaggaatgtgaacaccgacaaaatggcagtcgtacctggtgattttgaagaatgtgagttagataggatattcaagaagtcaattagcaacagccattcgtaatcttaccaaggcacacggaggtatagaactttgccttctcgagcagcgtgtccatctcgatctcctcgcgcttggccttgatggcgtccacgcatccgctccccggccgcaccggtgattggcaggcggagcgcatcgaaccggatgcggatccgcatcccgatcccgccgagccgcaacggctgctgttcaggctgatcttgctggcggagagcgtctgtgccgagagcgtcggactcgccggcatcgacgtggtcgtggtcagcgtggagctcttcttcatggcggagaaatacggttctcttagttttgtttcgggtgtgggtgtgggtacgtgtggggtgcttagtttgtagttggatcggtaaaagcctttaaaatgaacaccgctaacattcgcgcttctacaacaattaagatctcccttagcctaatcttctaatcttctgatctcctcctgcccatctgccttattttttttagccgaaatggaaaatgtatttcttattttgtattctttgtatattgaatagttttttgttttttttttgtttttggtttttgctttgttatctaaattaatgcttattatgtttttatgttagccttgtggggttaacttattttgctttgactttatcgactagttgtcgtttcgagatttttctttagatttttgatcacgcatccctcactctaagccatttttgaatttctctgccctctctcccggcgactgaaccttgttctatatatcttctatatcttcagccgattctggtgtgtggtgtgtgttgtcgtgggtgtatctctgtgtgtgtgcgtgtgtctgtgtgtgccgtgcatgtgggtgtgcgtgtgtgcgtttatcccctagataaaactaagttccataattgcaatcactttaaatataacctcgctcctaaatctcctgctatcctacaagtcctgcagcctctggcccaattccaaaaaaccaaaactcaaattaatcctgaacctaaaacagtcgaaaaatatactaatattgtcttcagatctgccgatcgtcgttatcttgagaatgtcaagcgcctcgcatgggataccggattttggtgtcggtctgtgagattcagtttgtcctggttagctcagtagtgtccttgcaaaagcctctgaggtgtggtccgtgtctctgtgtctttctgtgtgttgaggtgtcggagtgtcaaaagttcgatggaaggattacaaagaatttcaagttgctcgattgtgttcctgacttcagctggtgc

SEQ ID NO: 36926 - DNA, 930 bp, DROSOPHILA
atgaagaagagctccacgctgaccacgaccacgtcgatgccggcgagtccgacgctctcggcacagacgctctccgccagcaagatcagcctgaacagcagccgttgcggctcggcgggatcgggatgcggatccgcatccggttcgatgcgctccgcctgccaatcaccggtgcggccggggagcggatgcgtggacgccatcaaggccaagcgcgaggagatcgagatggacacgctgctcgagaaggcaaagttctatacctccgtgtgccttggtacgactgccattttgtcggtgttcacattcctcttcctgatacccttcgtcgtggatcccgccatctcaacgatcatagccgactatgatccagtgccggtgacctgcatcgtcatcgaccatatctacgcggagggcatcaagaattgcagctggagctcctgccgcgagggctgcacatcatcactcaccaagtgccatcagttgtttgtcaactatacgcgcatcccgttcagcgaatgggagcgcaatcctcgggacctagacacggtcaactgggatgtgagctacaccaagtttctgatcaactcagagggttgtggctatccgcccacgaccaattgcagtatatttgccaggcaatatgggttttcacacatcggagagcccttcccctgcttctacagcagggcgtatccggaggtggtcatcggtcggtactcgtgggagaacaatctgtaccacctaatcctttcgctgatcataccgaacgtgctctttgccatctcgatcggggtgctcagctattggtactgcccctgctgcgagaaggcgtgcaacaaatcctcgcgggtctacgccgagaagttcccgaccaaggaagacaaacttctgtgtcacagtgacgaagatgatgatatggaatactag

SEQ ID NO: 36927 - protein, 309 aa, DROSOPHILA
MKKSSTLTTTTSMPASPTLSAQTLSASKISLNSSRCGSAGSGCGSASGSMRSACQSPVRPGSGCVDAIKAKREEIEMDTLLEKAKFYTSVCLGTTAILSVFTFLFLIPFVVDPAISTIIADYDPVPVTCIVIDHIYAEGIKNCSWSSCREGCTSSLTKCHQLFVNYTRIPFSEWERNPRDLDTVNWDVSYTKFLINSEGCGYPPTTNCSIFARQYGFSHIGEPFPCFYSRAYPEVVIGRYSWENNLYHLILSLIIPNVLFAISIGVLSYWYCPCCEKACNKSSRVYAEKFPTKEDKLLCHSDEDDDMEY

SEQ ID NO: 36928 - DNA, 4530 bp, DROSOPHILA
gtttatctagtctcaaacacactattcaacattttctggcgcggtatccccaacgatcatccgcagtgttggcaagagcgtggccaagtgctgggctgcattaatttgctggctctgaacaacgagttgattacttcacatctctcactgcgcctacgcatcttggaaatggccgtacaggcctcgcttttcgatctatccgagcacggcagtcaaacgctagtcaaccaggagaatgcatcacacatcctgcgcatggtttatgaattggtggttctaggctccaacgaagatgagtctaagaagtgttcgacaaaacttttggatggtgtgctagcattgctcgacgccctgatgatcttccaacagggctcctccgacgattggtccgatatgattcggctgtgcttgggtcttctgctcaagtgttcgcatcacccgaatcccggtattgttgccatggcaacggccaagctgcatgctattctccaaagtcgttctacggaagatcccgcggagctgtcgtatcttctatatagcataaacagggctctggataatgccattgaaggtgggttctagaatattattatgaattttccaatgctaaacattttctatttgcttctttagttggcaatccggaggagtactcattcttgatgcctgtgatgaaagctctgttggaaaaatgtcgcgtagccttcaatttggattctactttgcctgatctgccgtcaacttcctctggtcccgtcttcttcaatgatttccaaatgtacagcaccagcaaaaagtggaggaactttattgaacgcatggtaagtaacgtagaaaaatgtggtatcagttttatttggaactcgatttgtttattatttaaatatattcaacattattagcctaaatctagggacaaaacgtattaacatattttaaacaactaagcactatttaaacaagtctttatgctatgcctccttttgatttcgttgagaattcagaatagtttatgattttttggcaagttctgacgcagcccatggagatttctctccatctccctatcgctgaggggactcttgaacagcgtcgtgtcgaagacgcccttagtagtccgcttggatgtggatggacccctaccatcggcgggctgcaatgccagcggtgacaccgggccgtgatttctgacgtaacttggtcttgtcggtctcgagccacgtcctccggttgtgggtgaaaactgttgcctggtcggtggtgcaatggttccatcgtaatagctttgcgagtgggattgatcgatttgaacgctggtattggtgggatcggatgaactgggatttccgggttgctgctttgtgcgataccgagaagagccacgatgtctactgcgatcagtagtgggtgttttcggagtacttgttacaatggttggtatgaatgccgcacgggtcgtactacccctgcccctcattggagtccaaggagccggagtcgtcgacgtcgttgttgtgggcgtgacaaagttgaaaaagctctgcttcctctccacatagtgagaactatttgcatccgtatctgcatttgactcgtgtgactcccccaagtggctatccgcatcataggcctgctggagctcaggaacatcaagcgtatgctttgcggggacaactccaggactgggctttcgctttctcttacgccgcttggaactaccagccgcatgggcatctgaagttatctcattcagatcgggagaggatgccaagatgggtggataggactcctgttcatcgcgattggaggcttcgaaaggaacgggatcgtagatgggcacttcgtagctggatttggggaaatcgaaactaggaaacttgtggtgtggatttaagggcaactcctgcgacggtggtgagtaatcgtcctgcggatatgtattgatggaatgggaatcggaggaaacatagtttgatggtggatgctggggtgcctgatcatatgtggatgttggaggatgttggtaggagcttgggtgctcctcaggaggttgatcataactggaggagggatgttggggaggttgatcgtaactggaggagggatgctggggaggttgttcgtaactggaagacggatgtttaggaggttgatcataactggatgagggatgttgagcaggttgatcataactagaagaagggtgttggggaggctgactatagctgggaggaggatgctgtggcggctggtcataactcgatgatggatgctgcggtggctggtcatagctcgaagaaggatgttggggtggtgcgtaactattagttggagggtgctggggaggaggcttcacataattattagacggtggctccgcgaacccatcatgagatgatgggggatggggtggaacgtagctctgctggtgattggactgataggaagtgctgatctcgaatgcgggcggagaataggcgatctcaaagttaggattattgatggaaccatgtttggggggatgcttgggtggttccgcaaagttctgatggtagcccacattgggaatcttctgctcatatatggaataggagtcaggagctggcagatcctgatgtggatagctgggcactggagcaggagcgtcgggtactccatagcgggtagccggcggatgagccggagctggaggtggctcatagtgcgtagtaaaagagtgatctggctggaagctctgctgcacaggaggcaacccgtactgttggtgaggaacatgctcatgtgtggtgactaagccaaagtccaggctagggaatttgtgtgctccatagagatccggttccgtatcgtgattgtagaagtccagatccatggactgcgcttcgtaactggaagtgggtatcttaaagtccgcaccatcgaacttcaggtgctgaaagtcatcgagggagaagcttggctcctcgatatgggtatgggcagggaatgatggtttcgagtagcgaatgtggggcggtggtggtccgtacttaatcttcggatgacccttagtccgccggcgcagcttggagcgcttgatcacggcgtagggaggctgacggcgatatcggattagtttctccgccgtgggcaccagctctgcttttgactcagtcttaggcgtcccctcaacacttgtggcattggattcgctgagggcatggggcagacagagggccaactacggggaaaggggatatataaagaggaaaagggtgagtgggttaatcttccgcaaaaaaggtcatcagacaaataaactttctccctccaaacttaaatgctgtcatctctgtgtggttttgtcttatgtggccaacctttgactttccatgcaagactcactagctctcggcggtggcttccgcctcagcgcgcctctctggctcccagtttccctagctgtttacacgtaacatagttgccatcacctccaccagtggcaatcgaatcacgagtcttgctcgccaggctcctcgtaatagttgcatcgatgcggggaccttgccggctggttgctctcacgcaatccaaccacaattgaggagtgcagggattggttggggaggagatggaactgggcactcgaaggagccaagcattgaacctgatcatcgccaggttcaggtgtgcgagtccgtgtgcagttgcatttttggcttttgttttcggccatgactggttgccactggactggaatcaaaacttgaaagtgactataataggtatcctaataacataaactaaacataaatatgaattagttatcattacataaaagacttatgactcagctactattatccttttaataatctttaggtatttgttgcgtcaactttaaaactgattgaagaaatttaatattaatttttaattgttaatctacgagctgatattttaacacaaggataatcattctgaatgggcaatcgcatatatggaatcctcgagttgaattaaaagtccagtttctctctatctaatatcactgacaccacacatgagatggcagcataattaattcacatattatttaatcgcttacaaaacaggccgaaagccaaaacaaattgcacattttgagcgttagacaaagcgcgaactaaactctacgcagtagtggcagtagtttggaaaaacaaattccaaaatcgacgcgaacatcaacaaaactttcgactccgactccgaatcaaacgaaatccaacttggcgctgctggagttttgaagatcgagactgagattttccacgcggctcccggtcggtcacgactcgtcggactttctttcggcaactgagctgagcgccaagaaagtggtctggttttgtggctcgaagaggcgcagctggaaccagtcgaatgacaaagcggcgtcgctgccgatgcacccacctggcggagattttaccagaaacattttgccctgctcttttattttcaatttattttattagtatttaactccgtgtgtgtgcccagtgcctt

SEQ ID NO: 36929 - DNA, 2280 bp, DROSOPHILA
atgcaactattacgaggagcctggcgagcaagactcgtgattcgattgccactggtggagttggccctctgtctgccccatgccctcagcgaatccaatgccacaagtgttgaggggacgcctaagactgagtcaaaagcagagctggtgcccacggcggagaaactaatccgatatcgccgtcagcctccctacgccgtgatcaagcgctccaagctgcgccggcggactaagggtcatccgaagattaagtacggaccaccaccgccccacattcgctactcgaaaccatcattccctgcccatacccatatcgaggagccaagcttctccctcgatgactttcagcacctgaagttcgatggtgcggactttaagatacccacttccagttacgaagcgcagtccatggatctggacttctacaatcacgatacggaaccggatctctatggagcacacaaattccctagcctggactttggcttagtcaccacacatgagcatgttcctcaccaacagtacgggttgcctcctgtgcagcagagcttccagccagatcactcttttactacgcactatgagccacctccagctccggctcatccgccggctacccgctatggagtacccgacgctcctgctccagtgcccagctatccacatcaggatctgccagctcctgactcctattccatatatgagcagaagattcccaatgtgggctaccatcagaactttgcggaaccacccaagcatccccccaaacatggttccatcaataatcctaactttgagatcgcctattctccgcccgcattcgagatcagcacttcctatcagtccaatcaccagcagagctacgttccaccccatcccccatcatctcatgatgggttcgcggagccaccgtctaataattatgtgaagcctcctccccagcaccctccaactaatagttacgcaccaccccaacatccttcttcgagctatgaccagccaccgcagcatccatcatcgagttatgaccagccgccacagcatcctcctcccagctatagtcagcctccccaacacccttcttctagttatgatcaacctgctcaacatccctcatccagttatgatcaacctcctaaacatccgtcttccagttacgaacaacctccccagcatccctcctccagttacgatcaacctccccaacatccctcctccagttatgatcaacctcctgaggagcacccaagctcctaccaacatcctccaacatccacatatgatcaggcaccccagcatccaccatcaaactatgtttcctccgattcccattccatcaatacatatccgcaggacgattactcaccaccgtcgcaggagttgcccttaaatccacaccacaagtttcctagtttcgatttccccaaatccagctacgaagtgcccatctacgatcccgttcctttcgaagcctccaatcgcgatgaacaggagtcctatccacccatcttggcatcctctcccgatctgaatgagataacttcagatgcccatgcggctggtagttccaagcggcgtaagagaaagcgaaagcccagtcctggagttgtccccgcaaagcatacgcttgatgttcctgagctccagcaggcctatgatgcggatagccacttgggggagtcacacgagtcaaatgcagatacggatgcaaatagttctcactatgtggagaggaagcagagctttttcaactttgtcacgcccacaacaacgacgtcgacgactccggctccttggactccaatgaggggcaggggtagtacgacccgtgcggcattcataccaaccattgtaacaagtactccgaaaacacccactactgatcgcagtagacatcgtggctcttctcggtatcgcacaaagcagcaacccggaaatcccagttcatccgatcccaccaataccagcgttcaaatcgatcaatcccactcgcaaagctattacgatggaaccattgcaccaccgaccaggcaacagttttcacccacaaccggaggacgtggctcgagaccgacaagaccaagttacgtcagaaatcacggcccggtgtcaccgctggcattgcagcccgccgatggtaggggtccatccacatccaagcggactactaagggcgtcttcgacacgacgctgttcaagagtcccctcagcgatagggagatggagagaaatctccatgggctgcgtcagaacttgccaaaaaatcataaactattctga

SEQ ID NO: 36930 - protein, 759 aa, DROSOPHILA
MQLLRGAWRARLVIRLPLVELALCLPHALSESNATSVEGTPKTESKAELVPTAEKLIRYRRQPPYAVIKRSKLRRRTKGHPKIKYGPPPPHIRYSKPSFPAHTHIEEPSFSLDDFQHLKFDGADFKIPTSSYEAQSMDLDFYNHDTEPDLYGAHKFPSLDFGLVTTHEHVPHQQYGLPPVQQSFQPDHSFTTHYEPPPAPAHPPATRYGVPDAPAPVPSYPHQDLPAPDSYSIYEQKIPNVGYHQNFAEPPKHPPKHGSINNPNFEIAYSPPAFEISTSYQSNHQQSYVPPHPPSSHDGFAEPPSNNYVKPPPQHPPTNSYAPPQHPSSSYDQPPQHPSSSYDQPPQHPPPSYSQPPQHPSSSYDQPAQHPSSSYDQPPKHPSSSYEQPPQHPSSSYDQPPQHPSSSYDQPPEEHPSSYQHPPTSTYDQAPQHPPSNYVSSDSHSINTYPQDDYSPPSQELPLNPHHKFPSFDFPKSSYEVPIYDPVPFEASNRDEQESYPPILASSPDLNEITSDAHAAGSSKRRKRKRKPSPGVVPAKHTLDVPELQQAYDADSHLGESHESNADTDANSSHYVERKQSFFNFVTPTTTTSTTPAPWTPMRGRGSTTRAAFIPTIVTSTPKTPTTDRSRHRGSSRYRTKQQPGNPSSSDPTNTSVQIDQSHSQSYYDGTIAPPTRQQFSPTTGGRGSRPTRPSYVRNHGPVSPLALQPADGRGPSTSKRTTKGVFDTTLFKSPLSDREMERNLHGLRQNLPKNHKLF

SEQ ID NO: 36931 - DNA, 2906 bp, DROSOPHILA
tctgttctaaggtcgaaccactcacgggcggtgagcgacacaagtgcactacatgtcccaaaattaacatggaattcatgtgttgccagtgtcaaagtctaagccgccactgaataatggcactttggttctaataacagcgattatcattcaatgatttagaattaaacgcaatcttggcaattaaaatcgaattaaatagctttagtatgctttactttttattaagcgtaaaaaattcacaagcaagttattgcctattagttgaataatattattcaaatataactctttagttcttgaaggaaaccgatttatttgaaaattatatattcaaaaaatatgtaacataagatattttcaattatttagctacaaatatagtaattgtctttgaatcctactaatgttcaatggttgtaatatatttcgatataatattcaagcaatagctttaaacagaaatcagcttccgttttaaaactcaagaatcagagtaattttcttccaaattttcatttcccgtaaaagaatactccattaactttccatttgcatagcttcggttcgtttattgcaatctcgtttctcattctgcgagttctactcgagtgcacaggctcggattaaataagaattgaaacggggattgtgagttggggattatagagtatttatcgcggtcaaacagccttaagattaagaagacaagaaacataaatgaaaggtctcgagaatgtgtgagtgtagatgagggaacattggatccgtaactcaaggactgggcaatcggaatccgctgtccgtgaattcgtatgtacatatttcgataaatcgctttcatttccactaatactacaactactatcgactatgatcggcccatgagctccggctaactggagcccaggtggcaggagaagttggtcgcgatgtgtccattattcggttgcggcaagaggtcggcattattcgagtggtgtatatccatccatctgacttagtggtagcccaggggcgagagggcgggcagggccagcttgggcagagcaggtccataggcgggagccagagccggtccgtatccgtgggccagagccgggtaagcgggcgccagagccggaccataggcgggcaccttggccaccagaggagaggcatggagcagcggagccggggccagaaccttggccaccggagccacagccttcaccacagctccctcgcggcgcaccactgcgttgaatccgtgcacgggatcggcggtgtactccacaatgcggcgggttccgtcggcctcaatcagtgaataggcgccctgcaccacatctccgctgcgggtctcctgctggctcttcacgtcaccagtggagccatcctggtgggcagaaggaagttgttggattagcaaaggataggaataggtactttatatttaaagaaatgccttgaaacgaatcctttgcatcttatatcctaaggatttcaaggaaactataaatattttatatccaacatccaacttgctcaaccaagtggtcggatttaatagttctaagcttccataaacacttcataaaaatgtctggcaaaatcaaaatttgcataccagttgctcaataaagcaataaaattcgaatgcagatttctgaattggcattgctttttatgaggtgactaataacttcttacgaagctgactcacatgaacatcgtagctgaaggtgtattggggattgggatcgtatggctccggacccgccaccttggccaccagaggagcagccaccttggccagcgccgggtacgatggataggcgggcagtgccagtccgggaccagggaccacaacggcggaggacaccgccaccagggcgctcaggacgaggatcagtttctgtgccattctggacggattgcttggtgtttgcgatggagtagtggagaactggaggtctactgctgctcgactgacaaatgaactcgatctgtggttctgtggccgcacgacaattgctttttataggcctcacatagacgcgagcccaaaaatccgccacagcctccgccgccgcctgccaccagatatttatgcaaaaagcgcagcaagacacaaaaaataataataaacaactaaaaagtgagcatgcgtgtggagtctgtagcggcctgtgcctatgcgaaatgctcgcatcgatcgcgacaaatataaaataattcatttttcgctgcccatggcaatcagaaggggctgtccggaggtggaggagctgccggtcgagctgaaggcgctggaggtgcttggcggttcacgcatgtctgggagtctgggaggactgtgctggaccaaagcaaactggtcccacgccggctgaatcgccgtcgttgttgtcgtgacaaaaaagttcaattcgaaagcgaattatttgggcctaagccgggtggccggacggatcaggtgtggtggacgcatgagcaccagtgcctcccatgtctccatgtctcgactttatggccaccagattggggcgacgctgcacacgcacccagcagtcgattgttgaaaggtgtgtttggggcacagccttcgaaactggctggctgctctaagccgcgcccacccaaaaaatctacgccagacgcattcaatgcactgcgagaaaacgaaaaagttctaaccgcaatgaatgtgatatgtgatattaaaatctctacgaaaaaagtacttggataacatatacaatacaaaaggatatcaattgtagaatattctgttcaatcctatagattttcgaatgtcatgcagtatttttttgagtgtatagatttggttctgtttcgctgctctgttgccattgggacaattttggccattatcactaattttcaacgcgtaccgccgcttg

SEQ ID NO: 36932 - DNA, 579 bp, DROSOPHILA
atggcacagaaactgatcctcgtcctgagcgccctggtggcggtgtcctccgccgttgtggtccctggtcccggactggcactgcccgcctatccatcgtacccggcgctggccaaggtggctgctcctctggtggccaaggtggcgggtccggagccatacgatcccaatccccaatacaccttcagctacgatgttcatgatggctccactggtgacgtgaagagccagcaggagacccgcagcggagatgtggtgcagggcgcctattcactgattgaggccgacggaacccgccgcattgtggagtacaccgccgatcccgtgcacggattcaacgcagtggtgcgccgcgagggagctgtggtgaaggctgtggctccggtggccaaggttctggccccggctccgctgctccatgcctctcctctggtggccaaggtgcccgcctatggtccggctctggcgcccgcttacccggctctggcccacggatacggaccggctctggctcccgcctatggacctgctctgcccaagctggccctgcccgccctctcgcccctgggctaccactaa

SEQ ID NO: 36933 - protein, 192 aa, DROSOPHILA
MAQKLILVLSALVAVSSAVVVPGPGLALPAYPSYPALAKVAAPLVAKVAGPEPYDPNPQYTFSYDVHDGSTGDVKSQQETRSGDVVQGAYSLIEADGTRRIVEYTADPVHGFNAVVRREGAVVKAVAPVAKVLAPAPLLHASPLVAKVPAYGPALAPAYPALAHGYGPALAPAYGPALPKLALPALSPLGYH

SEQ ID NO: 36934 - DNA, 2553 bp, DROSOPHILA
tgagtgtatagatttggttctgtttcgctgctctgttgccattgggacaattttggccattatcactaattttcaacgcgtaccgccgcttgttaggcgttgctgcagttgcagttgcagtaactgctgcagttgcagtcggcgccggcagcaacatctatggacatgctcgggttggggtttgcgtaatccaaaaattgcatctcgtgccgattttttactttcaattaagctattgaataatttgagtgcgtgttgggccagcgagagtgaatgtattcatttggagtggaagagttctttgggcgtgggacagctggaggggagataaccatctaagattgcggtcttatgtaagtggaatgggtcagctttctttggcgaattgggcttttcctggttacattttgttacatttaaaattacaaaaccacttttacatggcatggagtcacgaaaatgttcaccaagtaattagttccattaagcacataaccatttccatttcttgacacccgcaattatgatgtaattgaaaaagttaacacactgctaagtttcaagttcaaaacgacgatatttgcatcataattaacacgcaaattttgatcttgaaaaaatgtccattgaatatcttgttattttgcactacttttaagtgtgtttttaatttagttcattatcattaactaggcaagtatgcattttgggccttgagcttgtctaatcaactgactaattaataaaaatgtataggtgtaaatttaaactcgtttcggaattttagtagagcttttgattaattttagttaatcaacgccttgagaagcgaatacttgcggattttccttgaatatgattgaaggatttcatgtatttctttggcttattgagtttattgtttaatgattactgactttacaacggactaaggagcagacaataagttatgtaaaagctaggttacaagcagtgttaaaggctctgaaagattgtggagttagcccaagattggagcagccactggagccaccaatgggcgagcagccaccggaactggtcctcgctgcaccaccgcattgaaaccgttgatgggatcggcggtgtagaagacggtgcgcagtgaaccatcggcatcgaccaccgagtaggagcccttgaccacatctccatcccgcacctcctgctggctcttgctgtccccggtaagggcatcctgcacattataggcgaacgcgtactgcggatgtggatccacctccgtgttgaggggcactcccactggaacagcagctgggagcagggcgcactcgatggcggcgatcagagcgcagcagatgagggtgatctgtgggttaagtaaggtgcattgattgatttatgatcaagatatacacttgtgcagatcctagtagtatgttcaatcacattccttgaccaggattccctcaactcaccttgatcagggccatgactagatttgctggtggatagtggttttccaatggtgctttgtgcttgacaatgctgtcggaactgtcttggattgccattggatcggggttataaagggcctccacatttccgcgataacatgcgccgtgtggcaaccgctgccaaaaacgattccatttgctgacgtaatggcccgtttttgtgcctggtccacctgcaaaaagtttcccccatggacgtgccatccaatggcccaacttgcacaattctcccctccattgaagccccaccaatatgaattgtgataaccgtaaatatagttggcactacgtgatcggaatctaagattgggagctttaactcgaagctcgggacctaccccaatgtttaactgggttaagcaggggaatgtggagcattcctagaaatatttcaacttttcgaatatcacttccaaccgatcagttccatcgaacaactaataacaattcattcaatctttttttttgtaccgaaacttttattcagtaaatgcagttactaattcactaagtggccgatagccgttccccagatccccagaacggtatccctaaacgtagtctatggtggcgatccttcgatcggagattgggaatgtgggtcaacagcggggtggcaacagcacgcacgtccttgtgtttcgggttttgactgacagaaaagtgggtaaatgcattagaactatttaacaacggtcctacaactaggccatggagtttgtcatcgcttggtccaccggttcatcgcctagtggtatccacccagactcagaccaggcgccgaagcgtatccaatcttggtgatggcgggaacggcggcgacggcaagagctggcttggcaatggccaccgcggccacgcccttcttctccacgaccgcattgaatccgttgaccttgtcggcggtgtaggtgaccttgcgaatagtgccatcgggttcggccagggagtagctgccgtggacgactccgttgaccagggtctcctcctgctgcttggagtcaccggtgtgatgatcggttactccgtacgagaagctgtactgcggattgggatc

SEQ ID NO: 36935 - DNA, 444 bp, DROSOPHILA
atggcaatccaagacagttccgacagcattgtcaagcacaaagcaccattggaaaaccactatccaccagcaaatctagtcatggccctgatcaagatcaccctcatctgctgcgctctgatcgccgccatcgagtgcgccctgctcccagctgctgttccagtgggagtgcccctcaacacggaggtggatccacatccgcagtacgcgttcgcctataatgtgcaggatgcccttaccggggacagcaagagccagcaggaggtgcgggatggagatgtggtcaagggctcctactcggtggtcgatgccgatggttcactgcgcaccgtcttctacaccgccgatcccatcaacggtttcaatgcggtggtgcagcgaggaccagttccggtggctgctcgcccattggtggctccagtggctgctccaatcttgggctaa

SEQ ID NO: 36936 - protein, 147 aa, DROSOPHILA
MAIQDSSDSIVKHKAPLENHYPPANLVMALIKITLICCALIAAIECALLPAAVPVGVPLNTEVDPHPQYAFAYNVQDALTGDSKSQQEVRDGDVVKGSYSVVDADGSLRTVFYTADPINGFNAVVQRGPVPVAARPLVAPVAAPILG

SEQ ID NO: 36937 - DNA, 2629 bp, DROSOPHILA
ggatgtggatccacctccgtgttgaggggcactcccactggaacagcagctgggagcagggcgcactcgatggcggcgatcagagcgcagcagatgagggtgatctgtgggttaagtaaggtgcattgattgatttatgatcaagatatacacttgtgcagatcctagtagtatgttcaatcacattccttgaccaggattccctcaactcaccttgatcagggccatgactagatttgctggtggatagtggttttccaatggtgctttgtgcttgacaatgctgtcggaactgtcttggattgccattggatcggggttataaagggcctccacatttccgcgataacatgcgccgtgtggcaaccgctgccaaaaacgattccatttgctgacgtaatggcccgtttttgtgcctggtccacctgcaaaaagtttcccccatggacgtgccatccaatggcccaacttgcacaattctcccctccattgaagccccaccaatatgaattgtgataaccgtaaatatagttggcactacgtgatcggaatctaagattgggagctttaactcgaagctcgggacctaccccaatgtttaactgggttaagcaggggaatgtggagcattcctagaaatatttcaacttttcgaatatcacttccaaccgatcagttccatcgaacaactaataacaattcattcaatctttttttttgtaccgaaacttttattcagtaaatgcagttactaattcactaagtggccgatagccgttccccagatccccagaacggtatccctaaacgtagtctatggtggcgatccttcgatcggagattgggaatgtgggtcaacagcggggtggcaacagcacgcacgtccttgtgtttcgggttttgactgacagaaaagtgggtaaatgcattagaactatttaacaacggtcctacaactaggccatggagtttgtcatcgcttggtccaccggttcatcgcctagtggtatccacccagactcagaccaggcgccgaagcgtatccaatcttggtgatggcgggaacggcggcgacggcaagagctggcttggcaatggccaccgcggccacgcccttcttctccacgaccgcattgaatccgttgaccttgtcggcggtgtaggtgaccttgcgaatagtgccatcgggttcggccagggagtagctgccgtggacgactccgttgaccagggtctcctcctgctgcttggagtcaccggtgtgatgatcggttactccgtacgagaagctgtactgcggattgggatcgtagggctcggcaacagccaccttggccacagcgacgggggcagccaggaccttgggagcataggagatggcaggagcggcatacgagatggcaggagccgccaggagtttgggagcagcataggaaatggcaggagcagcaagcaacttgggagccgcataggtgagtccaggggccgaaagtccatagggatcaatgggaatggccacaacggcggacaggatcagtcccaaaacgaacagagtctggcgaggaattccatgatcagttgagccaactaaaagctgcactcctttggccaactcacctgggcaatcatggcgaaggatgtgagaatgagggagctctggtttggatgtgtctgcactgcgagaactcagctcaaatgtgagatgcattttccgcgtggtcttcagttttatattcgaaactggcggcagctgccagcggaaaaaaaaactggacaatctaatgggcagagtgacaattgcgtctcatttggtggctgcccgatctcgatctcgatcttgcaccccagacctcatcgctgatggcggatttcgtgtttctggtgcggatttcatcattggtgctggcttttctcaatggaataactgcagccgccgctgccgaggcacaccactcaccgaagtccatttgagtccgttcaagagcgccgctccaagatacccagctagtcagctaccagcaacaccagactcgttttccgctgactcgctggccgatctggtttcattttttcgccgttttttggcacattctcaggttctccagccaaaatttgtctgatgtaataagtgcctcatattgtggcagtttcagttgcagttgccacaagaacagtgacagtgcttttttagcgattgtaggtaccctttcaagaaaaatctttaatatcatcaaagacctaatgaaaatatgtatttactctcaattttctgaaaatgtatgaaaccaagattacaattggatatgtaaacactcatttggcgaacatacttcaatcaatatttgaatatgtaattgaaatgcctgctgttaagttatgccgattatcactcacacgccatgttgtccaaacgcaagcaaatttcgcttggtttgcgtgacgtgcgagtaatcttcatagtaacatacatgtccaatgtgcccacccaaagtgcagggtataaaaacaagatcaatcgttcgcagccactcgtttaattagaaaacgaaaatggcaagtttcgacggcttggtggagggaatggaattgggcgggacgcaggcgcaattacgcactggcacacgcatta

SEQ ID NO: 36938 - DNA, 567 bp, DROSOPHILA
atgattgcccagactctgttcgttttgggactgatcctgtccgccgttgtggccattcccattgatccctatggactttcggcccctggactcacctatgcggctcccaagttgcttgctgctcctgccatttcctatgctgctcccaaactcctggcggctcctgccatctcgtatgccgctcctgccatctcctatgctcccaaggtcctggctgcccccgtcgctgtggccaaggtggctgttgccgagccctacgatcccaatccgcagtacagcttctcgtacggagtaaccgatcatcacaccggtgactccaagcagcaggaggagaccctggtcaacggagtcgtccacggcagctactccctggccgaacccgatggcactattcgcaaggtcacctacaccgccgacaaggtcaacggattcaatgcggtcgtggagaagaagggcgtggccgcggtggccattgccaagccagctcttgccgtcgccgccgttcccgccatcaccaagattggatacgcttcggcgcctggtctgagtctgggtggataccactag

SEQ ID NO: 36939 - protein, 188 aa, DROSOPHILA
MIAQTLFVLGLILSAVVAIPIDPYGLSAPGLTYAAPKLLAAPAISYAAPKLLAAPAISYAAPAISYAPKVLAAPVAVAKVAVAEPYDPNPQYSFSYGVTDHHTGDSKQQEETLVNGVVHGSYSLAEPDGTIRKVTYTADKVNGFNAVVEKKGVAAVAIAKPALAVAAVPAITKIGYASAPGLSLGGYH

SEQ ID NO: 36940 - DNA, 13239 bp, DROSOPHILA
cctccggatcgagatcgttatttgttgttaagatcgtattgcaaaatatggcaaaactgttttacccgttcaatgtatgtacgtaactgtacgagtttatgtagataatgtgactattcgtagtttgtagatccgtcaataaagtgatgaaaagtgtatgtactcgtagctgctcgttttattcacccattcagcccattgagtacttttgtttcaattttcttgtatttattcaaaaacaatcgcttgaaggttggattaaaactaacactaaacaattagaaaaacatatttcagttctattaccttataaattaaaacatagtcgggtagcttatgaaactgattaattccgtgaatactattcagtgattctgtatgggtggcgatgctgaatgaatttggtcgatcaataaattagttgtagaaatgatgggtgcacataaatacgaattgggtgggtgattgactgattgattggttgattgactgtggcttgtgccacgagtcataagtgcttcttgggctgcagtgcccttaagtaaacggccaattagtttaaatacgttaactagtgctgcctgaatcgctaggaacaatcattgctacttacaaagaaccaaagaagcgtgattacaagccgataactaaagctataattgaagaaaaccataaagtaggtgctataattcgaatgctctaaatgtgactgatattcgaggataataagtgggaaaattagtgtctaagccggcattagatacggttaattacctggactacgagctagattgtgcttaatctaaattgtacataattgtaaatcgtatgaccttttgatccatcatatttttttttgatttttttttttttgtattttttctaagcatatttcatttcttttcacgcatcttcgaaggcatttgatctatctaactaactagatgaatttccgtcgtcaatccaatagccttttgttttttatttggtggtaggatctttagtcttcctcattctgcaaggacaagaaaaatacgtagggattacttaggatgagttggtataacccggcgggtaggggaatacttacaagtacgggatacacgaaggtatcggcggtatcctttccgacgacgttgcgggctatgcacttgtagttgcccatatcctcccacttgatctcggagatcagaagatcgccgttggccagcaccctgtggcgatgtccttggacgatctccttgttctcgttattcaaccaggtgatctcggcgcggggacgggcgtgcacgcggcagggcagctgaatgttggagcccatgaggtccagatgcgtcttctcggtgtagatgattcgcggtttctgggcacccgggtaggtcttctccggcgtcagacgagaggagcgaggaggatgcaccacagtgctggcatagatggtcttggagccagtgcgtcccacacacgtgtaggtgcgggcctcgctcagcacgtggtcgatgatatgcgacgatcggacgcgcacaatggcactgggcgcctcttcggcaacctggttggagtccagatcatcgagctccgagcggggcaggtgacccaccacccactggatgctgggcacttgggagcccatcatctcgcaaacgatctcgatggtggctccatcggcctgctgcagcttcgtcggcggcgtcttggtgaacttgagccagtcggcttcgaaggctcggttgcgtggcttctcctcctccgcctcgatggagttatccacgtcgttgctatcgtctaccaggtccacggctcttccgcggacagtggcgatgctgccgaacagcagcagcgctaaggcgcacacatgtaaattcattttctgcaagatcgatagagagagtggaaatcggaagtgagttcaaagttcaacagcggcactcgtacgactctaatataggttattaaaccccagagcaacgtgatgcgattagcccgacttttcagccagtcatgcatccccccaccaccccaccaccccacttcccccactcatcaccgcctccattaatcaggggaggtctccgagtctatttccccgataagaacgcaaggccttcagtcggcgggctctagaacattactaacacttgcgaaatgtgctaatggctctcggagtccggaatttagattcggaatccttttccggcccctaagagatgtgctcggtccaaacgtagatgaatgtatttcacaatgacacgtcaccagacaacaagaattgacaaaagaaaatgatataagattcttgcgtgggccgaatcagaggcagaaatcgaaaacggaaaacggaatgactcgcggagtgtgacgtcaatttaaattcgaattctacagcccgattcggattcacacactcacccacgcttcagccgcagatcaagggccaatgtgtccccatagtctagactggacaaactgcgtgaccgattaattattcaaatagtttcgagggtattatgtatgtacatacgcttgtatgtatgaattagtagtagccccacaaaaagtcattcgccaatcgctggcgaatgttgcatcagacggtctttgcccttcgacggtgatttttgtatctttgggcatttctacgaattcgaattttgaaaaaaaaaaaacaaacgaaaaacggaacacgaaactgcgttcggcggcaatcacctatctattgttaacgcacattactcaccctttgatttgatttcttttttctcttccggtaaaaaatgtttgcaaatttctccccaacgttggacgatgatagatcaggtaaagcagaagcaggtcggcttatcgttatgttatgaacgaatttatcagctctatgttgtgatggctcctggtctgggctttctggttgaagttgagcagcagctggcttagcactgacataggtccggcgctggatgccgtcttggaggtcgtgcagctcagtgttggtggaatcttggctgcttgccggtctgtcttgggcgacgaggatggatcgtattgaaacgtctgggtgctgtgctcgggagtggcgcttcaggatcgggataaggatcgagtaattgggtagcggaagcgtgttaatctcaggcggcgtagcgaatatctagctgactactttggcacattcgatcctcgtggcggtatcagtgctccttcgatgtggacgtggacttggtctggtacttcttgatggttgtctggttggcgcggcactcgtttgaatacgcacggttcatcgacattacactcgagtcaaggtgtgttggtttttggtttttgggggggattgctgctgcgaatgcggttcacggcgaattgaaaagcgaggatcgcggatcggcttagttaacttcggatcagttggcttcggcggctctcaaaagtcgtgttcaacagctggaaactgtaacagaactgaattggtggccgcagcgctgttccatttatatgcgacgccggctcactcacacacacacacagacaacagacacacacacacacactctcactcactcgccgctctctctctgctcgttctcggatcgtaattctttatgcgaccgccgcaccgggaaggtgcggaacaaaacagatataaccggacggggggttcgattatccgcctcgggatctgtctttccaccgcctaattgcgtccgcagtccagagttggtggtttggaaactgaggtgtctcacaaggatagctcaatgactttccagcccatataccatttcatttcgatcttgacaattaacattgtcatcttatgcaagttgttgagaacatacaacagtgttcgagatcctatgactttctatcacatgtaagtaaaattaattaaccctacatataaaggtgcttcacactactctgttaatattcatgaatcatttcgacgaagtgcaaagtatcaaccgtatattattcgtttagcttactgaattagcactgtagttgtcaaaaccattaattaaaactccatggtttcgaattcattcgaacgaattaattttgtaatccataaccaatctcccaattaataaccacccatgggaatcagaacttaaagcccgttgacggtgcgagcagcattcaaatgtctggccaagaacagaccacttcttttttttttttcttggcccagtctccagagtggttgcttagcttggggatcggattggcgcaggaggaggtgcagtggcactgacatggtgcaaggttccattagccgagaccgtgtctgagttcgaatccgattccgagtccaagtcactggcttgtccgtccatctgtccaatctgtccgtgcgatcgcctcattgcaatcaagtgtgagtgccagtttgtctgcggcgttcgttggctgaatgaggagcgctggagggggagcggtaggcggatggggaggtacgataccacaaggtacactgagagaaaggattcggaactcaagcattgaaatgaaatcatatgtatatttaaccatatctttaatctcagtttacttaaatgttccacttctttaaaaaatttcttttaaagatatccacgggaaccaccgttttttccaagtgcattgctgattggctgctcgtaaatgtaagtgaacatcggtggccaggggtgcggtggtcggggtggacggggtccaaactagtctgagctgccgttgccggccgggagcttggagctctgagctggaaactgggaccgcgggctggggaccggaggtgcagttaaaatggcagacagactggcagccacatcgcgtgttcgctttccgctgttgccgggcggcagccgcttgtggtcaggatgatgaggggtgggtaggggcattggggaggggggtggctgatactgaggcaccgcgactagtttctttcttcgctttatcgacaagccacatcgacaactagattcaattctacgagtaatttatttattgcacgttacacaaatcgtccgaccgcagacgggtctctcaccgccccactgaaaccccctctccacgaccatgtgtcagcccccttgccgccacagctatccaacccgcccgcccccctcaagcacttggcagcggcaacgagccagccacaaagcgaaattcaattgagagaaaaatcttgcaggtgcttgaaattgtgtctcgtgccgccgcctctccttggcccgccaatccccgcgagccccagatcagtgcctcctccgccccctggacatctccgagtgcgctgctcctccgcctgctcctcatcatcatcagccttggacggcacacctcaaagcgctggcaacgatatcgtaacgctgacgtaaggggcactgaattgaaatggccttttgatgcgacttggggagcactttctacaataggaggcactgcctgcgatccgatccaatccgatccgatccgatcccctcacgtaacattcgccagtgacgcggtcaggggttgcacttcctagatgaggtggacacacggatgcaattgagcgggatcaaacggggcaatcagaaataaaaatcggaaactttgagtgttgaattgaatttgatagccccaataaaggttgatgaaagtgtggcattatatcaccgatataacaaagtggaaatcaaacagcagaagtcaagattcacacttgggaattataaggaagcgaaagcgttgactcatttgtaatcttttaataagggttttcataaccgatctaaagacgtagcatacttttatgattctttaccgttgataaacctacataacttatgtatggaaggacttgtgaatttttctgagtgtcttttagtggccctcccaaatgagatcaccgtacattggtttggaccgtcttaactttggcttggcatacatattcatgtggccatcgacttgggcgatcgccaccggccggcaccaatatcaccgatctccgattatcaacgcccctccgatctcaggtggacggcccgtcggcattgtcatcgaagtttttcgtgcgaagcgtagatttataggttccatttcctagaaacgatcgatcgctggtgttttcactccgcacacagccacctatgtattccacaagaccaccgtcttgtatgtatgtggaggaagaaagagaggtcgaggtctggccccccgtcattcggttttatttcagttatttctttccatagagctgactgaaaatcgtacgattgtttgccgagttgatggcacaaattattgcatcatgacaatggacgatcggagactcgtgcatgggtgcatgggtaagccaaattggcccgcttccgctaatgggtaatgggtaatgggtaaatctcttcgtaagccaccgcaccaagcggcaccactctacactctacttgtacgtctgccacatcgcaccactcgtacggcccgcatcgtttgcacttttctgctaattaacgtcgtgccagcgatagcaacacctccagagccgcagagatacaaagcagcaacacaccaccggaaaaagtcagtggaaggggtgcactgagagaaattaatgtacacacacatgtgtggtctatatcaggctgcataccaaaaattaggcaagtcggactattttttagaatgatatgggagtatagtttgaaatttttcaagtatgcactgcttttatgagtaaagaatcttccagatatccacgttttaatcaatacactatttaaaaaaaaagtagtgtctgatacctaacgtttataggcctaatttcttgcagtgtcgatcgggtaggggtcggggaaacggcccattcaaagtgagacgctgggacggcgggacggacggatagagcaggagacggagatatgaaacgagacaggccgagagttcggggaaaagatagtgcaacatgcaactggcaagccaagaccagttggccagatacagatacatatgcacaggctacaggtacagatacagatgcattcggtgaattgcaggttgtcggtgtgactgtagcagccagtggaactctggtgacgacgtgagaaaattcatgttcatgccacaaattctgtgccgttttcacagtgtttcttacagctcgacccccctcctctccagctgccgcctgctgtcattgatagggtcgggtcttaaccgcctagcaacaggccaacttctcggcctctaggcctctcgaccaacttcccaacttttcgactcgatctccgccgcctgttcgctggagatcggaacaaagacagaacgccgcaatgagctcgtgtcgccttgacagcagcgctatatgaaaggtcagttcagggaattgaaaatggtatcgcaatcggatagcacgtccgaccgaataacttctcgtctatgaatggtatttcgccaggtacttgttgttgatagagaagatttaatacaaccttaacattcctttaggatatgacgatcttcaatctcatgatctatctactaacgtttgtaagtaatataccctataaagatttttccgaatctcaagatgggaaagtttcatgtctatctttgaaattcctgtccttgtctactagaagattgtttgacccatagttaacgtatgtaaccaatgaattagaacgtatattgttatgattgagttccaatgattcatggcagttacggcggtgattcctctgcggaggtgggtaaatcacggcagattgaattggaccgaattgcctgacccgtaaacttgaattggatgattcctgataagcgcccactccgctcgccgatctctcccggttcggttcgcttgggcaatgcccgattctctatatagttgttctacagtataacgagatcgagatctcgacgcacactcacgcacacttggcccatgtgtgcaatgtaatgttgggtgtagtattgtacaatgtgccccgagcatagcgaacaaatggaatggaaaatttttgaaaccgcatatcaagtttcttctctttacgtgaaatgtggaaaattttacgacaaatccgaatgaaatgtaattatcgctaattgctcgatggctgggggtagttaatggctgctgtgggacactcgaaactgaaaaccgaaagctgaaaacagaaatctcaaaattcaaaactggcagcttatcagcgaaggtgacgacggaatcggaatcggaattggacggacgaaagcggacttcctcgtcgcatattcatggctaataaatcagcattcggcaattatacaagtagtatgtatcaattaaggcgctattaatgcgctgtaatgcgacgctctggaattcctcgaatgcctcacatttgggtgtcactttttgggtctccggttaccagacctcttctgtttgttgtgcaacaaaagtaaagtgaagtaaagtaaaacaaaatcgaagagagggctgtgactgtgactccggctctcgcccaatttgcgttccgattgcatcagccatttaagccgatccgtacccaccccgcccctaagccgctaccccgcaccccgcaccacgtatatgtacgtaccgtaccgcttcacaaacaccgatgtcttggtgcgctcttcactgcagcgcaaaggtaagccgggttttagagcataaccctgagacccgcacacgatcaccaacatgagtaagggagacggacggagacgaaggcagacccccgatgagtcattttcattcgctgtgtcggtaaataaatacactcaaacctcaaatgggttgggtcacaccaaagagcatcgaactggctacgaattagcattgcctacatgtcgaaattcagcatagtgcggtgctatatgagccagaaattcctcaaaaacaaataaattatgctatatgcgaaagtatctattgaaaaattttgtagaaaatatatattagaaagaaacggtgagaagcctggcaagctattttattgaatgtgtcttcttacacagaaagatacaatgaactgcaatgactacgatttcgatattagagttatgagtagtagaacgtgccttatgtgcccaatcatcggacccccctcctcgctttgcgacccccatagacagctcttatcatcgctatatttcgttctaattgtaatcattccattataatgaattggccaaagaaaacaataacagaaggcacaaaaaaagaggttaagtttgtggaaccgaaaacgtgatacccttacaacatattttgaggtgatttgaaaatataactaggataaagtatctgctgttctatcactcaaagtgaattccttgaattaaagtctagaccatttatatatagctcgtacaaatattgataagcaggtgtttagtattgctcagcgattctaaaaagatccattagtagcacctgcatttttaagggtgtacgtaagcgtgttagcgggaaaacacctgctcattgaaaattgtatgacaaatatttgattcttaagttagtagaagaagaatagcaaaaagaaatcattagaagatcgagagatttaagcaaaagaccctattgactggcagcatcctcctttttttgaatagggtagtctgatgacgtctgatgacgtgtggggcgatgttattttcaactggagcgttgttatcgtcgccaccatcaacgcgccaagttcaatagagcttgaaaaacaattatgaaagcaaaaacatgtatgtagaaaaagggggctcgttgcccacacacacacgcattcacacatatatatgtgcaagggcatggcaaagaggggcgtggcagagttgggggtatatcaacgaggacggggccgccaattaaagattcctcctaattgtattttcaatgtgcgttagtgtgtgtgcgcaattgatattccagcgattcattagtgtgcagcataattgagtgccccactgtgtgagtgcgtgtgtatgtgtgagtggataaacacacagcatcagttgggggctcgtctctctctctttctcactcacacacgctcactctcacccatactcacacagatgggaagcagcgacgttggcagagaaagagccgtatgcgctctctcttatcgatcgcatgctaattggaatattgcgaataaaattgagattgtgacgcatttgaactcgcgactctccgccctgacccctcctcctctctccccccaccatactacttccttcgacaccccctcctctcccccccacccaccaccgacacaaactaatttcattgcgaaaaagtcgaaggcaacaattttttttttgcttagtcttttttattcgcatttaataaaattgcaatttattacaaaagcgatctgattattaattgcttgtgaattgatttcgattcagaatcgaacgatagtggttcctaggggctgttgcgaggggggttgtgggcgaaggtgtggcaagtgcctgcgtgaccagcgcaacgtcaggctcaaaaaaagtgaataagcatgtaagcaattctggttggaagccggctttaaaaagtgcatgtggatgtggatatggagatggagatgttcggcggatcacgtagccagcactccacttggaaaacttaaaacctaaaactaaaaaccaatggcggaggtctccagctgacgcgacactaaatgcatagccacttttttctaagccaaaaaactgactcaacagccggcgaaatgcagatcggattaacccatggccatctagggcttagcatttgtgcatttctaactatttcttcaaggtatcaacatagctccaatatctgaaagaatagcttcatttgcaaccaatcttgaagatctagcaagaaccaccttacaaagaaggtaaagaaatatctgtcctcaagttctggcaaaaactgatagaatgaatattctgacctctagaagtaaattaagtggtatagtcacacatattcattcgagaatgtactaggttataaaatgtaaagataactcgcttaaataataataataactcgaaatacaaatgaatccgctcttaagcaacgaaatcggcacagataagctgatattataaatatagatcaaactgcacaagttcgcacagttctcaatgacaaattccggttgtggagatgtcaaaacagatctcaggcaacgaatattcataatattttgcttaagttctgtttgacaattggcattcttctcacgctcgatcgccactgaggactttgtttactcttagtatccgccagtttttcggcgtataaaagcacattgctgaccaaatactgcagttatcattattgcccggctttcgggaagcaaaacaacaacaacagatccgatatatgaggggaaactacagaccaactggcgactaccccagaaaaactgagatccccccagtgtctgttggtattccactagtctgttgcctagcgcgataacaaatcatttttgttgcacaattaaaaatcacgagtgtgctaaattaaagatgaaatgtttcaattaaatcgtttgcgaattgaccctttgtacccacgtcacatgaatcaaacatggaatcaaactgctcatttttagcactctcatcacgaaaagttatgaattgatggcacaagatcagaaactggtacaaaaatgtatgaagatgttcaaagtcgagataccattcgattgccaaggcgatgagtcaaacggaggaagctgctatataagttatacggatggttttgaaccccgaaccccaattaagtgggctatcttttctgctaaatcatggtttctaggcggtcctacatataaaaaatatattattgagaaaggttttttttcgtttgccgctataaagattattcagtttttgatggaatattttttaattaagccatagaactgtgcagtatatagtcaaaattaatttaaataaagatccaaatgcatatattccccaataatcagagacatttaagcttgtaatagttgtccaaaaatcccgccatatgcttatagttagtacacttatttagtgattgactagcattcgtacctgcatattttttgttttttggatgacgttcactcgaagcttcgttggcactttcactagagttctagaacttcggctggagtttccggtggaaatggaatacgttaaggtgggctttcgatttcacttggactaaaactcaggctgcagttgcagttatactctcggctctgtatatatatgtgaatatatatatatatggtcgattctcggtggagctccgttctgctcgagatgtggcgagtgatgatggactgtgtggcggaagattgagcgtccatgcttttatatctggcatctggcatgggcatgggcatgggcatgcccgaaccgaaccaaaaatcaacaagtgggcgaatgcgggacgaacggacgaacggacaaacggacaaacggacgcatggacaaacggacgagcgagcaaattggactctacaggggctttaataacagttatggcgtcggcactctctacagatacagtatctcaatccgcattcgtatctgtaaatgtatctgtggcggctgccttcgtgtccacgctcgggtttcttatatttttttcgttagccccaaaaagggggtggctcacaggggatgggatggctgtggctctggctccgagttacttgttgctcccctttgattgattgactcgcaaagaaaattgtatgcaaatttattattttaaattacatttttctcattaacattcgcagaagattggatcggctgcgttcggatcggactggaaatcaaatgaaatgaaatgaaatgaaatgcgtgccccaaatgcatatgaaaatcactacggttttttacagtacactcaagcgcctcgatcccacaaattaccatatggcggtgactctcacaaggatcaatagatgccagtcacttggcggaggcggtgccttctgatttcccaccattcccaacattgatggcctccgcctttgggctgataattccggatttgttcaggtcgcgattttaattcggctcgacgggaattagttccatctgctttccggtcagacagtcaatcaccgtggttctatggatatatgtagagctggagatacagatataggtatggctatgacgatagcgatggcgatggcagacctgctgcctccagttggagactctgcatcaattgccgcggtgtcc

SEQ ID NO: 36941 - DNA, 968 bp, DROSOPHILA
cagagccgagagtataactgcaactgcagcctgagttttagtccaagtgaaatcgaaagcccaccttaacgtattccatttccaccggaaactccagccgaagttctagaactctagtgaaagtgccaacgaagcttcgagtgaacgtcatccaaaaaacaaaaaatatgcagaaaatgaatttacatgtgtgcgccttagcgctgctgctgttcggcagcatcgccactgtccgcggaagagccgtggacctggtagacgatagcaacgacgtggataactccatcgaggcggaggaggagaagccacgcaaccgagccttcgaagccgactggctcaagttcaccaagacgccgccgacgaagctgcagcaggccgatggagccaccatcgagatcgtttgcgagatgatgggctcccaagtgcccagcatccagtgggtggtgggtcacctgccccgctcggagctcgatgatctggactccaaccaggttgccgaagaggcgcccagtgccattgtgcgcgtccgatcgtcgcatatcatcgaccacgtgctgagcgaggcccgcacctacacgtgtgtgggacgcactggctccaagaccatctatgccagcactgtggtgcatcctcctcgctcctctcgtctgacgccggagaagacctacccgggtgcccagaaaccgcgaatcatctacaccgagaagacgcatctggacctcatgggctccaacattcagctgccctgccgcgtgcacgcccgtccccgcgccgagatcacctggttgaataacgagaacaaggagatcgtccaaggacatcgccacagggtgctggccaacggcgatcttctgatctccgagatcaagtgggaggatatgggcaactacaagtgcatagcccgcaacgtcgtcggaaaggataccgccgataccttcgtgtatcccgtacttaatgaggaagactaa

SEQ ID NO: 36942 - protein, 266 aa, DROSOPHILA
MQKMNLHVCALALLLFGSIATVRGRAVDLVDDSNDVDNSIEAEEEKPRNRAFEADWLKFTKTPPTKLQQADGATIEIVCEMMGSQVPSIQWVVGHLPRSELDDLDSNQVAEEAPSAIVRVRSSHIIDHVLSEARTYTCVGRTGSKTIYASTVVHPPRSSRLTPEKTYPGAQKPRIIYTEKTHLDLMGSNIQLPCRVHARPRAEITWLNNENKEIVQGHRHRVLANGDLLISEIKWEDMGNYKCIARNVVGKDTADTFVYPVLNEED

SEQ ID NO: 36943 - DNA, 6644 bp, DROSOPHILA
tcgcttaatgatttcacgtgtgtgagtgttgttgtgttgcagtgttcatgttgcagttgctgtttcgtgggtgtgagttgctgctcgatgagttcggcagatgactcttaaacgctatgtgcggcaaatgtggcaggttcctggcaaatgaggaatttcgaatttggaattggaagccaatatcgctaatgctactgcacgacaaatgaatcaaatcaaatgtaaaagggaaacaatcagaacgtgataatagaatttaggtacatacccgttcaagtacaattaaacaaaacaagttggacgagacgaaacaaaaccacaaatgtaaacataataggcggcaaactcaactcaagtggtgggccaatattaacatatccatcttatccaaatttcatttaaacaaattacaatttaatcaatataaagctctgttctcataaacgctctctcaggttcacacgacgcgaaacaattatttgcatctgcagttgtaaatctgcgctttataatacgtaatcataatcataatattatcattaaggtaatcgattcttgccatatacacaatagcaataaaaactaagaagcgaaattattctacggtggaaaacgaattttggctatgaagcaacgtaatttaaaagggtattattaacaatatacactcacagccacagccacaccccgaccacccgactaccctactcttctttcccttaattgtttaatgttttttgtgtgtgtgttacggtgtgtgtggtgttaatggtgtgtgtggtgtatgtgagcagttgcgttttgttggcaaggcattcaacattacgttgcggaccctcacatccgcggcatctgtctgtgtgtgcttttctgtgtttggatgagtttgcaatgaaatctcgcttgaagctgtatactagctgccccgtccctgaccgttcaccgcctgaatccaagcgagacggcggcgtaggctccaccggaagtgccccaccgtctcctatgagcacttcacacatgcaccctcaacatcaaagtcgaggaccattagctttgtttcctccgttccgttgcgggaaccgacggcacaaatgagtttagtgtcgtttgctctgaaaagtttttagatatagttaattacatttataatgagcggatttatatcgtcttggacttacctaatccgccacacaacgccgccggatccaccagagtccagagccacaagattacgtataaagtcgcccgtcttaacgtcccacaatttcacggtgccatcgtcggaactggtcaccacaaatcgggagttaaattgcaggcaggtgaccgcagaatgatgcttatttggacctaaaggggatttaaggagtaccagattagtagtggatcttttacagcatgttagtgaaaagtaaacacggaggattcaaacttacccgacagcgtttgcagacattgtccggttgtgatgtcccacaccttgactgtcgagtcggcgttgcccgagacaagaatgttttgacgcagttccatgccagaggtcaaactctgatgacccatcagggtgtgcttgcaattgcccgtctccacgtcccacacgcgaatagaggtgtccaatgaacccgataccacatgcaggccatcaaactgtgtgaaatttagaatggtttacggcaaagtccgacaaagaagtgttgactatcttacctgcagcgagtagacgcgatttgtgtggccctgcagtgtgtgcaggcactcctggcgctccggatgccagatcttcaccatataatcatacgctccggacacaatcagcttcccatcgtactgcacacaacgcacagcagccaagtgaccaaccaaaacgtgcagacaggagccttgttcaatgtcccaaaccctcaaggttgcgtctcgcgagccactgaccactctgttgagaaattcgtcaacaatcagcattggttagtggatagttgtgtgtggttttaacttacttgctgccatgcaaatgcatacaccgcacagtggacgtatgcccctgaagtgtgtgcacacatgcgccgctgtccatgtcccagactttgagcgtgcgatccgtgctgcctgaaatgatgatatttccggacatttgggaagaccaaacaccaccggtgtgaccaaccaaagtgcgcaggcactacagttgttgagaaagatatctcgttagcagggaaacattaaatgattgcttgttcgatttactcacctttccgttcaccgctgaccatactttaagtgtattgtcatcggagccggacacaatgcgattgccagagaactgcaggcacgtaatcacatgatcgtcgtggcccttgagtaccttgggcttgcgcacaggtcgcgaccgccagttcatttcgatgatgtgctgacgcatgtaggcggccttccagggcgaagcaattggcggcatgttgccatcgcgtccccgtttcgggcgatcactacgcggctcggcgaggatctgggctttgcggcacttctccttccacaacagattgtcgtcgcacaggaagcgccagctgcggcaggtctgcgctgccctcagcaagtctttgggctccaagtacgagagcacaaagagggctagctctcttggcagcagggagatgaagtcccgctggaactgcggctcaatcaccttcatcatgtgccgcacctgagacggatcgcagtgatcgatgagacggtccagggccagcaatcgctcgacatgggaccatcgttggaattgtgccaaccagtgctgcagctctggtggcggattgtcacgagacggcacggaacgtggggtgcgacgacccaaagccgatcccggcgtggagctagtcagatgcgatgagggcgtcaccgatagcactgccgtgggtcccaaatgttgcgaggagcgcggcgtagatgcaaaatcataggcaatccgcttgcggcaattatcgctcacacctgaacccggtccgcccacttcgccgctggaagatatagtcaccgagtagtcgccgccatccagcagacgtccctcgttgaactttcgtttgcgctgatgagacattagcgagctgggattggtcagcgagtattcggtgaagccagctgaggcagaggacagcgacaaggaaatgggctcatcgggatccatggcgtccatgtcgaaagtctcgctgagactggcattgcttccgccgtagctgcttccgttaccgttctggcatgtgcaaatctcctccagatcggaacagttgttctcctcatcgcagttggcccaaggttcctcggcactaaagtcgccgggctccaccacgccgccgtcccctccgccagctccctcttccaccaccacttccaggtggacaacatcgctggaaccgtttcgccgttgccgaacagatgctgtcgggtttgccccaaccgaccccgctccactagcagctggaggattgctgcgagtcaggaaacgctcctgggtttgggcgctggcattaacctggcgagctgcctttgtcgtcgatgtagtggcatactggcaacggttggacgctccggctccggacgaggtagaagccgatgtcgaggcctgagagtcacccaagcaggccgatccggtggagcaggcagctgttggattgatggcagtggtgcgactgcaaccactttcctgagaggtctgcgatcccaccgagctatacgagacggatgcactcacattctcctcctgatcctgttgacagcttcccccggatgtggacgaaccagacgtggttggagccagactggggtaatcattcgagttggtgtttgtgtaaacgtccgttcgggcagctccagtgcaactggtcgatgactccatggattttgaagtggaactggaaccactccggtgctggctgcagctggaggcgcccaacgaggatcccagatttaatttggcagtggacttgcttagccggctattcgtgtacttgcgactgctcgttggagtcgtggacagatccttgtaggtgtacttgctgtccgatgagacggtccgcccattgctgctgctgggccagtcgtcactgttggccgtacccgatccattggccgccttgcttccccccgccatggacttgatcagacttagattcagtttgttctggctcaccatggagctggtacgcaggattatgccgcccgtgagacgctgctccgtctcaaagtcgcgacgctcgatcagatccatggactcaatgtctgccctcgacaaggcagagctggaggttgagctggagttggaagtggaggcctcctctggggcggcggcgttggcagaggctgctggcgagggattcgaaacggtgttggccgtgaggctcatctgcttcaggcgcactgacataagacggtcatgtagtgagaagcaagtagccccatcgtcgccttcagatggattgtcgtccacgggattaaccggctcagacttaatacatcttcccaaagccaggttctctgcttggtcttcctcacccagcaagaactcatcgctcaatctttttggcttgcctgtgagctccgactgggatcccgttgtgactacctgaccgggatgcggctgggcctcctccacgacgggcgtctccaggaagatcttagatccatcggccgccatgatggtgccgtcggctaaagccaactgtgatgtgttggggcagctgatggcgcccgttacaatgtccactgcgtcctcgtcctcgtcttcaatcagttcctcctcatcgtcctcctccggctcgggttcctcatcatcgtcatcgtcgtttataaggcatacaaccggaggatcttcattatcctcattaaaaaagccctgacgactgtgttccgatgaggcggggtgacctaagtcaggatgaccaccgttcaaggtatccgtggaggagctgtcgtcgacggccaccactcccactgtggacgccgcccccgcactggtgggcagtgagttggaagagctaatctcaaatgtgctggactcgtcgtccaaaactacggcgaaaccatgttgtgagtttgacgacacacacacgtcctccacatcctcccgcagcgttgacatagatacaaaggcttctctgccggctcctacttctgcgtctactgctcctaatcccgattcttctgatgcttctgtttttcggctggttgaggcctgactcttgacccacgtggaggtggagctggtgactgctgactgagtacgctcccctgcactggtcacggattcactgctagcagctgggcatcctctttccataatactttacaggcattcaaaagtgggtaatgcgttctcctgcaaatgttaaagattggttatcgaatggttggaagctggtaacacgaggaagcacttatggaaaagtgaataatagtgttgaaaatagacgctatgaaaatttcaaacccaaggtatgacaaattttacaccgcttacaatgaacgatccttttgtgccctgagaatccaagatgatccgaaattcccacgcaacaagcgcaaactgatggttgcaaaaaaaaattaaatccaagggaatgaaaagcagtgggaaaaatttgttgtaacgacgctgcctctgccggcgtcgttggaactcgaaaaaggaaatcacaaaagtgcatcgaggaagaggctaaaacggcgcgaagtagaatgggcaaaagaagacgaaacgggtattacaacaaaaacaccacaaacagacacacacacataccctaaaaagagagacaacagcaaaaggtattgtaaagagagtgaagagcgagaagtaacggacgtgagaagaagaagcaccaaagatacacagcagccgcagcaccaaacaagaacaacaataacaacaacaccacgtacaccttgcaattcaagccgctatcttttccctccgctttttactgactttcagagatgatcaacgcgggaaagtcactggtgatcgggaaacagtcaccgaactaataggaaaagccttccaaataatttttatactaaagaagtgtatgaccatattcaaatagtttcgacacccaactaaagttaaaatgtacattagtaaatcgttttaataaactgcgttggttgttactaatagaactgtgaaatctatagtcacgaaacatttcttgctgactagagctgagccaagcccaagctaagattacttctgccaatatgctgagtcacagagttgttgactttccaaaatacatacgtattagtcatccattttaaaaagttacattaaaacgtgagttttttacatgggctatataaaatcgcaaacatttagtcgaaaccgaaattccaaataacaagatattagtcattctgtaaaacaaattatttgtgcaaactgactttcttttcctggagaacggaaagaaatcattaattattagggctaagatgtttgtaaattgtatgatagtagtccctattctctagaaattcattgatcctagccagcttccattcaccgtgactgaaaaatcgcagctgcgcatctctgatgtttgacagcagcttgactggccatcacatcctaccagcgcacagacacacacacgcac

SEQ ID NO: 36944 - DNA, 4158 bp, DROSOPHILA
cagcgtcgttacaacaaatttttcccactgcttttcattcccttggatttaatttttttttgcaaccatcagtttgcgcttgttgcgtgggaatttcggatcatcttggattctcagggcacaaaaggatcgttcattgagaacgcattacccacttttgaatgcctgtaaagtattatggaaagaggatgcccagctgctagcagtgaatccgtgaccagtgcaggggagcgtactcagtcagcagtcaccagctccacctccacgtgggtcaagagtcaggcctcaaccagccgaaaaacagaagcatcagaagaatcgggattaggagcagtagacgcagaagtaggagccggcagagaagcctttgtatctatgtcaacgctgcgggaggatgtggaggacgtgtgtgtgtcgtcaaactcacaacatggtttcgccgtagttttggacgacgagtccagcacatttgagattagctcttccaactcactgcccaccagtgcgggggcggcgtccacagtgggagtggtggccgtcgacgacagctcctccacggataccttgaacggtggtcatcctgacttaggtcaccccgcctcatcggaacacagtcgtcagggcttttttaatgaggataatgaagatcctccggttgtatgccttataaacgacgatgacgatgatgaggaacccgagccggaggaggacgatgaggaggaactgattgaagacgaggacgaggacgcagtggacattgtaacgggcgccatcagctgccccaacacatcacagttggctttagccgacggcaccatcatggcggccgatggatctaagatcttcctggagacgcccgtcgtggaggaggcccagccgcatcccggtcaggtagtcacaacgggatcccagtcggagctcacaggcaagccaaaaagattgagcgatgagttcttgctgggtgaggaagaccaagcagagaacctggctttgggaagatgtattaagtctgagccggttaatcccgtggacgacaatccatctgaaggcgacgatggggctacttgcttctcactacatgaccgtcttatgtcagtgcgcctgaagcagatgagcctcacggccaacaccgtttcgaatccctcgccagcagcctctgccaacgccgccgccccagaggaggcctccacttccaactccagctcaacctccagctctgccttgtcgagggcagacattgagtccatggatctgatcgagcgtcgcgactttgagacggagcagcgtctcacgggcggcataatcctgcgtaccagctccatggtgagccagaacaaactgaatctaagtctgatcaagtccatggcggggggaagcaaggcggccaatggatcgggtacggccaacagtgacgactggcccagcagcagcaatgggcggaccgtctcatcggacagcaagtacacctacaaggatctgtccacgactccaacgagcagtcgcaagtacacgaatagccggctaagcaagtccactgccaaattaaatctgggatcctcgttgggcgcctccagctgcagccagcaccggagtggttccagttccacttcaaaatccatggagtcatcgaccagttgcactggagctgcccgaacggacgtttacacaaacaccaactcgaatgattaccccagtctggctccaaccacgtctggttcgtccacatccgggggaagctgtcaacaggatcaggaggagaatgtgagtgcatccgtctcgtatagctcggtgggatcgcagacctctcaggaaagtggttgcagtcgcaccactgccatcaatccaacagctgcctgctccaccggatcggcctgcttgggtgactctcaggcctcgacatcggcttctacctcgtccggagccggagcgtccaaccgttgccagtatgccactacatcgacgacaaaggcagctcgccaggttaatgccagcgcccaaacccaggagcgtttcctgactcgcagcaatcctccagctgctagtggagcggggtcggttggggcaaacccgacagcatctgttcggcaacggcgaaacggttccagcgatgttgtccacctggaagtggtggtggaagagggagctggcggaggggacggcggcgtggtggagcccggcgactttagtgccgaggaaccttgggccaactgcgatgaggagaacaactgttccgatctggaggagatttgcacatgccagaacggtaacggaagcagctacggcggaagcaatgccagtctcagcgagactttcgacatggacgccatggatcccgatgagcccatttccttgtcgctgtcctctgcctcagctggcttcaccgaatactcgctgaccaatcccagctcgctaatgtctcatcagcgcaaacgaaagttcaacgagggacgtctgctggatggcggcgactactcggtgactatatcttccagcggcgaagtgggcggaccgggttcaggtgtgagcgataattgccgcaagcggattgcctatgattttgcatctacgccgcgctcctcgcaacatttgggacccacggcagtgctatcggtgacgccctcatcgcatctgactagctccacgccgggatcggctttgggtcgtcgcaccccacgttccgtgccgtctcgtgacaatccgccaccagagctgcagcactggttggcacaattccaacgatggtcccatgtcgagcgattgctggccctggaccgtctcatcgatcactgcgatccgtctcaggtgcggcacatgatgaaggtgattgagccgcagttccagcgggacttcatctccctgctgccaagagagctagccctctttgtgctctcgtacttggagcccaaagacttgctgagggcagcgcagacctgccgcagctggcgcttcctgtgcgacgacaatctgttgtggaaggagaagtgccgcaaagcccagatcctcgccgagccgcgtagtgatcgcccgaaacggggacgcgatggcaacatgccgccaattgcttcgccctggaaggccgcctacatgcgtcagcacatcatcgaaatgaactggcggtcgcgacctgtgcgcaagcccaaggtactcaagggccacgacgatcatgtgattacgtgcctgcagttctctggcaatcgcattgtgtccggctccgatgacaatacacttaaagtatggtcagcggtgaacggaaagtgcctgcgcactttggttggtcacaccggtggtgtttggtcttcccaaatgtccggaaatatcatcatttcaggcagcacggatcgcacgctcaaagtctgggacatggacagcggcgcatgtgtgcacacacttcaggggcatacgtccactgtgcggtgtatgcatttgcatggcagcaaagtggtcagtggctcgcgagacgcaaccttgagggtttgggacattgaacaaggctcctgtctgcacgttttggttggtcacttggctgctgtgcgttgtgtgcagtacgatgggaagctgattgtgtccggagcgtatgattatatggtgaagatctggcatccggagcgccaggagtgcctgcacacactgcagggccacacaaatcgcgtctactcgctgcagtttgatggcctgcatgtggtatcgggttcattggacacctctattcgcgtgtgggacgtggagacgggcaattgcaagcacaccctgatgggtcatcagagtttgacctctggcatggaactgcgtcaaaacattcttgtctcgggcaacgccgactcgacagtcaaggtgtgggacatcacaaccggacaatgtctgcaaacgctgtcgggtccaaataagcatcattctgcggtcacctgcctgcaatttaactcccgatttgtggtgaccagttccgacgatggcaccgtgaaattgtgggacgttaagacgggcgactttatacgtaatcttgtggctctggactctggtggatccggcggcgttgtgtggcggattagagcaaacgacactaaactcatttgtgccgtcggttcccgcaacggaacggaggaaacaaagctaatggtcctcgactttgatgttgagggtgcatgtgtgaagtgctcatag

SEQ ID NO: 36945 - protein, 1326 aa, DROSOPHILA; identical to SEQ ID NO: 28503

SEQ ID NO: 36946 - DNA, 5072 bp, DROSOPHILA
tatacggtgatgttgtcgtacaactacaccagtggctacgacttcctctcgtacatggagtatcctgttttgctgctgcaggagtacgccctgatttactacgccttcaagtaccaggatctgctgggaaggaggacgcaagtggtggccatactgtatagtatagtggccactctcatatacatgaagctctttcccattatcatccttaagttcctggtggtgagtaagcctgtattgatatcacctagtgactgattagtcgggtattcttgcccagataacgacttcggcgcagttcaaacccgttccccgctctcttttccaattaactaattatgtttccgggcaaacgggtttggtttgatttgttatttgttttagtttgaaaaggcggtgctcttaactgggcagcatcttcgctcaaggtcaccgatgtttgttgtataatatttgagcggctattaatactttcagtgctcgggcaatatatataaatctcgtgaaattcatctaaatgtttgatttcccgtcagcctttctgcactcccattggagccacgagtaaggtcctccagctgctggctattctgaggaccaaggatgccagttccgtcagtagaaccacatgggcgctctccgcctttacaaacatgagtgagatcacatcttgcattccatcacttgatgtcatcaattaacacatcatatatgtatcccttacagctcgaatctacacggtgttcttccagtcccacgattggatgttgctatcaaacttcctgatttcgacgttccttagcgcctccgttttcaccgccgcttgcgtctacaagaagaaggccaaggcggagtaattggccagcctgattagaaaagctcaacatagacaaacactgcgctggctggaaatgcttatcagtcattgttttaattctatttgcttatctgtttaaattgatattacaaattcttgtttgaatcggttgttgttactcgtttaactgtccgcgtagaaagccaccacaattgcacccacaactgttagaatggatactgcatagattgctctacgttgccaatcgatcttggtcttggccggtccagaacccacagttttgcgctccttgtgcttgcgtttgccgaacttggcctcgaacttctcgagttccaggcggtttctttcttcctcgtcgcgacgcttttgttccagctgcagttgctctgccgcctggacgcgaatttgctccgccttgcagttcgagtcgcaatccaagaatgtctgaccagcacggtgtttgtcacaggcaatctcctgcttgagtcgcttgcaggcgcagaaaatgcgaaccttcttgcggcacaactcgggatttgggcacttgcctgtgtggcagatggctgtgcagcgatgtccgcaaggatactgaaaaaatatatatatcactgtaaggcttgatcgacaatggtatattacagcacttacattcttcaagcatcgattaccgcagctccgtagcttttctcttcgctcgatgatctcctggaccgatcccgtttcatcataatactcgttgcacttgtaaaccaactggttgagtccacagtgacacttggtcttaatcacaaagttgcagggcgcacagggcggtggatgacatcctttgggacaggcgtgaatacatccggttggtcggggaacggtgcaaccctcctcgcagttggcacagccagtttgcgcagacatatcctggggaagcggtacgaaatggcaaaccaatgaacacttgtgattgccgcacttaagctgacgtgcacacgatcgctgacaggaagtgggtttggagttccagcatggccaagtggcaacctcatgacctccgatacaggtgacaatgacgccttcctcgcaccgtggatgtggtaatgccttatactcatactgtaaaacaaattgtagagttttaatgttgagataggtgagttttgtgattatagttacctttttggcctgtggcctagcctctttgggtttattaactctaactgcctcgtggcatcgtgccttacagatgtgcccacacttgctggtgtcattgggtagaccgcacacttggccacatggaggacagtcacccttgtgacaacgatgcttaatggcatggtgacatttgggagttatgctgcaagaagtgagattaaaagtcggtcattatatattgcgaaagaaatacgaaccgacagagttccaagcagacaatgcgtgcacttctttccctgccacaaggaacactttttttggtctttccacagcggcagttaatctgggattccagtttacacggatagcaaggtccgttgtggcacacggactgacatttgtgcttgttgcagctcagctgcttgccacaaatcttttcgcacggtggacactggtccccacagcactttaaaaaaggttattggttaattcggctgtatacatttaaaatgcttgcgtgctcttatacctttctattgcatgcatgcttgccgcaatcacgcatttgcttgcatttagtctcgcatgcaaactctttggagcagggcaactccttttcgtgcagaccacaacgacacttctttttggttcttattgggcactgtaagaaacatatttcattagagaatcgatttgcttccctggtggctatcttacggaaatgcaaggtccacgatgacaacgctgggtgcaagtgtgctggccacaggacaaaagtttttggcacgtatcgccacaggtttcctctgtctcattacagggtcttacctgggtctacagaattaggtaatcataaatgaatataaacttgtaaataaatatatcacatacattcttgccgcatgggcaactcctgacttgcaaaggacactctccatctccgcagggtccagcgtgacacaccttctcgcaaatgtgcaaaccacaagcaaatggagctccacaaacctgaaagaatattaatgttgttttatgcttcagcttcaaaaggcttttcttacattctgacacttccatttccgatcggagcagttgaccatcttcgactcccgctggcactcgcaaggttgtaagcttttgctggtgcatggaggacactttcctggctgatgacacacctgattacatttgtgcttgccgcaggctagaagttccttgcactggaaaatcatttttttagtatggtggtcagacaaaatttcttaaaacgttaagacttacagtctgctgacacgtccactgcttgtcaatgcacctcacggacctaggactagatttaccacacaggcacgagacctgcgcctgctgcgcacaaggaggacatggccccggatgacatagcagcttgcaatcgtgcccacacttcggttgcaaaagctttccgcagtgctctccgcatgagtggggcacaaggaagggctggttctcggggttcacctccttgccgcagaagcagttgtactgcgtgggcttatcggccggttggtagtccctgcggcacttggggcagcaccagtgaagggatttctgtcgcttgggcggcacaaattcgcccagatgattgtagtggccctggccgttctgctgctctgccgcctttaccttcatctgcatcatgctgtcgttggcccaccgttggatgcacttcaagtgaaagaagcagtaacagctctcgcaagaccaaatggcctccacccgccgaatgcttccgatgcaaatgagacaggttgccgctcccgagtgtagagtgttttccagaaacgtactggtgcgtgccgcttcctttgagcttcctgcgttgtccgacggtttgtagttcttgtataggagttctgaaaagataaagcacaaaatttgatggttttcaaatgacacgtcacaagcatcggtcgatttacccaaaatgtgattctcatccagttcgccttcatcctcggagctggaggcgtaggtgtccaccagtttttgggcggcagccaaatttttagcttgcgctttattaaacttttccatttttaagccggcgtttttgtctatcaactgggaataaattcctggggtagaaccagggatggctcgttctctgataacagcaattaggggatctagttccgaaaggtacacatttgtgtgagctttcagtttccaattgggaatttcatttaattcaaaaaaaatacatacatacacattaatacctaaattatcaaacatcctctctgcatattttattgcatttaataatttggaccaacattttgaagtttacaattaataggtcaggtatctaatgtggcagccctggtattcgatgttaaacatctgttcgtgagtgcgacaccctggaacagctttcacatcatttgcaacaaaataaaatagagaaaattaaatatatccagacataccgactacgatccgatccaagatgagtttcctaaattacgtgtttggccccaacctctacatggaataccgcggtgtgccggagccgcagcgcaagatgtacgaggcaggtgccgtggaaaagttcggggagcagattctatcgacggtaagtgccctgcgatcccatggggcagaatctggagcatatggtaatgtggaaaatcgacactctccgttgcagctatcggttatgtggtccgtgggctattatacttctccgctgctcgtcacattcctataccgacgcggctacctggtgaccgattccataccgacgctggccaagatcaccaccagcgtgggcctcatcgtcatcctatcgctggtgatgcgcggcctggggcgcaagcaatcgcgctcctactccaacatgattaaggccctcgtccgagcaaagtcctccaaggcaccaggagatgccaacagcgagctgcgtcgcttcgacatcgagttcaacgcttggccggtggactttgatgtgaaagctctaaccgggtgagtgggctacgcctttgaagtgtgccagaataacatcttcgttttcagtgataccaaaaagccggtggttacggctagaaggcgg

SEQ ID NO: 36947 - DNA, 2292 bp, DROSOPHILA
aaaaacgccggcttaaaaatggaaaagtttaataaagcgcaagctaaaaatttggctgccgcccaaaaactggtggacacctacgcctccagctccgaggatgaaggcgaactggatgagaatcacattttggaactcctatacaagaactacaaaccgtcggacaacgcaggaagctcaaaggaagcggcacgcaccagtacgtttctggaaaacactctacactcgggagcggcaacctgtctcatttgcatcggaagcattcggcgggtggaggccatttggtcttgcgagagctgttactgcttctttcacttgaagtgcatccaacggtgggccaacgacagcatgatgcagatgaaggtaaaggcggcagagcagcagaacggccagggccactacaatcatctgggcgaatttgtgccgcccaagcgacagaaatcccttcactggtgctgccccaagtgccgcagggactaccaaccggccgataagcccacgcagtacaactgcttctgcggcaaggaggtgaaccccgagaaccagcccttccttgtgccccactcatgcggagagcactgcggaaagcttttgcaaccgaagtgtgggcacgattgcaagctgctatgtcatccggggccatgtcctccttgtgcgcagcaggcgcaggtctcgtgcctgtgtggtaaatctagtcctaggtccgtgaggtgcattgacaagcagtggacgtgtcagcagacttgcaaggaacttctagcctgcggcaagcacaaatgtaatcaggtgtgtcatcagccaggaaagtgtcctccatgcaccagcaaaagcttacaaccttgcgagtgccagcgggagtcgaagatggtcaactgctccgatcggaaatggaagtgtcagaatgtttgtggagctccatttgcttgtggtttgcacatttgcgagaaggtgtgtcacgctggaccctgcggagatggagagtgtcctttgcaagtcaggagttgcccatgcggcaagaattgctgtggggaccagtgtccaccgtgcgaaaagatttgtggcaagcagctgagctgcaacaagcacaaatgtcagtccgtgtgccacaacggaccttgctatccgtgtaaactggaatcccagattaactgccgctgtggaaagaccaaaaaaagtgttccttgtggcagggaaagaagtgcacgcattgtctgcttggaactctgtcgcataactcccaaatgtcaccatgccattaagcatcgttgtcacaagggtgactgtcctccatgtggccaagtgtgcggtctacccaatgacaccagcaagtgtgggcacatctgtaaggcacgatgccacgaggcagttagagttaataaacccaaagaggctaggccacaggccaaaaagtatgagtataaggcattaccacatccacggtgcgaggaaggcgtcattgtcacctgtatcggaggtcatgaggttgccacttggccatgctggaactccaaacccacttcctgtcagcgatcgtgtgcacgtcagcttaagtgcggcaatcacaagtgttcattggtttgccatttcgtaccgcttccccaggatatgtctgcgcaaactggctgtgccaactgcgaggagggttgcaccgttccccgaccaaccggatgtattcacgcctgtcccaaaggatgtcatccaccgccctgtgcgccctgcaactttgtgattaagaccaagtgtcactgtggactcaaccagttggtttacaagtgcaacgagtattatgatgaaacgggatcggtccaggagatcatcgagcgaagagaaaagctacggagctgcggtaatcgatgcttgaagaattatccttgcggacatcgctgcacagccatctgccacacaggcaagtgcccaaatcccgagttgtgccgcaagaaggttcgcattttctgcgcctgcaagcgactcaagcaggagattgcctgtgacaaacaccgtgctggtcagacattcttggattgcgactcgaactgcaaggcggagcaaattcgcgtccaggcggcagagcaactgcagctggaacaaaagcgtcgcgacgaggaagaaagaaaccgcctggaactcgagaagttcgaggccaagttcggcaaacgcaagcacaaggagcgcaaaactgtgggttctggaccggccaagaccaagatcgattggcaacgtagagcaatctatgcagtatccattctaacagttgtgggtgcaattgtggtggctttctacgcggacagttaa

SEQ ID NO: 36948 - protein, 757 aa, DROSOPHILA
MEKFNKAQAKNLAAAQKLVDTYASSSEDEGELDENHILELLYKNYKPSDNAGSSKEAARTSTFLENTLHSGAATCLICIGSIRRVEAIWSCESCYCFFHLKCIQRWANDSMMQMKVKAAEQQNGQGHYNHLGEFVPPKRQKSLHWCCPKCRRDYQPADKPTQYNCFCGKEVNPENQPFLVPHSCGEHCGKLLQPKCGHDCKLLCHPGPCPPCAQQAQVSCLCGKSSPRSVRCIDKQWTCQQTCKELLACGKHKCNQVCHQPGKCPPCTSKSLQPCECQRESKMVNCSDRKWKCQNVCGAPFACGLHICEKVCHAGPCGDGECPLQVRSCPCGKNCCGDQCPPCEKICGKQLSCNKHKCQSVCHNGPCYPCKLESQINCRCGKTKKSVPCGRERSARIVCLELCRITPKCHHAIKHRCHKGDCPPCGQVCGLPNDTSKCGHICKARCHEAVRVNKPKEARPQAKKYEYKALPHPRCEEGVIVTCIGGHEVATWPCWNSKPTSCQRSCARQLKCGNHKCSLVCHFVPLPQDMSAQTGCANCEEGCTVPRPTGCIHACPKGCHPPPCAPCNFVIKTKCHCGLNQLVYKCNEYYDETGSVQEIIERREKLRSCGNRCLKNYPCGHRCTAICHTGKCPNPELCRKKVRIFCACKRLKQEIACDKHRAGQTFLDCDSNCKAEQIRVQAAEQLQLEQKRRDEEERNRLELEKFEAKFGKRKHKERKTVGSGPAKTKIDWQRRAIYAVSILTVVGAIVVAFYADS

SEQ ID NO: 36949 - DNA, 3014 bp, DROSOPHILA
tgaccgcctgcttcaatgcccagccatggaagtcgttctgcgttgagccaccgtgtggccaactcgatcccactgtgaacgaaatgtacgatgtgctggaggacatttacggcaccatgttcgatcagttcaacccggatatcttccacatgggcggcgatgaagtgtcaaccagctgctggaacagcagccagcccatccagcagtggatgaagaaacagggttggggcctggagaccgccgactttatgcgcttgtggggacacttccagacggaggctcttggtcgcgtggacaaggtggccaatggtacgcacacgcccatcattctgtggactagtggactcactgaggagcccttcattgacgagtatctgaacccagagcgttacatcattcagatctggaccactggtgtagatccgaaggtaaagaagattctggagcggggctacaagatcattgtgtccaactacgatgccctgtacttggattgcggcggagctggctgggtgaccgatggaaacaactggtgctccccctacattggctggcagaaggtgtacgacaatagtttgaaatccattgccggcgactacgagcatcatgtattgggcgcggagggagccatttggtcagagcagatcgacgagcacacactggacaaccgcttctggcccagggccagtgccctggccgaacgactttggtcaaatcctgccgaaggttggcgccaggcggagtcacgtctgctgctccaccgccagcgactggtggacaatggtctgggcgcagaggccatgcagccgcagtggtgcctgcaaaacgagcacgagtgtcccattgacgcgtacgatgcacaagtttgaccagctattaaaccatttctcttaacggtcgctatccttgtagatgtagtcggggcagcgggcggcttgggttgatcgtcctgttgcttctcacaacgctctctgcctgaaaataaagtacagctcaaaggtggccttacgcaagtgacttgtcgtttattttgttaaatataaatgagattattggccctgctctgcgcccttttccgattcaaagcggcagaatgtcggaaatagtgagggaaatccgtacagactcgacgattttttcgaatatgaacagtagcagagttggacattttacgcttcaatgtgtggggtgaggatttgcgagtgatggtgtcctcggcctcaagcataaactccttggactcctgattatgtacgtaatgagtctagatactaaaagctgcgttcccttgtgcaataatttgaatggaagctttactcattccactcttcctcgttgcgtccaaacttgtagaccaaactggcgaacaggatgaagacgttttgcatcagcagagccacgccaaaccagccatccttcttttctgaaaaacgataagtgggtgcaattcagctaaggaatccttaaatatctgtttatttctcaccattgttgatgaagtcgtcgatcatcacccagatggcggcaatgatggaggcaaaacccattaggaagcccacaagcagccagatcttcgctatcctggcgccggactccgatgagttctcatcagaaatctgcgcacaaacaaaagaagtgagtcacttgttaagcccaatgataagtgtgtgttacatgttctcccttcactgcgttcaccatgcagaagctgatggtcccgaagatgccgatgaagacgtgtcctgtggtaatctggtgcttgccgtcgatggacatggcatcgattagaacccaccatcctgcgaaaaactaaggagaaaaagttgcactgtcaggcgggcggctctttgtttgcgggtgttagcctaccagaagtccggctattatggaggtgttcctgttcctggacgcatcccccgtgaaatgcaacgcaatattgtccaacacgcccattgtttaggttttaaaacgtaattaaatttattccactcttaaatcttcttgttttgacgcacagggttgtctgtctgcaggtgaatacagggtttcttcactcgctgtagcaaccctgtttcagtatttagtgtgttcacacctgaactgcagcagtaacatatactttttgtgtaacacaaattaactccgttataaaaagaaagttgctgttaattaaatattttgtgcaataatttgtgcaaacatttaaatgtttaactttaaaattactgcttatgcagtttgttgttgttttttagtacgttaaaggcacgacgtctttttcagaaagtccaatacggtcacacacaacttcacgtttaacaaaatttaattgatttccttattatttaacaaccgatcgcagcgacacgagtgggtgcgtgttgtcagttatagtaagagattgcaaaggaatcctaaccagaatgctagtcataaactcatgcagagctgcctccagattggcgctacgcagcctcaatttgcgatcgccgatcgcaacgcgtactttctcgacgggattggccctgaaaacgaaagatgtgtgagtatcttctccaccccacgagcactacaatggtagctccacaccgccagagcagcgtaaacattgaccaatctcgctattgcagtgttaacataaccttcgtgcgtgccaatggggacaagattaagacgtccggaaaagtgggtgactccctgctggacgtggtggtcaacaacaatgtggatctggatggtttcggggcctgtgagggcacgctgacctgctccacctgccacctgatcttcaagaccagcgatttcgagaaactgcccgacaaacccggtgatgaggagctggacatgctggatttggcgtacgaactgacggacacctcgcggctgggctgccagatcaccctgtccaaggatatggagggcctggaggtacatgtgccctccaccatcaatgacgcacgtgccgcgtagatagacaccaccactgttatcaattgttacaaatttgagtgcta

SEQ ID NO: 36950 - DNA, 800 bp, DROSOPHILA
tgcgtcaaaacaagaagatttaagagtggaataaatttaattacgttttaaaacctaaacaatgggcgtgttggacaatattgcgttgcatttcacgggggatgcgtccaggaacaggaacacctccataatagccggacttctgatgtccatcgacggcaagcaccagattaccacaggacacgtcttcatcggcatcttcgggaccatcagcttctgcatggtgaacgcagtgaagggagaacatatttctgatgagaactcatcggagtccggcgccaggatagcgaagatctggctgcttgtgggcttcctaatgggttttgcctccatcattgccgccatctgggtgatgatcgacgacttcatcaacaatgaaaagaaggatggctggtttggcgtggctctgctgatgcaaaacgtcttcatcctgttcgccagtttggtctacaagtttggacgcaacgaggaagagtggaatgagtaaagcttccattcaaattattgcacaagggaacgcagcttttagtatctagactcattacgtacataatcaggagtccaaggagtttatgcttgaggccgaggacaccatcactcgcaaatcctcaccccacacattgaagcgtaaaatgtccaactctgctactgttcatattcgaaaaaatcgtcgagtctgtacggatttccctcactatttccgacattctgccgctttgaatcggaaaagggcgcagagcagggccaataatctcatttatatttaacaaaataaacgacaagtcacttgcgtaaggcca

SEQ ID NO: 36951 - protein, 113 aa, DROSOPHILA
MSIDGKHQITTGHVFIGIFGTISFCMVNAVKGEHISDENSSESGARIAKIWLLVGFLMGFASIIAAIWVMIDDFINNEKKDGWFGVALLMQNVFILFASLVYKFGRNEEEWNE

SEQ ID NO: 36952 - DNA, 6895 bp, DROSOPHILA
ttggcaaaactagccgattttaaatcggtcattcttgttttttaaatatctcagctaaaaagtgtttttctgcgtgtattcatgatctcgaagttgtgctcggcaaataaacaggcacacgcaaagattttcctcggcatcatagttctaataaaagtgtgtagtatacttttgaacacaggtttatgatcattagttagcaaattcaagatgatcgtattttatattcctatttgcctcgcttgtatgacaatgcgaaccatattattctttattctattcattcgttttgccaaacttgttttgtttataccaaaacttccagtcacggccaacacaagggctgttatcaaagccccccacacaaacatttcatcacactgataaagtttgcattagctttgtttgcgtttccttatcagtcgttcccaagctccgataatcagaggtactattagaacgcattaaaacacttgtcgcttaataaaagtaaactttttattatttcgcagctatcaaataaagtaataaataaataatttaatatatacatttgctatattaacttattgtaaacgattttctgcctttccatgtttgccgcttcattacttcgtttgtgtttattttctcgatattattaacttgcatattgtaacattcgaggctaatctgttcgttcagatggcctcaaatcccgcgtaggtataactgaaacttaacaagtctgacaattcaatttcgctttgcctaaaactagggaaacatatgaaggatagagcgtagtggtaaagtaggaaaccatttgaaagtggcggattgtgggatctcaataaataaccaaagaataaatagttatgggatggggggtgcctatggggaatgggtttggaatgagtgtttctgaagtgcacataaaactgatttggttttctgttcacgccgatcggtcgctgttgatggtgatgatggtccggtcctctggcccgatttcagatccttagttcacataggccatgcccgctcccttgcgatcgaagtgacgcacgcggacgaagaggaaggcggcgactagagaggcgacggccaggacgagcagcagcatcaccaatccgcccacaaagctgggcaccgacatgcagatggtctccgcatccgcggacctggccgactggatgaccaccgtctcgttgctggcattgctgttcagcgcaaagttaacgtctccgggcgccaccacctggataattcggctggtgttcacatcggtcatctcctgcgcgttcctcttgtagatcctctgtggcttcaccacaatgtccatggtgtctctgcgccttcgcacgccgcgcagatcgtccagtccctccacggagcgtgggcgtccgcccaaggaaaccaggttgccaccggcactcaggtcatccttgcgcttcaccgtgctgtactgaccgctctgtcctggcagtggtggtggcggcagacccagttcgttgctgccagtgggctgaggctgtggcgactgggagctggcaggtccggaaacggttcccgagtcagcagtgggcactgccgccgatgtctgagcctggggcgagggcaccacatccggttggttctcagagtacgctccagtggcatcggaggcagggtgacgtggatcaggataggctgctggtggcagaactccgggcccgcccagggcgaaatcgttgcgctcatatgcctctgggggaccatactcctcggacagaccgttggctccaatctggggcagaccgtactcgccacccggcaaaccgggaccgcacttgggctcgggacagttgtagcggcacacctggatgacgcactggaagtgcacattcatcgagtcggggaacttgaaggcctggaagtaggcgaagctaaccaccgatgcggagggtccgaagttcttgatcttctggaacttgctcatgatcttgggcctgacaacgcagccattctgatccaccagctggatgggagcccgcttgccgtcgtgggccacacagttgcgcactagcatatcgaatttgttttcatcatccttgatggccagcaccatggtcatcgtctgtccgatcttgacaatgcccgaaacctcggaggcccagggtcccttgcccacctggatttgcatccagcactgcaggttgtcgcccaggaagttagcggtcaccgcatgcagcatgtccacctggaagggcctgaaggtgacggccttctcgtagaaatcgtaccaggtgcagcgcagcttcctggcctgatcccacacctcctgcacatagggatcgtactggatgatgatcgtgttctccacatagctgcccgatggcgtgggcgctccatagccggcggcattgtggttggccgagctggtcatgccgcagctattcaggaagatctcaaaggtggcgctcaggtggccggtgccgggcttcaggtgcacgcagtgtggatcactgtagaatcccttggagaagatcatgccgtagaaaggtcggtcgaactcgatgttcacccgcatgtgggtcttctcgcactgcacctgcaggtgcttgatctgcggactgtcgttggtgctggcgaggggccatgcctcctcggacacatcgttggtggctccggtgctcagtggtccctggggcgcaccgtaaatgggcgccggtggaccgtagccggccctgtgttcgagtggcagggcggcggactcaatgtgcgaggcatcgccatgcaccgacaggtgctgtggatagagaagaaggggaaattcattagaaaagggaaccaatacagttaattttttatttaataagctctcatcaagcgaaatgtactgcaacagtgcagtatgagcaatttgcaatgaagtcatcacagatgaaaatcacttatacgcagtgttgcacatttaagacatgtgccaactcaaaagttttcctcttgcttttcaaaacgatgtcaaaacactccgccccctaaaaacgtttcgattagagcctaggttatggctcagatcacaggattgcggaaagctctcgtttcgggttatcttttccgcgatatataattggatttgggttatgcaatcgcaatctcagcgacagacaccgaaatcactctcgacgacatttggcaagaagcgatgcgaagcgttgaaaattacacgacagctggagtatttcaaaattaaatggttgacagagcggcacgcttaacaaacccaagaaacacaaaactaaaagctccaaatggagtttaacccattgcgtaagacaacggagaaagagccacgcccccacgtttcccccgcagggctttgtcactttctttctgtctttcggtttggccgtgtcttcgcatctggctcataattttatgggcttgtggctgcgcacgggaagcggatgtatctcaaagtccggcggggggcaccacgaaaaccgaaagttaaatccagcacgatgacggtgtggatttttctgtggctgctgttgctgctgttatatttgtttatttattattatatttgtgcttttctactttcggtggctggtgaccacgcgttgagatgtcgtgagatgattttgaaagtgaaatgaccaaaggaaaacgagctggccaacaaaagaagcaacgtacctaatggaaaaatagagagacaaaaacacaacgtctcgactattttcttttttttttttttggacattccacgcacttggcaatggagatatcaatataaacacatcgatcgatcgattcgatcgcctcgatggcattggtaatttttcttctctcttttttccaacgttcaacgctttggagaaagaaaactgacaataaataaataataaagcaatctctgtgaattaatgcgccataaacaagaaagtcaaaactggtacaaatcagagcataactgcaatttcttcgccgcctcagcacccagacacgcagttggttagttggatgcctggatgcttggacgacactcgcttggccatccaactggccaacagtttctttggccagcttgcgtttgagttttccttgacgtgattgcagcgtctaaaatgcgctgattgtgtgagtgtgtttctgttttccatcggccaccagtgattgatgcgctttaaatagcccactgaaggctgccactttttcgagggggaagaggcgagtttgtcttggccttgcttatcaatcgaaagcgtgcggcagcgcgccaaagaaatccgccaaatttatggctcatctcatattgattgacagtccatcgcggtgatgcatatgagaggtatttaaatttaatacctctctttagctatgtaagaaatcatgttactgtcatattcatgtatttaactaactgctcgttactttaatgttttctatatccacgagatacattggacatctgtaagattgaaactcacttctacgaaaatgttcactcaaccactgtaaaataaagtctaatagtaatatatgtacttcctcgcttctattcggagtaatctctttacttttctctctctctctcaactaattttccaactctaattgcaatgattagcaaagtgccgtttagttgctacattgtccgccattcctcaccagccaactagccaactctctcgattcgatattgatattgatctgccagcaatccgctatatgcatagtcttctgacttcccaacttccaacttccaacttaagatcgcagccagctcaatccgtcagtgatttgcattcgaattggtattgatcgaacggtagtctatctttgagtcgaaagtgaagagatccgctacaggttgggtctgcatacgaaatgagctgctccaaagtgggccacaccgcagagatcttctaactgtacgacgcctgctggatgaaaaccagcgcttcatgcccagcactttcatgtggaactacatcatctataaggtatgcccaccacccaccgccggccaactcacctgtgtgttgagtaccaggcacaggactatggccattaggctgctgcgtcgcgtcaggtgtcccattttgatctggttgtgtgtgtgtgtgtgtgtgtggtggttggcttgaaattgaaattccaaattgacgccctggaaaccaaaaatgtggatttttggatttcgctactcggcctcgctctgcggctttcttcttcgctgctgctggtgtgctgctgtttgatttttggtgtggcgtctgcaagaaagaaagaaaggggaacaagggtaaacaatgcgaccgatttgcatacgaatatttttcgaggccagtagttgtaaaggcgctgttatttggcacattctgtaaggccgttagaaaacactgttatcgaaccacgcagcttatctcacttatgcataatgctcaagcaaaatcacaacgttttggtcaaacatattcatatagctaaacataaacatatacgcatacgactttatggtcgtcattaagcggccaaattaatagccacaattgcccgtttgctggcttatggtgtcagttgatacgagtacacgcgctgtgaaagaaaactgcatttgatgttaagcaaatgaaaactcgcgcgcaccaaacaggaaccactttctattttcactataacagtactccgctagcatttggcttcttccaatccgaatgcgactacgacatacgaatccatacgaatccgagtacaaatccgagtccaaaacgccaacgcagcgtctggttttccacacggtggctgcactttacgaccatccattaatttcgactgtttttccttacgtttaacagtcgcactctagcattactcggccatcggcttaacagtggcccaaaagcgtcttggcctggctaacagagctcagtgtttgtagtttttggactccaacgattccgaatccgatgccgacgatgcgcctgcgttcgagtgccgataaagactgaagactggaagactgaagaccggagagactggaagaccgaagactgacagctttcacacagccgccggagcgatggaaaagtaagcggctgctctgcctcgaacgcatttcacttgctctcccgcttctttaccctaactgtctctctgtttttatcatttcatagttttgtttttgacttcaacttgcagtcttaggttttacttttacacacaacggctaaagacgggccacagtgctgggtgcccaggtcttattccgaaaaataacacatgtaaatgggtttttaacaagccgcggccataaagtccgtcgagatgccgctgaaaaccggcttgctggcgttgagcaagtgtaccattaacccactgaaacagtaacggatgccactaaactggctgacaattgtttttggcaacaggaggggaccatgtcggtggttggggcaggtacttcaaactaattgccctaatggcccttcagctgatcggattatgcaatcatggttttctaattttcagtagctcaacggtaaaatataccgattaggtagtttcctgcaaaactaaccctacaattattttataatattggtattgttttaagcccattgagaatgtgatagttcataaaaagtctatacaaatattgtgactttcacgagtttcaagaagattgaaatatttaaatgatagatgcctcccagtgtgcccataaaaacaaagtctataagctgtactcaagaaatgggttaggtcagtgctgatcacaattagcgatatttttactggcagaagacatcgtaaaattagcaaagaactcgcaaatgtcttgttcgtttaagtgcgctggccatttaacggcgctttacccatttatttgactaggtattttcaatttgattttctcggc

SEQ ID NO: 36953 - DNA, 2084 bp, DROSOPHILA
ttagccaggccaagacgcttttgggccactgttaagccgatggccgagtaatgctagagtgcgactgttaaacacgccacaccaaaaatcaaacagcagcacaccagcagcagcgaagaagaaagccgcagagcgaggccgagtagcgaaatccaaaaatccacatttttggtttccagggcgtcaatttggaatttcaatttcaagccaaccaccacacacacacacacacacacaaccagatcaaaatgggacacctgacgcgacgcagcagcctaatggccatagtcctgtgcctggtactcaacacacagcacctgtcggtgcatggcgatgcctcgcacattgagtccgccgccctgccactcgaacacagggccggctacggtccaccggcgcccatttacggtgcgccccagggaccactgagcaccggagccaccaacgatgtgtccgaggaggcatggcccctcgccagcaccaacgacagtccgcagatcaagcacctgcaggtgcagtgcgagaagacccacatgcgggtgaacatcgagttcgaccgacctttctacggcatgatcttctccaagggattctacagtgatccacactgcgtgcacctgaagcccggcaccggccacctgagcgccacctttgagatcttcctgaatagctgcggcatgaccagctcggccaaccacaatgccgccggctatggagcgcccacgccatcgggcagctatgtggagaacacgatcatcatccagtacgatccctatgtgcaggaggtgtgggatcaggccaggaagctgcgctgcacctggtacgatttctacgagaaggccgtcaccttcaggcccttccaggtggacatgctgcatgcggtgaccgctaacttcctgggcgacaacctgcagtgctggatgcaaatccaggtgggcaagggaccctgggcctccgaggtttcgggcattgtcaagatcggacagacgatgaccatggtgctggccatcaaggatgatgaaaacaaattcgatatgctagtgcgcaactgtgtggcccacgacggcaagcgggctcccatccagctggtggatcagaatggctgcgttgtcaggcccaagatcatgagcaagttccagaagatcaagaacttcggaccctccgcatcggtggttagcttcgcctacttccaggccttcaagttccccgactcgatgaatgtgcacttccagtgcgtcatccaggtgtgccgctacaactgtcccgagcccaagtgcggtcccggtttgccgggtggcgagtacggtctgccccagattggagccaacggtctgtccgaggagtatggtcccccagaggcatatgagcgcaacgatttcgccctgggcgggcccggagttctgccaccagcagcctatcctgatccacgtcaccctgcctccgatgccactggagcgtactctgagaaccaaccggatgtggtgccctcgccccaggctcagacatcggcggcagtgcccactgctgactcgggaaccgtttccggacctgccagctcccagtcgccacagcctcagcccactggcagcaacgaactgggtctgccgccaccaccactgccaggacagagcggtcagtacagcacggtgaagcgcaaggatgacctgagtgccggtggcaacctggtttccttgggcggacgcccacgctccgtggagggactggacgatctgcgcggcgtgcgaaggcgcagagacaccatggacattgtggtgaagccacagaggatctacaagaggaacgcgcaggagatgaccgatgtgaacaccagccgaattatccaggtggtggcgcccggagacgttaactttgcgctgaacagcaatgccagcaacgagacggtggtcatccagtcggccaggtccgcggatgcggagaccatctgcatgtcggtgcccagctttgtgggcggattggtgatgctgctgctcgtcctggccgtcgcctctctagtcgccgccttcctcttcgtccgcgtgcgtcacttcgatcgcaagggagcgggcatggcctatgtgaactaa

SEQ ID NO: 36954 - protein, 611 aa, DROSOPHILA; identical to SEQ ID NO: 28509

SEQ ID NO: 36955 - DNA, 3008 bp, DROSOPHILA
tcttggtcctgtactgcagagcctttgcatttcgaactttgtctacttctacacattccatgccctcaaggcggtggcatcgggaggctcgccatcccagcacagcgctctcaaggatctgctcctgggcagcattgccggcatcatcaatgtgctcaccaccacacccttttgggtggtcaacacgcgactgcgcatgcgcaacgtggccggaacctcggacgaggtgaacaagcactacaagaacctgctggagggtctcaagtacgtggccgaaaaggagggcatcgccggtctgtggtctggcaccataccctccctgatgctggtctctaatcccgcgctgcagttcatgatgtatgagatgcttaagcgcaacattatgcgcttcaccggcggtgaaatgggcagtctgagtttcttctttattggtgccattgccaaggccttcgccacggtgctgacctatccgctgcagttggtccaaaccaagcagcgtcatcgcagcaaggagtcggactcgaagccgtccacatcggcgggttctacgccccgcaccgagagcacactggagctgatgatcagcatactgcagcaccagggcattcgtggactgttccgcggtctggaggccaagatcctgcaaaccgtgctcacggcggccctgatgttcatggcctacgaaaagatagccggcaccgttggcatgctgcttaagcgcaactgaaaagaggctctagtcaacaagtagttttactcaattaatcctaacgtaagctataacacaaacatacacattctgacataggatatggccagcacacagactctccaaagtttagtcgctaagcgtcaatggataaatgaaaagaataaatagttaacagaagtaaataataactggatgctttatttatattcgtctgcacagcagatggtccatctatacctaggtgtggtcattgctatatatctttaattgggcggttttgattttcatttatttgtcattctcagtagagtccttattctcatcgtcattagacttggactcttctgaagattcagcttgctccttatcgttgccattggcgacctctgaagtctccgacttggaatctccttcgccggaagattttttatcgctaggattggccagctcggccaggttgaactttttgcactccagatagttgtcgatcacgctaagcagacaccagcccctcaagacctccacgatgatggatttcttggcctcctttaggtccaccttgttacccacgttcttggagttgaccagctcggccagttgggttatgatttggtcgcgcttgatctgctgattatagcgatgattgaagatgatgccatagctggtgggctccttgaggaagtgcttgtcgaagagctcgccggcggcagtgatgatgtccggcatgttggcgcggcagacgacttcgatgggcaccaggcgcaggacaaatcgggacatggacttgccggtggtcgctatgtcgttgatgatgtgtttacccagggcgaccggatcctccagttgggtgcggatgaacacgcagttggtggtgttggtgtctacattctggaatcgcatcttgcgctgcgaaagcatctcgcggcatttggcggcagctgcttccaagtcgtcatcgtcatcactggtgcctcccgccgctggcttcggatcatcctctcccgcatcaccacccgctccttcctctggctgcttcttttccggttcattctctggcttttccgaaccgtaaagtatgtcagcatagtggttcaacaaattgtagcattcgcgaacacatgccttctcgttgatgttgcacgtggcgaagaatccacgttgcccaggttggagcgtctgcctcttggcgtggaaatacttcttcttgttgttgttaaacttcacgtttttacccattttcgatttttttgaggcgggctccatgaaataaaacttattttgcttcgccggctgtttaaattagtgataccgtaaatacgccagtaatgccgtgctttgaagctactaaaatccgtagagcagaattaagaagatatggtcactttaaaactaaaagtattgaaagaaaattcatcttcaaaaattttaattttgaaattgcttaatcggtattaaaatacaatttcatatttccatttatcaatgcccttttaaattaaaaaaatttctataattattcccaaccagtttaataaaacatccatttgcaaaaggatcaaatgctgatcagctttatgttttaattgtagttacttttattaagccgacgattctcacatacttttgccgtagtctgtcacttaaattcaattactctcattccatttgatgtcgtaaacattatagcgtaatacgtatgtgcctgttttcggttcgaatttaaaattagataaatttaagaattttggaattatttattttctgcgttcgcactaagattagttcatcgtcattcgtttacatcgtgtaattaaacgtaagaaaaacagaattcatcagtttcagttgtttgcacacttaaatgctaaagcatggtagcatatctatgcgaaatgaaagtacaaaatgcagatactgaaggctgctgaatatctaactaaagacctatctcgctccgcctggactttatccgcagacttccgtttcatgtttttgattgtggtttaccaatatacagcggtatatcatattaaagtataaataaatgtattgcaaagtggcgtcattgccgcccggctttgcattgacttaagccttaatgttgtgaacttaatggtatagggattcctaaaacataactaatcgatgcactatctcggcatgaatgcgcttctcgcgtcccattaaacatagtgtgtgaaaatgtacaaggccaagagcaatacaaaattatcatcaaattaagattacgaattatgcatagagtggtttaaagtaaaatgtacaattgttgcta

SEQ ID NO: 36956 - DNA, 1008 bp, DROSOPHILA
aaacagccggcgaagcaaaataagttttatttcatggagcccgcctcaaaaaaatcgaaaatgggtaaaaacgtgaagtttaacaacaacaagaagaagtatttccacgccaagaggcagacgctccaacctgggcaacgtggattcttcgccacgtgcaacatcaacgagaaggcatgtgttcgcgaatgctacaatttgttgaaccactatgctgacatactttacggttcggaaaagccagagaatgaaccggaaaagaagcagccagaggaaggagcgggtggtgatgcgggagaggatgatccgaagccagcggcgggaggcaccagtgatgacgatgacgacttggaagcagctgccgccaaatgccgcgagatgctttcgcagcgcaagatgcgattccagaatgtagacaccaacaccaccaactgcgtgttcatccgcacccaactggaggatccggtcgccctgggtaaacacatcatcaacgacatagcgaccaccggcaagtccatgtcccgatttgtcctgcgcctggtgcccatcgaagtcgtctgccgcgccaacatgccggacatcatcactgccgccggcgagctcttcgacaagcacttcctcaaggagcccaccagctatggcatcatcttcaatcatcgctataatcagcagatcaagcgcgaccaaatcataacccaactggccgagctggtcaactccaagaacgtgggtaacaaggtggacctaaaggaggccaagaaatccatcatcgtggaggtcttgaggggctggtgtctgcttagcgtgatcgacaactatctggagtgcaaaaagttcaacctggccgagctggccaatcctagcgataaaaaatcttccggcgaaggagattccaagtcggagacttcagaggtcgccaatggcaacgataaggagcaagctgaatcttcagaagagtccaagtctaatgacgatgagaataaggactctactgagaatgacaaataa

SEQ ID NO: 36957 - protein, 324 aa, DROSOPHILA
MEPASKKSKMGKNVKFNNNKKKYFHAKRQTLQPGQRGFFATCNINEKACVRECYNLLNHYADILYGSEKPENEPEKKQPEEGAGGDAGEDDPKPAAGGTSDDDDDLEAAAAKCREMLSQRKMRFQNVDTNTTNCVFIRTQLEDPVALGKHIINDIATTGKSMSRFVLRLVPIEVVCRANMPDIITAAGELFDKHFLKEPTSYGIIFNHRYNQQIKRDQIITQLAELVNSKNVGNKVDLKEAKKSIIVEVLRGWCLLSVIDNYLECKKFNLAELANPSDKKSSGEGDSKSETSEVANGNDKEQAESSEESKSNDDENKDSTENDK

SEQ ID NO: 36958 - DNA, 16736 bp, DROSOPHILA
ttattaagccgacgattctcacatacttttgccgtagtctgtcacttaaattcaattactctcattccatttgatgtcgtaaacattatagcgtaatacgtatgtgcctgttttcggttcgaatttaaaattagataaatttaagaattttggaattatttattttctgcgttcgcactaagattagttcatcgtcattcgtttacatcgtgtaattaaacgtaagaaaaacagaattcatcagtttcagttgtttgcacacttaaatgctaaagcatggtagcatatctatgcgaaatgaaagtacaaaatgcagatactgaaggctgctgaatatctaactaaagacctatctcgctccgcctggactttatccgcagacttccgtttcatgtttttgattgtggtttaccaatatacagcggtatatcatattaaagtataaataaatgtattgcaaagtggcgtcattgccgcccggctttgcattgacttaagccttaatgttgtgaacttaatggtatagggattcctaaaacataactaatcgatgcactatctcggcatgaatgcgcttctcgcgtcccattaaacatagtgtgtgaaaatgtacaaggccaagagcaatacaaaattatcatcaaattaagattacgaattatgcatagagtggtttaaagtaaaatgtacaattgttgctatttatataaaacaagctagcgcgttcttctgcttccgcaattgcatatgccgcatgtcatgcaggattgccataacttttgcccacatttcctggagtctcgggtgtgtgtgtatatatgggatgggatcgatgtccgctcgcttgatctttgcatatttaccaaagttttagtgcttaaatttgaggaaatcgcactctgccgcctttccaaattggtctgagggaaaggtgacgggtgctcctaaggccaaagccgagaaccgtgcaaaagtaagtattatcaacacattgccaaatggattgcacgtgagaacgtgttcacaagattacttttaatgtccaacggctgtagtttaagtttcagtttaagttttccttttcatgctctcacgtattcaagtgtcatataaatctttttccatatatgtatataaataggtgttatcatgattgttgtggtgaagagggaaacgttgcggtgcttacaattaggtgaggtctgctcgtaggtgcatatgactatagtatttatagtatgatatagcttgcactaccataagatcaatgacgtttaaaatcaaagtaaatatacaaagcatacgaagggtaaatgaatcgaacttagcttaagtcaaatgtacagtgttgtgtgaaagttaggcgtgttgtgtctgttatgttatgttttgtgtgttatggctgtccgacagaacgcaaagttatgacaaaagtacacaaatcaatcgatcatacgcaagagtttgctgagtaggtaacatttaaaaccgcccggctgattgcccgccccgaaaatgaacttaatcctaagcatagagcgtgatctcgatgtaactcgtgggcacgaagccctcgtcccagccattggagttgttctcccgccgcacccgcgtccatccgtctccttggtcgatctcgatcacttgcagctcctcgccctcactcatgggtatgctaccctcgctggaggctataaagtattagagccagcatgtaattagatgttacattcgttatatttcctactactcaccttcaaatggatacagggcacgacattttcccactggattaagggtctccacttccgtttcatagtaggtatcctcgccaatcgcgttttcgttggcgctgccctgtcctgatcctggcagggatgtgtgcgaagtgccaaggccactctcgggacttgccgaactgctggatttcaccatggaaaaggcaaaatgaaacgaaatatttgaagaagttgcaattttcacattattaagtgtcatcatgtttggtgtagagcgataaagaattaagttgtactacaaattagaagtatgctaaaatagttattaaaatttttgtttaatctttggcttattgtggactttctgggctgtgttactatactttatatgctttcaaagtgagtgagaaaccaacaccgaagaaaatgccacacaccgtgaatagtgcagtgatattacgatcgaattaaataatacagattatatatgcgatgccaaatcataatgctacgataatgtatgtacgagtataatgtatgtgggtgaaagatatatatatatataaacattgaacgtagacttatgagtgtacccgttattgttattattatgcccattttgtatttgcgccacattatcctcagaatctgacctgcttaagctgccagcatcatcgggctggtcgtcgccatcatcatgatggtcatcggcactgccattggaatgtctaaagtgggggtattcagttattagattgtatattatatgggtcgcaacttatattaactcacctagaggttcggtgaccgttttgcaattgatttcgactcgcctgcggactactggtggccgtcggcacttggcttgccttctccaagaagccctggtacttctttagatccactttcagcttctccaacttgtgttccgactcgttcagttgtccctcgacggtcatgggattgcccagcgatgagttcgcctcatagacgatcttcatcttcatcaggccatcccgtgcttttgtttcctgggcgatattctgtgtcagttcggcgatcttcgcctgcagtttctttcttcgttgattcggtggcagatcgctgaagtcctccttttgtccatccgcagtcagggaattctgtgccaattacagcttggttagttgaatgcattacaagtatattgaatgatatctttataggccaatgcaatgaataataagatacaaatcaggactaaaaagacacaagacattcacaagacacaacaagagctgcacgcagtgattagaatcagtacaaacaacagaggaaaccgaaaaatcagataataatatcaacacagcaaaataataaatgcagattttttgataatccaatgacccgctttcgacataaatcaaaccagtttcgaaatcaacaggctattaaatggcaccataaagaaaaattatggaaatggaacgaaagggaaaacaaggcgataaaggcattcaatcatgcggtgggattcgagagctaatggcacataaagaacagaaattaaacaataataaagttaaaacataaatggaataatgtgtaagtgtgctgctgtgactttcagctagttggccaacaatttactggttaatttaaaggcttaactatttgagaataattggtggtgttcatttttagaacttgactatgtttaatcaagccaagaatatgccgatcatttgcgttcaggcgtttaaagtgaaagttgctcagactattaattattgttaatggaaacgatattgctagtgatgattagattcttatttagctgattgtgattagtaaatagcgagatagtggtgttattaagattaatcgtaaggggctagtttaggctagacttagttaaagttagttatttagttgggagaaagctgaaagattcatcataccttcatggtgatacaggcttcaattatctgccgttgctattggcagcgaattgatttaatatttattttgtaggtttttaatttttgcaattgtatcacatgtgtggtgttgttgtgttcgtgtgattttaagcatttaatcattttaaaatcgaatggcagcaacaaatatgtgtacaaaagtagaaatcaagagttaatcaattaatattcgtgagttatagaagaagctttggatttggaataatgttgcagtcggtgaggagcgaacttaaagcacaaagtattagtaatagcgaaagacacaaaacatggcaattcaaaagcaatccgaggaatgaggcgatgtatgtatatatggaaatgccgatctggttgtggactatgattggataggacacgaatcgaattctttggacacttggtacttacggcaagagacagaaccatgtccaagtgaaataaagatatggtaatcgagattcgatcaaattaatatagaaatagaacggaaaagagagaagactggatgagtaaaccataaagagacacaaaccataaccaagacctacaccttatcaatagaacatcgaacttaagaactaatcaagaagcgtctcaactcaagaggctagtgcacagaatggaacggacaagtgcggcgaactgaaaactctggacaatagagatagtcaggcagtggtagtcgagtctaaaacccactgaggaggtatcccaaagttaggcccctcgaattggccacggactgcctcaccttattgctgccgaatatgttaaaaatgcccacgcgtttcttcagcttgttggcactcatcgtgcctctaatggtcaggtggttcgatgtcgagttgctgtagtgtgagtcctgcacggaatccggatcgcacttggacagatcctcgaagggtatgtcccttggtggcgtgaaaccagattgatatctgcaaggcggacatagagagttagtttgaggtttatgtattattcggaaaacgtttcccacctttctatgactttgaaggtatcctccttttcgttgatggactcgccggccttcacgataccctccatgcagcgggctatgattggcgccaccgatgactccacatccgccgctcccacaatgaactccctgaagccacgggtgcgtttctcgtccagctcctgcagccgattgaggaccgagggcagcagcatgctgtagtgttgctgctgcagattgttcgtcttctgtagctggttagcgtactcgttcttcgcatcgtccgactgctggatcttggacgtcatcacgttcttgtagcgctccacctcggcccggctgagattgaggtccatgtctgcccgcttatagctgtccaccgccttctccgagtcacggtaggccttctcgtagttccgcttggcccggtccagcgaggagagctgtgtggtgaggttctgctgcagggtggcaccatcgctaaggcatttctacaagcacacatatggatatagatgggttgtaagtttaatttatttttcggcaatcccacgcactcaccttgcgttcctcgcgcaatgtcttggacagaagcgtcactcccgcaatgatctgcagctgcagggactcggacaccacctcgcgctgtcccgccagatcgcccacctccttgagcagattgcggaacgcttgcaccgatgtgaatctgtaatggaatggtagcatgtgaatcagttcgacctacgccaatttgcgcctgaggagtactatgagtttatgtgcacagagaaaaacagcgtttataatgtgagcaataaatttaaaactaaacgaaaactgatgttttcacatgtctttgcaagcacagcatatttttctctctgcagacctttagtggactgttttatgaactcaagacagtccatagccgagggcccgatttatggagctctcggattgacagcgttggacacgcgctgtggaacacccacgcgactccggatttctgctgtccctccgtccgtggtccgttcgtctatcatcgccgtctgtcagaatggccactctatatggccagaggaatggggcataaatttatggattttacaactgaatatggtaaagcgctcggcatttcattaccaagagagttccacttggctatcgccatggctatagcttcattgtcatgttacacacatgccacattcagagatctatttgcgggtcatgatgtcagtttgccagactgccagttgggccagatttgcatggcgtgtaattaaaaaccgcgattcccagaccacacagaatggaactacttgagtcttagacgagattcaagtggctttttccgcgcaaattgaatgccgcacacagcacgcacaattagagcataagtcatatgagattatccccaacccaatccacttagcacttttttttttttttttgccgacaaatatggcaaacaaagtgcaacaaattacggataattttccaaaacatttaacgaatgaatagggtaaagtaaagaagaaagaaaaaaactcaattatactatatggtacattgtgtagtatgtgcctatgcaatattaagaacaattaaataaaatagcatattaacttatggcagcactttgttgctatgtttatgtttatgtttatgcacgcagttaggccagggcagatgtaacatgatcacccactcgaaggcaaaaagtataagtgcatggtcagcattcacacgccgaccaaatacatattacatacgtacatacatatctcgctctcccgataagcctagatatataagatatacataagaacaccgctccgctgctggcgtacccggcagcgcagctacgcggattagcctaagtccaaatatataaaaaactgtaaaatcggagagactctgtagacgttgagctgacagaaccatttctgcctactctaaaatcaaaagaagaaattgaataaatatatgtcagcccgacggctgccttcaacttaaaaacggacttgtgttcttaattgaagttcatcattacatggcgaccgtgacagtcgtccaacgctggacgaattgaccaaagctggtgaaaacaaaggaacaaaggaacactggactggaagaagactggactaattaaatggaactgcaaaaaccaaggaaaaatctgagtgagtagagttctattgagtatgggcaaacaccgtggcggtttgaaaactaagctgaataaacgtatagcccacgtaaggtggctaatatacggtcagcaaactgccaccggtttggtcgaaagctctaaagctacatgcagagctagaccacttgttgcaatatcagcaagaattaaagacccataagctcgagaaaactcactcagataatattaaaaatatacccacaattaatgaagttccaaaataccaggcatgtccagcaccagcaccagcattaacaaaaccaaagaagtcctgcccccctggctgcgaaggaatctggagtccccactgcctggggacttgtgagcgaccatcgacgcccagctgacacccaacaaatagacagcagcgagggagtgtcagcgtgccacccccggcgacgcccagctgacacctgatgagcatcatcaacagcagaatataataataaatatatataaatataaagtaaatataaaatatatatagataagaaaaattgtaagaaatattgtaaaacggagcatatactattatgccctgttaacccaatatggcccgtgaagccatagctagaatcaggcaggcaacaatgtaaaatacaattttttttttactcttgcgaacattgaaagattttataaatagataattccaaacataaatgtctatagagacaaatgaaataagtaaaactgaaaataaaagtatatacaaaggaaattttctattctattctccaaaatataaaattagtatacccaaaatgggtctaatagacactaaaactgtggactctacagccaatgtaataaataaagtagaagtccaaaatgcagacttgttctggataaccataatactaattgtaattgcattaattatggtatccaatgcattaataaaaatatacaaacctgcataacaaggggtcttaagaaaccgataccgtagcactgctaacggtatagataatatttaagggaagatctttaataaagtcaattatgaatgaaaatatgagaaaaattatatgaaaaaaaaacaataataaataaaaaaaaatataaaacggtaatattgaatttatctacattaaaaaaaaaaatatatacaaatgaataaatttgaagttattgagtataccacagcatggactgggaaaagcttgttgatcagataaaagatcaaaatgaaaatttcagaaaatcctataagtgcttaacgcaaaacagatcaacacaagctgtaacaatcaataggaatgcccaagtcttggtaaatagttataatgaaatcagagagttgatccaacaaaatagaaagaatttggaacgcaaacagtgtgctaaggctttgaacctactggtgacattaagagaaaaattaatatttataaaaaataaattcagtctccagatagaaattccaaccatagtaaacaccccactaagaataaatttgaatgaagacagcactaactctgacgaggaagataggactatagtcaaggaagacattaaagaggaagatcttcacgatctaactataccagcaaaattaatgctgaagaacgacgataaaacaaataacgcagccgactccgaaaataacttaaccatggcagaagaagcagctgccattaggtcttacattagggaagtcgcctgcacagtgccagaatttgatgggcaaaagatccatttacaaagattcattaaggcaatcaaattggtagacctagctaagggaccatttgaagacattgcagttgaggtcattaagtcaaaaatagttggcacaattttgaactcagttgacaatgaaacgacaattccagcaattataaacaaattgcagaaagtagttgtcggtgagacatccagtaatgtcaaagcaaagctagcaacagttcagcagagaggtaaaactgcaacgcaatttaccgctgaagttgatagcctgagaaaacttttagaagcttccctatatcgatgagggtatacctctagaacatgccactggtctaagcaccaaagaggcaattgaaaccatgatacatcgtgctgagcacgaaagtatcaaaacagtactggaagcagggacttgcaccactatggatgcagcgataagcgcatacataagaacgagtacaagagttaccggtgacatcaataaagtgatgtactttagaggtaacagacccaatagaggatacggaaatgccaatagaggtagtaaccgcggtagaggctttaataacaatagtattagaggcaactaccataacggttaccaaaataacggttaccaaaataacggttaccaaaataacggttaccagaataacggttatcaaaaccgctataatggaaataataaccgttataatggctataacagaggccgttataatggaaacagaggccgtaacaacagtcagaacaactacaacagaaacaatgccaatgtacgagtaatccaagaacagggaaactcgcaacagcctttaggtactcagtagaagaagatcgtagagtatacaccatcaattataatctcaacatattttctacattcattcatgccaaaacaggcgtaaaactagtttttctacttgatacaggtgcagatatctctattctcaaagagaactctgacaaattttctaatattcaaataaccaataaaataaacattcaaggcataggccaacagaaaattcagtctcgaggacagacttttattgagatacagacaggtaaatacgttatcccacacgattttcatttagtagataaaaactttcccaataccgtgtgatggaataatcggaatagatttcataaaaaaatataattgccaaatcgatttaaaccaagaagaagattggtttataattagaccaaacaatttgaaatttccaatatatattcccatagcatacagctctggtattaacacaacgttattaccagcaagatcccaagttgtcccgaagattaatagtatcatcaaaagatgataacattttaattccaaaccaggaaattcaaactggtatttatgttgcaaatacaatcgcaacatcaagtaatacatttgtccgaattttaaatacaaccgattccgaccaattagtcaatatggacactctaaaatatgagccacgtttcgaactacaatgtagttcaggcaaatagtgaacacagaaataaaactgtcttatctcaattaaagaaaaatttccccgaattgtttaaatcacaattagaaaatatatgcagcgaatatatagatatatttgcattagaatcagaacctataacagttaataatttttataaacaacagttgagattaaaagatgatgagccagtatacaccgaaaaattatagaagtcctcatagtcaagtggaagaaatacaagcccaagttcagaaattaataaaagataaaatagttgaaccatcagtttcacagtacaatagccctttgctattagtacccaaaaagtcaagcccgaattctgataaaaagaaatggagattagtaatagactatcgccaaattaataagaaacttttagctgacaaatttccactaccgagaatagatgatattttggaccaacttggtcgagcaaaatatttctcctgccttgatttaatgtcaggttttcatcaaatcagaactggatgaaggctcgagagatataacatctttctcaaccaacaatggctcatatcggtttcacgcgattgccatttggcttaaaaatagcgcctaattcattccaaagaaatgatgactatagcattctccggaatagaaccgtctcaagcattcctttatatggatgacttaatagtcataggttgttccgaaaaacatatgcttaaaaacctcactgaagtttttggtaaatgcagggaatacaacctaaagttacatcctgaaaaatgttcatttttcatgcatgaagtcacatttttgggacacaaatgcacagacaaaggaattttgccggatgacaaaaaatatgatgtcattcagaactacccagttccacatgatgcggacagcgctagaccgttttgtagcattttgcaattactacagacgttttatcaaaaatttcgcccgactattcgcggcacataacaagattatgtaaaaagaatgttccatttcgagtggacagatgaatgtcaaaaagcattcatacatttaaaatctcagctaattaacccaacactcttgcagtacccagacttcagcaaagaattttgcataacaacagatgcaagcaagcaagcgtgtgggcgcagttttaactcaaaaccataatggccaccaactcccagttgcttatgcatccagagcttttacgaaaggtgaaagcaataagagtacaacagaacaagagttagcagcaattcattgggcaataatacatttcagaccatacatttacggaaaacatttcactgtgaaaacagaccatagaccattgacatatttattctcgatggtgaaccccagctctaaattaactagaataaggcttgaactagaggaatataattttacagtagagtatctaaagggcaaggacaatcatgtagcagatgcgttatcaagaataaccatcaaagagctaaaagatataactggaaatatatttaaaagtcactacaagatttcaaagtagacaaaaatcctgcgcaggaaaagaacaattggatttgcaaaagcaaaccaaagaaatagcttcagagccccacggtataccgaagtcataacaaatgacgaggtaccgaaaagtagtgacattgcaattgaatgactcgatatgtttatttaaacatggaaagaaaattattgcaagatatgatgttggtgatctttatactaatggaattcttgatttagatcaatttctccaaaggcttgaattgcaggccggtatatatgatatcagccaaatcaaaatggcaccgtggaaaaaaatctttgaacacgtttcaatagataaatttaaaaatatgggcaataaaatattaaagaatttaaaagtagcgctacttaacccggtgacccaaataaataatgaaaaagaaaaagaagctatattgtctacattacatggatgatccaatacaaggagggcatacaggcattacaaaaaccttggccaaggtcaaaagacattattactggaaaaatatgagtaaatacataaaagagtacgtaagaaaatgtcaaaaatgccaaaaagcaaaaacaacaaagcacacaaagactccaatgacgataactgaaacaccagaacatgctttcgatagagttgttgtggacacaattggtccactacccaagtcagaaaatggtaacgagtacgcagtcactctcatatgtgatttaaccaagtacttagttgccataccaatagcaaataaaagcgcaaaaacagtcgcaaaagctatatttgaatcttttattctaaagtacggtccaatgaagacgttcataccggacatgggaacagagtataagaattcaataattactgacctgtgtaaatatttgaaaataaaaaatataacatcaacagctcatcaccaccagacagttggagtagtagaaagaagtcatagaactttaaacgagtatatacgatcctacatatcgacggacaaaaccgattgggacgtatggcttcaatatttcgtatactgcttcaacacgacccaatctatggtacataattattgtccatatgaattagttttcggtagaacaagtaatttaccaaaacattttaataaactacatagcatagaacccaatatataacatagatgattacgctaaggagagtaaatataggttagaggtagcatatgctcgagcaagaaaacttcttgaagcacacaaagaaaaaaataaagaaaattatgaccttaaaagtaaaagacatagaattagaagtaggagataaagttttactaagaaatgaggtaggtcataaattagactttaaatatacggggccctataagatagaaagcataggagataataacaatattacggctacttactaataaaaacaaaaaacaaatagttcataaagatagattaaagaaatttcattcatgattgaatttaaacttatattttccttaatcatttatacaaattttccatacactacggtatatttttatctttgcattataaaatcaactattgttgttcaaacaaaaacacaaacaaaataaaaataaaaataaaataatttgcatttaataatcaaaataacttcactagggttaccgttatttttcaaaaaggagggagatgtagtatgtgcctatgcaatattaagaacaattaaataaaatagcatattaacttatggcagcactttgttgctatgtttatgtttatgtttatgcacgcagttaggccagggcggatgtaacatgatcacccactcgaaggccacaaagtataagtgcattgcccactcgaaggcaaaaagtataagtgcatggtcagcattcacacgccgaccaaatacatattacatacgtacatacatatctcgctctcccgataagcctagatatataagatatacataagaacaccgctccgctgctggcgtacccggcagcgcagctacgcggattagcctaagtccaaatatataaaaaactgtaaaatcggagagactctgtagacgttgagctgacagaaccatttctgcctactctaaaatcaaaagaagaaattgaataaatatatgtcagcccgacggctgccttcaacttaaaacggacttgtgttcttaattggagttcatcattacaattgtaacgtttttgatcgcgtttttggctataatgcttactcattgtcttcctcctccttctttttgggctggtagtttttcactaggcgcctgcaagagaaaaaaagaggcaaaaacgaaaggtataatcaaaatcatggcattagtgaaactttgtttatgcaaagaaagatatagtaataagagtaatagtaatattaatagtagcagcagcgcatttgcattaacacgagacttttcatttgccgattgccaaggcggctcacgcaaaagatttcactgcgccgcgcattttaatacagtttttttttagtttttcagtttttcctcacagtttcatgcggcgactttgtggtctagttgctactgctacgggtatactatgcactcgcttcaagactctgaagcaaagaacaaatacacacggagaattagctagattttgagtaaaatgtgtaggttgtagtataccttcttgatttgagctgctatacaacatatacataatttatattcaatttaaccattttatgcaaatccaccagcaattactttgctgtacttaatagtcccctatgtctttaacacactttccaagacattttgtgactccacgccttctttctcagtgtacaactgcacctctagccgcaagcaatgttagacgcgtaatgataaagtcattaaaacgagtcaagacgggtagctcccagccatatcaggggccatagttcagtcccaccatccgggggagaggaggaactgaaactaaaactgaatcttaaactgaagctgagatggaagctgaagcggagtcatcaagcaaagctgcgactcatggtgggaactcggtgccaggcggtgggaaactagcgatgcccccttctttcgaagcgaacaccttgacgtggcaacataatcttcgcttaaattaaacaattatgacgaactgacagccaacaccgacccacgctgccatgttgggcaatcgtctgggtaaccgaaggcgaagcctaatcccattaggtccccacatgtgacaccacgtccagttcgcctggacaggccagcgggcaacgaggattggggattggccactcaaagaggcagtcgcgtgtcaattgagtggggcaggttgtggtttccctgctcgggtgtcactcaattaagtgcagttttaaactttgcaggggtgcagctctcgaaaattcttgggatccataaacattcgtaatcggcggtaattgaaatgcgccacaagtatgtaagtgcatacaattaactatttacgattattgtttatgacaatcgagcgtttttctgtcgccatcgaaggctgtggtcattgtgcaataatgtccaagacaaagacttcgattaaatgcgttttaagttaaggcctttttgttttagcctggaaaggagcctgctggacaatcgctaaatcacttccacaagtggacgaccttgtgcccattgcttggcatcacgttttgttttttgactttatcggatttacattagcgagaacattaatattcggctggccaaagccacaagacatgccacaaatgggtgaggccagttgcaactagcgaaatatttatatttaattggctatttgttaaggccaaattgggaagcgacaagagtattaattcgttctaatgccttaaaagtaactaaaaataaaattgatattgctgtatttttaggtgattaaaagtggttaatcatttcaattaggttgaattggcagtcagtttattgcttttcaaatgtagcgaccaatcattaatgaatcccccgatttaaattcattataaatcggactcaccttaatttgccggcatattccgtttctatggccactcgatcgcgtaagaagttggcaaacttgtccagagcatcgatgcctctgtttgtgtgtatcgccagattctcgttttgatcctgaaagtatggaaaatgtgcagatggaatctattaaaaagagccgggttaaaagcacttaatgcccgctgacattgagccaaggcaaatgcgtagatacatagatacatacacatatgcgataaatggaatagattgagagcagcgcaaaaaaaataatacgaaattaatctaatttttttaattagctcgatataggaaattcgctgcgtagcaaatgggaattcacttatgtggataaagatctagattatacaatgccataatggatcgattcatagagcttgcaggtcttgcagagcgaactcattagccttaaataggagcattgaattttaaacgctactagtcgacaatttcgagtggttcaatcttaaattatggcatatgtatcattagtttaccgctgacacaaatatgggcagtcacttcctcctcgtcgcgcgttatgacataatatcgggttattttctttcatttttactttctttggctgcctttgtgggcaatttgcaatacttttcaatattgtgtttgtcaataggcagacctaacaacaatcaaaacaaacggcgctccacttttgattttattttcgcacgctgacaaaacaacaagactgtagagacatcaaaagacgctgccgttttggccaacttagctgccaatcgcgaacgaatcacgcccccaaacgcaatggcaagcagatttgaattttaagtgaacccagaaggtaacaaaaatccccacaaaaaaaaaccgcttaaatggcacacaaacaagacgcgtagccaatttgcatttgaagttcagctgaggaggagtcgagaaattaacatcaattacataatgaaacccagttccgatcatggcccaaacaattttcaagcggtaaatgttcgaaaatttacgctgtctgtatgttttgaagtcttctttgggctattgcaaaattttgtaattttgtttcaatgcgatgattacaataatctcagtcgtta

SEQ ID NO: 36959 - DNA, 2273 bp, DROSOPHILA
ggatcaaaacgagaatctggcgatacacacaaacagaggcatcgatgctctggacaagtttgccaacttcttacgcgatcgagtggccatagaaacggaatatgccggcaaattaaggcgcctagtgaaaaactaccagcccaaaaagaaggaggaggaagacaatgaatgctaccattccattacagattcacatcggtgcaagcgttccgcaatctgctcaaggaggtgggcgatctggcgggacagcgcgaggtggtgtccgagtccctgcagctgcagatcattgcgggagtgacgcttctgtccaagacattgcgcgaggaacgcaagaaatgccttagcgatggtgccaccctgcagcagaacctcaccacacagctctcctcgctggaccgggccaagcggaactacgagaaggcctaccgtgactcggagaaggcggtggacagctataagcgggcagacatggacctcaatctcagccgggccgaggtggagcgctacaagaacgtgatgacgtccaagatccagcagtcggacgatgcgaagaacgagtacgctaaccagctacagaagacgaacaatctgcagcagcaacactacagcatgctgctgccctcggtcctcaatcggctgcaggagctggacgagaaacgcacccgtggcttcagggagttcattgtgggagcggcggatgtggagtcatcggtggcgccaatcatagcccgctgcatggagggtatcgtgaaggccggcgagtccatcaacgaaaaggaggataccttcaaagtcatagaaagatatcaatctggtttcacgccaccaagggacatacccttcgaggatctgtccaagtgcgatccggattccgtgcaggactcacactacagcaactcgacatcgaaccacctgaccattagaggcacgatgagtgccaacaagctgaagaaacgcgtgggcatttttaacatattcggcagcaataagaattccctgactgcggatggacaaaaggaggacttcagcgatctgccaccgaatcaacgaagaaagaaactgcaggcgaagatcgccgaactgacacagaatatcgcccaggaaacaaaagcacgggatggcctgatgaagatgaagatcgtctatgaggcgaactcatcgctgggcaatcccatgaccgtcgagggacaactgaacgagtcggaacacaagttggagaagctgaaagtggatctaaagaagtaccagggcttcttggagaaggcaagccaagtgccgacggccaccagtagtccgcaggcgagtcgaaatcaattgcaaaacggtcaccgaacctctagacattccaatggcagtgccgatgaccatcatgatgatggcgacgaccagcccgatgatgctggcagcttaagcagcagttcggcaagtcccgagagtggccttggcacttcgcacacatccctgccaggatcaggacagggcagcgccaacgaaaacgcgattggcgaggatacctactatgaaacggaagtggagacccttaatccagtgggaaaatgtcgtgccctgtatccatttgaagcctccagcgagggtagcatacccatgagtgagggcgaggagctgcaagtgatcgagatcgaccaaggagacggatggacgcgggtgcggcgggagaacaactccaatggctgggacgagggcttcgtgcccacgagttacatcgagatcacgctctatgcttaggattaagttcattttcggggcgggcaatcagccgggcggttttaaatgttacctactcagcaaactcttgcgtatgatcgattgatttgtgtacttttgtcataactttgcgttctgtcggacagccataacacacaaaacataacataacagacacaacacgcctaactttcacacaacactgtacatttgacttaagctaagttcgattcatttacccttcgtatgctttgtatatttactttgattttaaacgtcattgatcttatggtagtgcaagctatatcatactataaatactatagtcatatgcacctacgagcagacctcacctaattgtaagcaccgcaacgtttccctcttcaccacaacaatcatgataacacctatttatatacatatatggaaaaagatttatatgacacttgaatacgtgagagcatgaaaaggaaaacttaaactgaaacttaaactacagccgttggacattaaaagtaatcttgtgaacacgttctcacgtgcaatcc

SEQ ID NO: 36960 - protein, 525 aa, DROSOPHILA
MLPFHYRFTSVQAFRNLLKEVGDLAGQREVVSESLQLQIIAGVTLLSKTLREERKKCLSDGATLQQNLTTQLSSLDRAKRNYEKAYRDSEKAVDSYKRADMDLNLSRAEVERYKNVMTSKIQQSDDAKNEYANQLQKTNNLQQQHYSMLLPSVLNRLQELDEKRTRGFREFIVGAADVESSVAPIIARCMEGIVKAGESINEKEDTFKVIERYQSGFTPPRDIPFEDLSKCDPDSVQDSHYSNSTSNHLTIRGTMSANKLKKRVGIFNIFGSNKNSLTADGQKEDFSDLPPNQRRKKLQAKIAELTQNIAQETKARDGLMKMKIVYEANSSLGNPMTVEGQLNESEHKLEKLKVDLKKYQGFLEKASQVPTATSSPQASRNQLQNGHRTSRHSNGSADDHHDDGDDQPDDAGSLSSSSASPESGLGTSHTSLPGSGQGSANENAIGEDTYYETEVETLNPVGKCRALYPFEASSEGSIPMSEGEELQVIEIDQGDGWTRVRRENNSNGWDEGFVPTSYIEITLYA

SEQ ID NO: 36961 - DNA, 2510 bp, DROSOPHILA
aaagcagaaagagaggacaattggaattctactattgttgtatttacataatttcgcacacacacgcacacaagtaaacgcaattgccgaatgcacgcactctgcttctagatctgccaccgtttttttttttgttatttgtgctaactttttttttagcatttgctttgcagttgcaacttctttcgattttgggttttatttagcgcctgcactttcgcatgcgtcataattcgggcgacatttgcacacacacacaagcacacagttaaaacacccgcactcacacaacgcaagcatttgtttctcctttttggcgtgcgaaaaaacaattttatccgctcgcaactttccgctcgttttttcacttcggcatcaatacacagtgtgaccgcaatgtgtttgaataggcacacctctgcgtttgcagtgtgaccagagaccgatggcgacctaatttctaactctttaacatctagcggggatatgaacccatattgagagcaactgtaaagtttaattattattatataaaatatatgaaactttcgttaatacgtgcccccatttttttttataatttaacgttaattgtagactttttaaatatattattgtggccttgaaaactaataattttatggaataacataacgttgaaacagatgaagaaagctattattgagcttggaagaaacttcttattattgtttattgcttttaaagtaacaagagcatcgcttattgttgtatataatatattaatttgaacattaaattcactggagcaatagattttggcacactgtaaggtgtaagcatgtgcgccaggcgctagatcatttttagtactttccttgcatcagctgttaacactatcagctggtgggtcaacaattacattagatttactaactttttaatgaattaaaacttgagagaaacaacgttaatataagaaattaaattccttaccagctcatacaattcaccggtcacaatgccttcttacgaactagcactggtgctccgccaattgcctcgcgtgagtagcacatgaaatccaccggcagttacataaaagtaaataagaattgtacaccgcccgcagcccgaactgatttccgtgattaggcgaacggccgagtccatcctggacaagggcggcattatccggaagctggagaacctgggatcccgcgccctgccccacaaagtcagcgaacacggggtggttcaccgggaaggcacccacttcaccatcgcctttgatacggcgcccactaagatcgcagacttgaaggaggagtttggccgcgacatcgacatcatacggcgctacatcttcaaggtggaggagcccgagcagaagccctgcacgctgcacgaggagatgctgccacccgcgtatcgcaaggatgtgcaggagatcattgcggccgcccagaagaagcaaaagaagaagttcaactacaactccggcctggactactatcccttccaaaaataaaacaccaaataaaacgcgttaattatgtatgctaaaaccggttgtgggttcctcgatctttggctaattcaaactgaagcattccttatgaaatgcgcctgttatcttagtacttttcacaatgtttgtctttgtttggtttatggcgcccaatcggacgcttatcaattaattgataaagctccgtataatcgaccatcaatagaacgtaaattgtccaggtagtgcctcaagaatcgtcgagcagttcactagtacttcctcctgaccgcaaacgacctagaaatgtcaccgcaaatccgtccacttacgccagagctgcaaaaagttgccaaggagcagctcaaggaggatcccgaacgtctcgaagccgatctgcaggcgtttaagacatggatcgagcagcagccgcatctaaatccccgaatggatgatcagtttctggtggctttcttgcgcggctgcaagtacagtttggagcgggccaagtccaagttagataagtactacacgctgaagaccaagtatccggactatttccgagttaccaacaccacggatagcaagttccgggagattcatcaaacggggtaaggattttgacgccagctaactaatttaatttatcaatgcaattctgtcaattcagtgccatcatctacctgcccactccgctgaatgaaaatggacctcgcatcgggatctggcgcatgggattggtgccagtggagaagtacacaatgctggagtgcatgcaagtggcccaggcaatgcaggagattgccattttggaggacgactacgccaatgtcaatggagtagttttcattatggacatgaagggtgccaccgccgcacacttgttccagatgacgccgtcgatggccaagaaattcactgtcttctcggaggaggcacttccactgcgtctgaaggcacagcatttcatcaacaccatcaccggattcgagcagctgttcaacatgttcaagccaatgat

SEQ ID NO: 36962 - DNA, 444 bp, DROSOPHILA
atgccttcttacgaactagcactggtgctccgccaattgcctcgccccgaactgatttccgtgattaggcgaacggccgagtccatcctggacaagggcggcattatccggaagctggagaacctgggatcccgcgccctgccccacaaagtcagcgaacacggggtggttcaccgggaaggcacccacttcaccatcgcctttgatacggcgcccactaagatcgcagacttgaaggaggagtttggccgcgacatcgacatcatacggcgctacatcttcaaggtggaggagcccgagcagaagccctgcacgctgcacgaggagatgctgccacccgcgtatcgcaaggatgtgcaggagatcattgcggccgcccagaagaagcaaaagaagaagttcaactacaactccggcctggactactatcccttccaaaaataa

SEQ ID NO: 36963 - protein, 147 aa, DROSOPHILA
MPSYELALVLRQLPRPELISVIRRTAESILDKGGIIRKLENLGSRALPHKVSEHGVVHREGTHFTIAFDTAPTKIADLKEEFGRDIDIIRRYIFKVEEPEQKPCTLHEEMLPPAYRKDVQEIIAAAQKKQKKKFNYNSGLDYYPFQK

SEQ ID NO: 36964 - DNA, 2309 bp, DROSOPHILA
ttttggcacactgtaaggtgtaagcatgtgcgccaggcgctagatcatttttagtactttccttgcatcagctgttaacactatcagctggtgggtcaacaattacattagatttactaactttttaatgaattaaaacttgagagaaacaacgttaatataagaaattaaattccttaccagctcatacaattcaccggtcacaatgccttcttacgaactagcactggtgctccgccaattgcctcgcgtgagtagcacatgaaatccaccggcagttacataaaagtaaataagaattgtacaccgcccgcagcccgaactgatttccgtgattaggcgaacggccgagtccatcctggacaagggcggcattatccggaagctggagaacctgggatcccgcgccctgccccacaaagtcagcgaacacggggtggttcaccgggaaggcacccacttcaccatcgcctttgatacggcgcccactaagatcgcagacttgaaggaggagtttggccgcgacatcgacatcatacggcgctacatcttcaaggtggaggagcccgagcagaagccctgcacgctgcacgaggagatgctgccacccgcgtatcgcaaggatgtgcaggagatcattgcggccgcccagaagaagcaaaagaagaagttcaactacaactccggcctggactactatcccttccaaaaataaaacaccaaataaaacgcgttaattatgtatgctaaaaccggttgtgggttcctcgatctttggctaattcaaactgaagcattccttatgaaatgcgcctgttatcttagtacttttcacaatgtttgtctttgtttggtttatggcgcccaatcggacgcttatcaattaattgataaagctccgtataatcgaccatcaatagaacgtaaattgtccaggtagtgcctcaagaatcgtcgagcagttcactagtacttcctcctgaccgcaaacgacctagaaatgtcaccgcaaatccgtccacttacgccagagctgcaaaaagttgccaaggagcagctcaaggaggatcccgaacgtctcgaagccgatctgcaggcgtttaagacatggatcgagcagcagccgcatctaaatccccgaatggatgatcagtttctggtggctttcttgcgcggctgcaagtacagtttggagcgggccaagtccaagttagataagtactacacgctgaagaccaagtatccggactatttccgagttaccaacaccacggatagcaagttccgggagattcatcaaacggggtaaggattttgacgccagctaactaatttaatttatcaatgcaattctgtcaattcagtgccatcatctacctgcccactccgctgaatgaaaatggacctcgcatcgggatctggcgcatgggattggtgccagtggagaagtacacaatgctggagtgcatgcaagtggcccaggcaatgcaggagattgccattttggaggacgactacgccaatgtcaatggagtagttttcattatggacatgaagggtgccaccgccgcacacttgttccagatgacgccgtcgatggccaagaaattcactgtcttctcggaggaggcacttccactgcgtctgaaggcacagcatttcatcaacaccatcaccggattcgagcagctgttcaacatgttcaagccaatgatgtccaagaaaatgcagtctcgcctatttgtgcacggcaacaaaatggggctcttgacggagcagattccactgaaatatctgcccgaggaatacggcggcgagaatggcaccacgcaggacatcgtggccgccatggagaagaagttggacgagtacgccgatttcttccaggaaaatgtgaacttcggcaccgacgagagcctgcgtcccggaaaaccaatcgattttgaggggcttttcggagtagaaggttcctttagaaagctcaacgtggactagtttcagtttgtaactttaaagattttattttcttatcagccagttgaaaaagttgtccaatttagtggctagaaaacacattcgcatcagttgaattgtaaaatccaatagtaggaatgataatataggaatacatgaatatgctacgatacttcgcagcagttttaggtttctcctatataaacattgtccttttagcttttattatcatctgtagaagcagatctttcgctgccatttagttggtgcggatttgaatatctttcttcggtccaaagactcttccaggtacttttgtatctgaagatccacat

SEQ ID NO: 36965 - DNA, 309 bp, DROSOPHILA
atgtcaccgcaaatccgtccacttacgccagagctgcaaaaagttgccaaggagcagctcaaggaggatcccgaacgtctcgaagccgatctgcaggcgtttaagacatggatcgagcagcagccgcatctaaatccccgaatggatgatcagtttctggtggctttcttgcgcggctgcaagtacagtttggagcgggccaagtccaagttagataagtactacacgctgaagaccaagtatccggactatttccgagttaccaacaccacggatagcaagttccgggagattcatcaaacggggtaa

SEQ ID NO: 36966 - protein, 102 aa, DROSOPHILA
MSPQIRPLTPELQKVAKEQLKEDPERLEADLQAFKTWIEQQPHLNPRMDDQFLVAFLRGCKYSLERAKSKLDKYYTLKTKYPDYFRVTNTTDSKFREIHQTG

SEQ ID NO: 36967 - DNA, 2570 bp, DROSOPHILA
gcgaacacggggtggttcaccgggaaggcacccacttcaccatcgcctttgatacggcgcccactaagatcgcagacttgaaggaggagtttggccgcgacatcgacatcatacggcgctacatcttcaaggtggaggagcccgagcagaagccctgcacgctgcacgaggagatgctgccacccgcgtatcgcaaggatgtgcaggagatcattgcggccgcccagaagaagcaaaagaagaagttcaactacaactccggcctggactactatcccttccaaaaataaaacaccaaataaaacgcgttaattatgtatgctaaaaccggttgtgggttcctcgatctttggctaattcaaactgaagcattccttatgaaatgcgcctgttatcttagtacttttcacaatgtttgtctttgtttggtttatggcgcccaatcggacgcttatcaattaattgataaagctccgtataatcgaccatcaatagaacgtaaattgtccaggtagtgcctcaagaatcgtcgagcagttcactagtacttcctcctgaccgcaaacgacctagaaatgtcaccgcaaatccgtccacttacgccagagctgcaaaaagttgccaaggagcagctcaaggaggatcccgaacgtctcgaagccgatctgcaggcgtttaagacatggatcgagcagcagccgcatctaaatccccgaatggatgatcagtttctggtggctttcttgcgcggctgcaagtacagtttggagcgggccaagtccaagttagataagtactacacgctgaagaccaagtatccggactatttccgagttaccaacaccacggatagcaagttccgggagattcatcaaacggggtaaggattttgacgccagctaactaatttaatttatcaatgcaattctgtcaattcagtgccatcatctacctgcccactccgctgaatgaaaatggacctcgcatcgggatctggcgcatgggattggtgccagtggagaagtacacaatgctggagtgcatgcaagtggcccaggcaatgcaggagattgccattttggaggacgactacgccaatgtcaatggagtagttttcattatggacatgaagggtgccaccgccgcacacttgttccagatgacgccgtcgatggccaagaaattcactgtcttctcggaggaggcacttccactgcgtctgaaggcacagcatttcatcaacaccatcaccggattcgagcagctgttcaacatgttcaagccaatgatgtccaagaaaatgcagtctcgcctatttgtgcacggcaacaaaatggggctcttgacggagcagattccactgaaatatctgcccgaggaatacggcggcgagaatggcaccacgcaggacatcgtggccgccatggagaagaagttggacgagtacgccgatttcttccaggaaaatgtgaacttcggcaccgacgagagcctgcgtcccggaaaaccaatcgattttgaggggcttttcggagtagaaggttcctttagaaagctcaacgtggactagtttcagtttgtaactttaaagattttattttcttatcagccagttgaaaaagttgtccaatttagtggctagaaaacacattcgcatcagttgaattgtaaaatccaatagtaggaatgataatataggaatacatgaatatgctacgatacttcgcagcagttttaggtttctcctatataaacattgtccttttagcttttattatcatctgtagaagcagatctttcgctgccatttagttggtgcggatttgaatatctttcttcggtccaaagactcttccaggtacttttgtatctgaagatccacatcagatcgccacttaagttccaggaaaagagggaatatctctccggcttttttcaggcgtctctctgctttctgatagcatttccagggctgtggttccaccaccaggagctctgccagattggagagcttttgcagaaagaatcgcaggccttgatcatggtgattcaagtgaatccacatggtaatggagtagcagcaaatggcatcaaatttctcgagattattcacctccatataggttttaacggattcaaaggcttcatcatcgaggacatccacgcaggcgtagctcacatctttcggggattcattctcctcgctggcacgttgaatcagccgagggtctatatccacacctagaactttcacagatctatgaagacgttcctccagatatttatgcatgagttgagtgagtacgccgcaattgcagcccacatccaggatgaaatagggtttatccttttgggtttctccatcctccaacgcaggaagccatatgtccgcgtctggtaagagtttcacgcgttctgcggcggaactgaactgatagtagttgaagaagttgccatattgaaccgcgccgggatcgttgtttctaatatccatattttataagattcgtgtttttatttgttttgatttcacagaaacatgctgctagagatggtcgttgagacgatat

SEQ ID NO: 36968 - DNA, 570 bp, DROSOPHILA
atgggattggtgccagtggagaagtacacaatgctggagtgcatgcaagtggcccaggcaatgcaggagattgccattttggaggacgactacgccaatgtcaatggagtagttttcattatggacatgaagggtgccaccgccgcacacttgttccagatgacgccgtcgatggccaagaaattcactgtcttctcggaggaggcacttccactgcgtctgaaggcacagcatttcatcaacaccatcaccggattcgagcagctgttcaacatgttcaagccaatgatgtccaagaaaatgcagtctcgcctatttgtgcacggcaacaaaatggggctcttgacggagcagattccactgaaatatctgcccgaggaatacggcggcgagaatggcaccacgcaggacatcgtggccgccatggagaagaagttggacgagtacgccgatttcttccaggaaaatgtgaacttcggcaccgacgagagcctgcgtcccggaaaaccaatcgattttgaggggcttttcggagtagaaggttcctttagaaagctcaacgtggactag

SEQ ID NO: 36969 - protein, 189 aa, DROSOPHILA
MGLVPVEKYTMLECMQVAQAMQEIAILEDDYANVNGVVFIMDMKGATAAHLFQMTPSMAKKFTVFSEEALPLRLKAQHFINTITGFEQLFNMFKPMMSKKMQSRLFVHGNKMGLLTEQIPLKYLPEEYGGENGTTQDIVAAMEKKLDEYADFFQENVNFGTDESLRPGKPIDFEGLFGVEGSFRKLNVD

SEQ ID NO: 36970 - DNA, 2610 bp, DROSOPHILA
gccacatgccccagctgcaactcaatttccagctggaggaacaccaattggcgcagaggcaagcctgcctggatcagatggagaacctgcaacaggagatctacgatctgcacgggatgttccagggaatgcgtcaactgactgcagagcaatcagtggcggtggaaaagatagcagacaatgcggaggaagctctggagaatgtccagcagggcgaattgaatctgcgccgggcgctcacctacaagaaggccatgtaccccgtagtcggagctcttctgggcacctgtgtgggaggacccattggtctggtggcgggcatgaaagctggaggattggcggcagtaggatgtggcatcctcggcttcaccggtggctctgtgctaaaggccaatcccaatgtaatgcatggcaacatcgaggaggagcaggtggaaccggatagcgagtcaactgagagactggagctaaaagagaagccagaatgacccgcaggaggaagtgcccgatccgcatccacggctctggccaccacgcacatatggtcggcgaacacacgacgtttggaggcagccaccaacggagtgatttgcagcgtgcgcagctattgttccgttcagtagaaatttgaccacgattttagttcaatatccccattttgtgattttccacgtgcaatagagctaatgagcataatgtaactgcactttagtttaagcgttggatacttgttgttcacatgacaccgcaaatgtgtgtagattttaaggctttaatatgcaataataactcgtagctttaaaaaagtaatgatactatttgattgccatgttgagaagttcagactatatctgggtttttcagaacttgtttgggctttaatatgcaatatatactcttagctataacatctttgtagaaaaagcctacaaaatctcctaaactaagcgaggacttataaactacgataagataccagatgggtaacccagccccggatttataggggaacattaaccgtggtccaggcctgtttgaagttcttcttctgcgagtgctgcttctttcttagacgcttggcggtcttcttcttcttgaaccacgcaggataattgccgtactgatctttgagggtcttgctgttgaaaatgtgctccacgcccgtgttctcgttggtcaccttgactttctcgcccttctccagactctcctggtgctcgtagatcaattcctgctcctccttggatttggcctcctgttttaggaatacaatttcttctttaataaggatataaaatacgtaacaagaatgaaggtagtatcgcgataaactaagccggtttttcgcatattacatgcatacaatacatataatacattaggtaaattggtatatttgtaggtgggtatatcacataactaacccttttgagctccttggcggtcttaatttcgaccacatcgcttatatccttcatgatctcatttccatcggcatctaggagtcccagagttttcttcagtcgaattaactccttggcttcgtaccgcgccttctttatcttattcatttcatcacgacgctttctcgagcgattgtttctgcccatttcggtagtcggatattaagtaataccagaaaaagtcaaagaagtaaagaaattgcgttcaatttgctaaaaacgtaaacacgtgtgtttttgctagagctggaaaactgcccgatttttcttcgatttttttcagcgggctcttatcgatagcgcaaataaattaatcgaccagggcttatttttagttatttagccgccaagattaaaaattgttttttttttactctcgttttttaaatagttttatatactttctatgtaaaagacacttatctgtatagaaatatgtgtcatattatttaattacaccttatgtccttattttccctaatatgctgtagcgctgttgtatcaattatcaggtacataaatttttaaaaaccacaaaatatattaaaacatattaaattctagtttttatgactttgcctttaatgcatataagttataacttttttaaaaaccacaaattaagcttttgtggcttttttccacttccattttcgtttccattcatctctttcttccccttttccactctgtatttatttaccttttgttctctctccttttcagtatatatatattgcaatatgatttttgtatacaaacaaaatcagctgctgaagagaaaatgagaggcttgccaaatacgaaaagtaactaaaataggaaatatagtcgttgtgaaatgctctacaccgactagatttttaatacactaaatagaattttataaaaaatatatgattgtacaaaatgcaatagttttctctaatagctaagacaatgcatataatagtttgtttaacagtttaaaagaattcggcttaaatgcacttactttttaaagaccttgataaaaaggttttcacaaagagatagactgtaaaaatgtcctagctatttagccaaagtataaggtattgttaatgtacaatacaatgtgtttacttcagtgacatagctgagttactttcgatttggatagagcatc

SEQ ID NO: 36971 - DNA, 441 bp, DROSOPHILA
atgggcagaaacaatcgctcgagaaagcgtcgtgatgaaatgaataagataaagaaggcgcggtacgaagccaaggagttaattcgactgaagaaaactctgggactcctagatgccgatggaaatgagatcatgaaggatataagcgatgtggtcgaaattaagaccgccaaggagctcaaaagggaggccaaatccaaggaggagcaggaattgatctacgagcaccaggagagtctggagaagggcgagaaagtcaaggtgaccaacgagaacacgggcgtggagcacattttcaacagcaagaccctcaaagatcagtacggcaattatcctgcgtggttcaagaagaagaagaccgccaagcgtctaagaaagaagcagcactcgcagaagaagaacttcaaacaggcctggaccacggttaatgttcccctataa

SEQ ID NO: 36972 - protein, 146 aa, DROSOPHILA
MGRNNRSRKRRDEMNKIKKARYEAKELIRLKKTLGLLDADGNEIMKDISDVVEIKTAKELKREAKSKEEQELIYEHQESLEKGEKVKVTNENTGVEHIFNSKTLKDQYGNYPAWFKKKKTAKRLRKKQHSQKKNFKQAWTTVNVPL

SEQ ID NO: 36973 - DNA, 4576 bp, DROSOPHILA
tttttacacccaagaacaggcggagagcgtttgccaaaacaataatagaggcgaaatgactgggccatcgaaaattgcacaattagcagtgtatttctgcggctgctgctaatgcagcagttgttgcatttgcgattgggcaatattaaaagtcctcaaccatattaacactttttgggcaatgttttgcggcgcgccgcagtcgaaaatttgtgtcaaacccaacatctttgagccacaacaacggaaaatcatgcggctgggcgcacgaccgactaaaaaagcagtcaaaacacataaatctccatggctctcggtgacaagcgctcgaaaacaccaaatttggacgtgtcaatggctgaggacaaagccggtctcatgaggaagtgccacaggtgtcaccagtcgccttcgacttccttatgcctgccacatggggcggcataaacatgagcggtaactcaaaaaaacccgcctccaaaggccatcagtatatttggcgctgaacaaattgaaacattattcagtggcaagcctaatggcaggcaacatttttttacactaacggtttcgaaagtttttaatcgagcctatagccaggcaatattttacgttgtgtaaacaaaaacctgtaagtaaaattcgattcaaaatacttcagttacatatacgtattaattttaaaaactgtataataatgctttacatatatttctcatataaaaataaacacaaattttcttcaaaacatctgaattaaattatatttattcagtaagaaaccaagcttttaaaaggtctataatttttagaaatcgcaggagatctttctccattccacccacgatcagttggcaaaatcaaaacttaagtctagcactcggaacctaaagaaagactacagcaaacttagctctaactaaaacagaatttcgtgggtcataagctatatacacaatgtgctcagaacaaggccacaaattggccaatttggttttcatcaatcgatttgtcctttgtgtgcaatataagagtcgtacagtgaggactccttgcgacgttttagtctcgaacaggcaatgaagagggttactgttagcacgcataataccgctgaacagccggcggttaatgccgaaaatgtggacgttttcaagcatgtttgatgtggtgacaaaggtttcgtctgccgatgggcatacacatcatcgccatcagtttcaccctcttgcagaacacgcagggactggaaaaggttcacattttcggatagggaattagctgttgggctctctgtggtgagtccctctccatcggcggacaatggaggaatcgagatgtttgtggctgtcatgttggaggtatcgcgcttggtcactgctttcagattcctccagtgacatggttggctctgaggaataaaatatattattttgacataatgtttactgattattttacgatataactcactggacaccgtccatggcacatccgcacatcgcactcgatatagagcgctggtgatccagtgaagcggaaagtcttcatgtaggcatacacctgagtctcgtacactccagaatccgaccaggagcccctgaagcgtgagatgagcttgtcatccactggacagccgtgctgatcgatgagctgtatccgcttgttggcgccattgtgggcataacaatcgttgaccactatgtcgaagccgtctgcgtatcgcaatatcgtcattaatatattagttcagacggtgtgaatcaattcatttaccatatttgctcctcatatagatgatcaaggttagcggatcgcccacacgcactggacctgttacccttggacctccaatgccataaccattttggatttccatatagcattcgggcggacttagagtgaagaccacaggattgccagtagccactctgtgggattaaaaatataaataactaaatatatttggtaatttcttatacgtactccacatctagaaagggaaaggtcaccgttttccagaagtcatagccatactcgcaggtgaccttaaagtgttcatcgtactcttcctcaatcaaggggttatattgaacagttaccgtgttccacataaaattctagaaaatagggaaaattttcttcaaacattgttataaaatccagtatcaatcatacgcaccgtgggattcttgcgactttcctcttgcagagaatttttccccaaagtaccacagcgattcagctggatatagaattcgtagtagtccctgccagacccattgatgtacatgcaatccggatcataggcatatccagctgaatacagtaatccactaaaggagccattgaatccaatgcgtattttcatatagtcatcctgacactcagcttcgatatctgtttaggcaattggattaccatgagaacgaaatatttaagttaggaattattgattcttacgttgaactctggttccattgtgttgatgttgatgtcctgcatactcctgatcccagtattcctcctgccacttgctgttctcatagggcaccgcatgatagccaccgctaccagtaggagcaccacttgaatccactcccgtaggtccataatccaaatgcacaggatgaccaattcgatggggtatgtagccagaggaatcaggcacgtgatcgggctgatttttgacacatttttaattaaataatttcgaaaaatatatgttaaaaacttacgacttcatgctgcagcttgttgcgctccaatgcattactgctacgattgcgcacatccttgggaaattttttgggtcctgccagtccagctcgtttagacaacttcgagggttgtgtggtgggtccggaaatatacgatttggaggaaatcccaaccaattccttttgggcttcagcgccagtggccaagggacgagtaccagaagtacttctcgtggatggagttgttgtctgaatgcgacctttgaaaattcgcagtggcggcactagagtgggtggtgcagaagtcgtggttgccactcctgcagtcttgctaaccaccgaatagtccgtactctgttccaatccactgatgggctgctgcaagacaatggaaaagaagcattttcaaaaagtgcgtacggcgcgtggggcgtatacgcaatgccataaatcactcgcttaagtttgtgtctcaagtctttggctttatgagcctcgcgaaaaaggaaaagtgctgcatcagcagcaatggcaacaaagccacattattttggccagacaaagcttcttccgctcgcggtcgatacgcaatctgcattagagcagagcatatccgttagacgggctgggcgattggccaacgattggtaacggttcatgtggcctaatcaggaagttcatgctaagaactgttaaatagattagatttcccatcagccactacttgggcaataatgctcttcgttggccaatcagtcggaggtgaaaggtttcttacctgcaactccacgagcagcatcatcagaacaaccgactggagcagccacgttcgcttgggcaatctgcacatcttcatgtccgtcacccgactggcagctgcaaagatgaaaatggagtcccataggggaccattcaatatggtatcggaatgctagtcggtatcataactatcgtcatgcttgaggctgccacaagctgaccttgctagtggtcactcaagtgttgtctgccggtggttacaccaaatgcgtgctggccggaaggaagtttgtgcttcataaattaattgtggccaatgtgcacggctattagatctcggatcttcgtggtcgcaaaatggttagataggatgcccttaacttgatttatggcagatcataaagatagaggttattattctattctatggcttcttccttgcaaaactgtcttagtttagcagatttagttacatatttcgaacgaatatctttaagattcttatatacaagtatggacaatggacaaatcattttaatcatagaaggttctaaaatttatattttttcttgaagttatttcccattccagctatcagccataatgttacttccgttggactctacagcatgttatttctatcctcttcaatgtcgttgaagctatggccagaacaatgacaacttcagatacatcatcttctaactccgtttgtctgacgttaaggtcaaagccataaaactgtcacccgttgcgatggtttaattatggcccacgcagaacgcacctgtctaagattttagtctgcgcttaaacttggattacattttaatgaacgacgtgatccgccgacgaaatcacccctctcgcccaccaaaatgcttggctgccttttcgcttagctgtaaaaacgcacgccgtttgcttaattgttgttataattacttcagcttcttgtgggtgtttgtttcatgtttgtttaatgtttttttttttttttttttcttcatttttgccttgttgttggccactgttgtgcaatagttgctgctgttattgccgcttcttcgttttgttgggtttttggtttcggtttt

SEQ ID NO: 36974 - DNA, 1815 bp, DROSOPHILA
atgaagatgtgcagattgcccaagcgaacgtggctgctccagtcggttgttctgatgatgctgctcgtggagttgcagcagcccatcagtggattggaacagagtacggactattcggtggttagcaagactgcaggagtggcaaccacgacttctgcaccacccactctagtgccgccactgcgaattttcaaaggtcgcattcagacaacaactccatccacgagaagtacttctggtactcgtcccttggccactggcgctgaagcccaaaaggaattggttgggatttcctccaaatcgtatatttccggacccaccacacaaccctcgaagttgtctaaacgagctggactggcaggacccaaaaaatttcccaaggatgtgcgcaatcgtagcagtaatgcattggagcgcaacaagctgcagcatgaagtccccgatcacgtgcctgattcctctggctacataccccatcgaattggtcatcctgtgcatttggattatggacctacgggagtggattcaagtggtgctcctactggtagcggtggctatcatgcggtgccctatgagaacagcaagtggcaggaggaatactgggatcaggagtatgcaggacatcaacatcaacacaatggaaccagagttcaacatatcgaagctgagtgtcaggatgactatatgaaaatacgcattggattcaatggctcctttagtggattactgtattcagctggatatgcctatgatccggattgcatgtacatcaatgggtctggcagggactactacgaattctatatccagctgaatcgctgtggtactttggggaaaaattctctgcaagaggaaagtcgcaagaatcccacgaattttatgtggaacacggtaactgttcaatataaccccttgattgaggaagagtacgatgaacactttaaggtcacctgcgagtatggctatgacttctggaaaacggtgacctttccctttctagatgtggaagtggctactggcaatcctgtggtcttcactctaagtccgcccgaatgctatatggaaatccaaaatggttatggcattggaggtccaagggtaacaggtccagtgcgtgtgggcgatccgctaaccttgatcatctatatgaggagcaaatatgacggcttcgacatagtggtcaacgattgttatgcccacaatggcgccaacaagcggatacagctcatcgatcagcacggctgtccagtggatgacaagctcatctcacgcttcaggggctcctggtcggattctggagtgtacgagactcaggtgtatgcctacatgaagactttccgcttcactggatcaccagcgctctatatcgagtgcgatgtgcggatgtgccatggacggtgtccaagccaaccatgtcactggaggaatctgaaagcagtgaccaagcgcgatacctccaacatgacagccacaaacatctcgattcctccattgtccgccgatggagagggactcaccacagagagcccaacagctaattccctatccgaaaatgtgaaccttttccagtccctgcgtgttctgcaagagggtgaaactgatggcgatgatgtgtatgcccatcggcagacgaaacctttgtcaccacatcaaacatgcttgaaaacgtccacattttcggcattaaccgccggctgttcagcggtattatgcgtgctaacagtaaccctcttcattgcctgttcgagactaaaacgtcgcaaggagtcctcactgtacgactcttatattgcacacaaaggacaaatcgattga

SEQ ID NO: 36975 - protein, 604 aa, DROSOPHILA
MKMCRLPKRTWLLQSVVLMMLLVELQQPISGLEQSTDYSVVSKTAGVATTTSAPPTLVPPLRIFKGRIQTTTPSTRSTSGTRPLATGAEAQKELVGISSKSYISGPTTQPSKLSKRAGLAGPKKFPKDVRNRSSNALERNKLQHEVPDHVPDSSGYIPHRIGHPVHLDYGPTGVDSSGAPTGSGGYHAVPYENSKWQEEYWDQEYAGHQHQHNGTRVQHIEAECQDDYMKIRIGFNGSFSGLLYSAGYAYDPDCMYINGSGRDYYEFYIQLNRCGTLGKNSLQEESRKNPTNFMWNTVTVQYNPLIEEEYDEHFKVTCEYGYDFWKTVTFPFLDVEVATGNPVVFTLSPPECYMEIQNGYGIGGPRVTGPVRVGDPLTLIIYMRSKYDGFDIVVNDCYAHNGANKRIQLIDQHGCPVDDKLISRFRGSWSDSGVYETQVYAYMKTFRFTGSPALYIECDVRMCHGRCPSQPCHWRNLKAVTKRDTSNMTATNISIPPLSADGEGLTTESPTANSLSENVNLFQSLRVLQEGETDGDDVYAHRQTKPLSPHQTCLKTSTFSALTAGCSAVLCVLTVTLFIACSRLKRRKESSLYDSYIAHKGQID

SEQ ID NO: 36976 - DNA, 2104 bp, DROSOPHILA
aatggatatagagtcggagagcgggagagaaagagagagcaagagagagagagagagagatagctaaagctaagctaatgtttagtgaatcttatatagagatactaagttatagctatcccaaaatatctaatcctgtggggcgggcacttaacagagtgcgcaggtgtgctatgaggagttcctacttgagattccaaattatatatatataatatatataaagtttacaaagagttttgatgactagcgcagttgtgattcggttataattttcggttctttttttttttttttttttttgcagcgctgcagcagcgacgctttgacagattctccaagactcattttttcgggcaatcgcaagtcgagatttgtgtggcggttgttgttgctggtctatttgctatatagctactaaatccagtacatttggtagttgttgctgttcttttgggagttgtgtggctaagctatatacacgaaacgttggatgccaggagctggagggccggtggtagttggtacttggtacttggtggttggcaatgagagcttggagaacttgttaaggcggcgctgccagcgcaaagcgtaaatttaagaaaaaaatcaaatcattgctgtaaaatcgtaagctagctaaggagaagagaaatagagagatagttttcgtttttcggggactaagaaacggttagcagagttaacagagtttttaggccttcatttgcatttctttcctttacgattacataacggcccttgcccgaaagggggcgtggcagtcttcttcttcgtagcccaaaatacgtacccaacgaaaaggccacaagcaccaggatgctgcacaacagccaggatttgcaggaagactccatgatttttccacacttttcacttactccagggacatggctaatttatattttttcgcattgggatttcgctggcccacgccccaaaagacattgattagctgtacgaacgccaaaccaaatcttactccaactttttgtgtcatattctgtacgggtcgtatgagtttattgtagcctcgaaagaggtcacgcaccaagcgctcttcatcttcggatgcactgactaaaaaacacaacggaaacggaagcgaacgaaaaacaacggaagagtgtacacacacatataggaattcggaggcgggatataggtttaatcagaacaaaatggcgggcacacagagacacaaaagtaatgaaagaaaatacagagaaacaaagaaacgaacggatgagcaaagttgttgtattcattgtttaagttttgcttgttgttctttttttaatttttgaatgggtttttgggatgatttagcttatagacagatagacttagacagagcgagatagagagagagagaggaagagtagaagagagagactgagagagataggcagataggacagaggcattgtcagactttttaaaccgattcttcgtcttcagcatcagcatcattttagaattttgatgggaaaagttaaacaaaaatggacgacacatgagaaccgctcgattgtggtatatatttctgtttttgctgtttttgctgtttttggtggtgcaggtggtggttgtcagttttggtggtggaggtggtgtgcgaagtggcactgttgatgttgttgctgttgttctggcctacgttgagtatacgccgcatgggaggcacttccgttaaacaagaactatgaacaggggaagaggtccttccaacccccaccccccacatagtggatggtttaatgcaagtgcctagtgattcttacagtcctagagtcctgactcgtaaaaagtactatgataacatggttatacagtaacttgtgcttgacaaagtgcaacatttaagtggcgcccgatcagggatatctaagaacctaacgggagtttctgcttatatattctacgtgggactgagatggctatagtgcccgttgttttcctcgccgcttgacagctgagcgaactttatccggaaaagctccacacggtgtccttcgagagaggagaagagagagctcttcgaaagcgcagggatgctggggcccacactctcggccgc

SEQ ID NO: 36977 - DNA, 2398 bp, DROSOPHILA
tcttaatccgcacccaaactgacggctccagttcaagacggaaagttcggaaagaaaattccctgaaaaatcagtgaaaattaagaaaatattcataaagcactagctaaaattaagaaaagcttgagataagttttggggcgtgggccagcgaaatcccaatgcgaaaaaatataaattagccatgtccctggagtaagtgaaaagtgtggaaaaatcatggagtcttcctgcaaatcctggctgttgtgcagcatcctggtgcttgtggccttttcgttggtcagtgcatccgaagatgaagagcgcttggtgcgtgacctctttcgaggctacaataaactcatacgacccgtacagaatatgacacaaaaagttggagtaagatttggtttggcgttcgtacagctaatcaatgtcaatgagaaaaatcaaattatgaaatcaaacgtttggttacgtttggtttggtacgactaccagctgcagtgggatgaggccgactacggcggcatcggggtgttgcgtctgccccccgacaaggtttggaagccggacattgtgctcttcaataatgccgatggcaactacgaggtgcgctacaagtccaacgtgctgatttatcccacgggagaggtcctgtgggttcctccggccatttaccagagctcctgcaccatcgatgtgacctacttccccttcgatcagcagacctgtatcatgaagttcggatcgtggaccttcaatggagatcaggtctcattggcgctctataataataagaactttgtggatctgtcggattactggaagtccggcacctgggacattatagaggtgcccgcctatctgaacgtttacgagggcgatagcaaccaccccacggagactgacatcacattctacatcatcatccggcgaaagactctcttctacactgtgaatttaattctgcccacggtgctgatttccttcctctgcgtcttggtattttacctgccagccgaggccggcgaaaaggttacgctcggaattagcattttgctgtcactggttgtgttcctgttgctggtgtcgaagattctgccaccaacgtcgctggtgctgccactgatcgccaaatatttgctgttcaccttcatcatgaacacggtttccatcctggtgaccgtgatcatcatcaactggaacttccgggggccgcgcacccaccgcatgcccatgtacatccgctccatcttcctgcactacctgcccgccttcctattcatgaagcgccctcggaagacccgcctgcgctggatgatggagatgcccggaatgagcatgcccgcccatcctcatccctcctacggctcgccagcggagctgcccaagcatatcagcgccatcggcggcaagcaatccaagatggaggtcatggagttgtccgacctgcatcaccccaactgcaagatcaaccgcaaggtcaacagtggtggggaacttggcctgggtgacggttgtcgccgggagagcgagtcctccgattccatcctgctctctccggaggccagcaaggccaccgaggcggtggagttcattgccgagcacttgcggaacgaggatctgtacattcagacccgcgaagattggaagtacgtggccatggtgatcgatcgcttgcaactatacatcttcttcattgtgaccacggccggaacggtgggcattctgatggatgctccgcatattttcgagtacgttgatcaggatcgcatcatcgagatttacaggggaaagtaagcgagtgaggacttggagcagccgggggctgattgaaatggttaacagcattgcaaacgcaacaataataagcaaacgaggtattgagacagaggaaaacaatgaaaattgcaacaattaatgcggatttttagattttaataattaatgaacactaaacgatacttgcttgagcagaattaacacctaaaataactaactaatattaactttttggtaaacacacgaattggaacacagaacacacactaagcagacgtcgagtaaaacaaatacgcaaaataactcaccagcaacaaatgttaaacaaataaatcaaaacaaagaaaaccaacctagtggaattgtgagtaaatttataatttttaaaacgaacttagctaatatggacatctagaatgaagtttagtttaagagcaataaatagcaaacaaacgtttcccaaataatttgttatgttgtgccaggaacttaatcataagtaatcgcagttttacgcataagatttaagaatggaatacatcccgaatcaatttgtaaatgcttctcacacgatcgcagctagcaaaaagatcgacttaatcgtaggctccgaagatccgaagatccggag

SEQ ID NO: 36978 - protein, 521 aa, DROSOPHILA
MESSCKSWLLCSILVLVAFSLVSASEDEERLVRDLFRGYNKLIRPVQNMTQKVGVRFGLAFVQLINVNEKNQIMKSNVWLRLVWYDYQLQWDEADYGGIGVLRLPPDKVWKPDIVLFNNADGNYEVRYKSNVLIYPTGEVLWVPPAIYQSSCTIDVTYFPFDQQTCIMKFGSWTFNGDQVSLALYNNKNFVDLSDYWKSGTWDIIEVPAYLNVYEGDSNHPTETDITFYIIIRRKTLFYTVNLILPTVLISFLCVLVFYLPAEAGEKVTLGISILLSLVVFLLLVSKILPPTSLVLPLIAKYLLFTFIMNTVSILVTVIIINWNFRGPRTHRMPMYIRSIFLHYLPAFLFMKRPRKTRLRWMMEMPGMSMPAHPHPSYGSPAELPKHISAIGGKQSKMEVMELSDLHHPNCKINRKVNSGGELGLGDGCRRESESSDSILLSPEASKATEAVEFIAEHLRNEDLYIQTREDWKYVAMVIDRLQLYIFFIVTTAGTVGILMDAPHIFEYVDQDRIIEIYRGK

SEQ ID NO: 36979 - DNA, 3042 bp, DROSOPHILA
ccggcctgagaacgttccggctgcttgacgctctcggaatttccgcctctgatttatggcgcccccaggtttttgattgatttgacctaccaactggccaccacactatgtaccactgggtggtgcctggggactgcacttgaaccactggtatttcgactaggccatctgcctgcactggaaaaaaattgaagtttttggatgagtgcaatgtgtgaaaggagagtaacaaatattagattctcgtcttaaaaactatttatctatataaaactatatttaaaatgtgtgtaaagtaccataaaagcttgcaaatttttgttcatcttgtagctgttaaagtgacggcacagaaggtcgtttttaaagctgaaacattgacccaccagcgaatcccccgagtgattgacatatccagctttgactttggcttttgaaatttgtttttatttggaaaaagatttgagtggcggggcaactggctccaatggtggttcacaggacagtggttttgagtacttttctagaagtttctagaaggtaaagggtttggcaggcttgttgtagttgtagccatcgggtcccagagagcctgcctcatcgccaccactggtgggtggtggtggtccgtactccggagttggtgcaggtggtgctggcggacgtggctgataggtgggtcctggagcaggtgcaggtggtgcaggaggttgtggctgatatgtgggtgccggtggtgcaggaggactcggggggcgtggctggtaagtgggtcctggtgcaggcgctggtggtgctggtgggcgtggttgataagtaggtcctggtgcaggcgctggtggtgctggtgggcgtggctggtatgtgggtccagcgggaggtgcaggcggtggtggtccgtattccggcactggtgcagttggctgcggttgtgtcggggtgacctcattctctccaggaggtggcaaatactcagatcctggctgtggccgtggtggctgtgggcgtggcggctgtggtcttggcggctgtggtgccggctgagcgggtcctggtcctggtggtggtgtaggagggccgtatcctggagtaggctgtggcttaggcggaggtggtggcggtggtggtccgtagccaggagttggctggggcctaggtggtggtggtggaggcggctgaggacgcgagggcgttggacgtggctttggctgatctggaggcaggtactctggcccaggttgtggcgatggtggcgatggtggctgtggtgccggtggctgaggctgaggaggtccataggatggagctggagccgaaggtgttggctgcggtggaggacgaggtggtggtgtctgcggcggtccataagatggtggtggagcgggagccgatggagttggctgtggtggaggacgtggtggaggcgtctgcggaggaccataggatggaggtggcggagcaggagccgaaggagttggctgcggtggagggcgtggtggctgagtctgaggaggtccataggaaggacgaggagctggtggagtcggctgtggcggtggaggaggaggaggaggacgcgtctgcgggggcccataggacggcgccggcgccgagggagcaggtcctgggcctatgcccgaatcctcaatgccatttcccgatcccggaggcggaaaaggcaccgacggctgcttgtaatgatagccatcctcctggagatctgtgtccaggtgggagacatccgcgtggacacccgctgccaagagcagggccaccagaggcagaaaacagcgctacaagacaattgagatgaaaccggcagcttgtttcctcagccaacgaactcaccatttctactcgatgctaaacgagcgcggtttttccgagttttcctaacaacacaacacacacagcgaatcgaactattaccggtttcgcagacgaaccgcactcgaaattacttttccagggggcctttgagccgacgtcttcgttgcaaaatcagaaatcgaatgatgcccaaatgttctcccttggctcatttataccggcctggcccagagcagcccctaagttggctaagctcggagctcgctcagttagatgccgaagttttgagtcagccgagtacgagttttacctcaatcgccgctcagccgagctaagtcgtcatcatcgtcatcatcttggtcgtcgtcgtgatgctgcaacctttgatgtagccatatagccacaggtgaggacagagatactgtatctctatatctgtatctgttgatcagcggcgattgtaagtcaataacagcgcgtactagttagttttttgtctttagttcccccgaactccgtgtgagtgctccaaccaggaaccaaatggggaaatttctgaccatgtttatgtgtttggccaattaggtttgatgggatccgacagaattcacaccaagtggctacgtgggcggatgattaatgtgcgaatatacgactgcaaaacagaaacagctatttctaagacacatatgcccaagatatgttagaatcgtgcttacataattggcttcccatccctaccactaaacaataaacattattgacttgaacaatcgatgcttatttaaatcgacattctccagttggccaataaaacattatgcccatattaatttgttaataagccaagtgtccaggcgcgtaacacgcggcgtatgcgcgatgcagcaatgaaattaatagacgggttcgcttaattaactttgcatttttattggtttcatgtaggctccgggtctccggatcttcggatcttcggagcctacgattaagtcgatctttttgctagctgcgatcgtgtgagaagcatttacaaattgattcgggatgtattccattcttaaatcttatgcgtaaaactgcgattacttatgattaagttcctggcacaacataacaaattatttgggaaacgtttgtttgctatttattgctcttaaactaaacttcattctagatgtccatattagctaagttcgttttaaaaattat

SEQ ID NO: 36980 - DNA, 1341 bp, DROSOPHILA
atgagccaagggagaacatttgggcatcattcgatttctgattttgcaacgaagacgtcggctcaaaggccccctggaaaacgctgttttctgcctctggtggccctgctcttggcagcgggtgtccacgcggatgtctcccacctggacacagatctccaggaggatggctatcattacaagcagccgtcggtgccttttccgcctccgggatcgggaaatggcattgaggattcgggcataggcccaggacctgctccctcggcgccggcgccgtcctatgggcccccgcagacgcgtcctcctcctcctcctccaccgccacagccgactccaccagctcctcgtccttcctatggacctcctcagactcagccaccacgccctccaccgcagccaactccttcggctcctgctccgccacctccatcctatggtcctccgcagacgcctccaccacgtcctccaccacagccaactccatcggctcccgctccaccaccatcttatggaccgccgcagacaccaccacctcgtcctccaccgcagccaacaccttcggctccagctccatcctatggacctcctcagcctcagccaccggcaccacagccaccatcgccaccatcgccacaacctgggccagagtacctgcctccagatcagccaaagccacgtccaacgccctcgcgtcctcagccgcctccaccaccaccacctaggccccagccaactcctggctacggaccaccaccgccaccacctccgcctaagccacagcctactccaggatacggccctcctacaccaccaccaggaccaggacccgctcagccggcaccacagccgccaagaccacagccgccacgcccacagccaccacggccacagccaggatctgagtatttgccacctcctggagagaatgaggtcaccccgacacaaccgcagccaactgcaccagtgccggaatacggaccaccaccgcctgcacctcccgctggacccacataccagccacgcccaccagcaccaccagcgcctgcaccaggacctacttatcaaccacgcccaccagcaccaccagcgcctgcaccaggacccacttaccagccacgccccccgagtcctcctgcaccaccggcacccacatatcagccacaacctcctgcaccacctgcacctgctccaggacccacctatcagccacgtccgccagcaccacctgcaccaactccggagtacggaccaccaccacccaccagtggtggcgatgaggcaggctctctgggacccgatggctacaactacaacaagcctgccaaaccctttaccttctag

SEQ ID NO: 36981 - protein, 446 aa, DROSOPHILA
MSQGRTFGHHSISDFATKTSAQRPPGKRCFLPLVALLLAAGVHADVSHLDTDLQEDGYHYKQPSVPFPPPGSGNGIEDSGIGPGPAPSAPAPSYGPPQTRPPPPPPPPQPTPPAPRPSYGPPQTQPPRPPPQPTPSAPAPPPPSYGPPQTPPPRPPPQPTPSAPAPPPSYGPPQTPPPRPPPQPTPSAPAPSYGPPQPQPPAPQPPSPPSPQPGPEYLPPDQPKPRPTPSRPQPPPPPPPRPQPTPGYGPPPPPPPPKPQPTPGYGPPTPPPGPGPAQPAPQPPRPQPPRPQPPRPQPGSEYLPPPGENEVTPTQPQPTAPVPEYGPPPPAPPAGPTYQPRPPAPPAPAPGPTYQPRPPAPPAPAPGPTYQPRPPSPPAPPAPTYQPQPPAPPAPAPGPTYQPRPPAPPAPTPEYGPPPPTSGGDEAGSLGPDGYNYNKPAKPFTF

SEQ ID NO: 36982 - DNA, 2474 bp, DROSOPHILA
atttcgccaccttttgaacagtgtagatctctaatattgtgggcctttttatttgtgcgtcatgactcgtgacgacatttaagtgattgtccaaagggtcccggcagcatctcacagcccgtcggcatctccagcatcctcttctagtcgccgattcttctcaattcgattcgtttcatttaatttaaattttgatttgaattgcctctgctgccgttgttgcttttggtgctgaacgttgccgcttctgctgttaagattttgtttttgccttatttataacgcggtgtgcggtttgtgtctcatcgggttttggtttttggcggtcgccgtcgctctgcccagactctcttagacccacgtagcgaactgaaccgaaccggacggactgaacgggcgatatagtataaatttcatacccactgaccagctcatcatcatttgtgctttgaacttcttaagtgtaaattgctcgtttgcttctgctcgagaaaatttcgtgaaaccccaaaaccaaaacaaacaaaaatggtatgtgatccttgcaacaaggacaacgaattttagtgatatgctgctgttttaaccaggataaaaacgaaaaacaaaagaccaagtgaaacgtgatatagaactattcaaattagaaacccaaaaataactctcaccacaagtgccaaccaacccggactcaagtgctctaaacgacttcatcaacgcgctgtcccgtttctagtgctcctcgggacttgattcacttcacacccgtgccgaagccacgcacatgattatgcttcagaatgttcttaaaataacaatctcactcactggcagtttttgaaatatctgttaatttgtatatagcagattttgacttaaactgaggtcatccatatgggatgataatataaaaagttgtgtccctcaaattgttataagtcttagacttattgcagttaaggacatagtcattcaagcaaagaactaggtagcagaattgatggtaaatattctccttttttttttgcagaaattctttttgctattggctttggcccttgtgggcattgctgctggagctcagcttcctgactccgccacccagggacccaatcctcaggatattgccaccccggagccggagtacattgatatcgacgaacctgcaccggtggctgccgcacctgctcctcgtcctgtggccgctgctccccgtcccgtcttcgccgcccctgctcccatcgctcggccagttgctcatccagtggctcgccccgtggttgtggcccaatccttcgtccagcagcccgtccagcagcagattgtccagagggctcagtacgtggcgccggtggctcagcaggtggtgttgccgcaacagcagctggtgggacacacctacaacagcagggctggataccagtaccgccgtccagtctatgtaagacgtttctatcgcctgcgccgctactaagaggacgcagctagatcttaactatatttaatacgtgctcgacaaccccagtaattcctcctattttgtcgtttctcttccttctcctccactcctcacctgcctgaatcaactctctacgcaccaatcttcaactcaaaaaccaatcaaaatcaaaacccaaaccgtatcaagcattaacaattatccaaatcaacacacacattatcacgcactgatccacactatcaaactgtccaactatcaaaatatcgtattataactatcctaatcctagaacgaaaccatcaaagaaacgaccaacaagaagaagtcaagatcaaaagcataaagagcgaagtacaaagagacaaatgatgttctaaagacaaagatcgaaaaacgaagtattcagttattgttgaattgcccagtaaagtacgaataaataaacgtaaattatttgtaaaaatgataaacaaatttttggttcaactatttcattcatctaccaaggccaatcaaactggtcggaaaaaacgggggaagagtatcaggttttaattatattattcacagctcatcaaagcacaataaagtgtgtcgaaattgtacaaagattcgttctcgatttgatgagtaccccccatcggcatcatcgttgctggttcctcattaatcatggattgccatgaggaaaatgtacttgccatctaatatggacatttgcatacggaagctgcgtatctgagcacttggggtcgacttattaacaagtggctgggaaacaatttctgtgttgcgtggtgttggcactcattaagactacactgggcttaagtggtgcgtcttattcggctaattagggagaattatttatgcagcttcttgcacgactcttgacgggtcgtaaaccgaaactagccgcagcttaaacaaatagaaatacataaatctactagattactttcaaaatacattaagtttaaccggtttagacatcttctgaacctgccaagtt

SEQ ID NO: 36983 - DNA, 474 bp, DROSOPHILA
atggtaaatattctccttttttttttgcagaaattctttttgctattggctttggcccttgtgggcattgctgctggagctcagcttcctgactccgccacccagggacccaatcctcaggatattgccaccccggagccggagtacattgatatcgacgaacctgcaccggtggctgccgcacctgctcctcgtcctgtggccgctgctccccgtcccgtcttcgccgcccctgctcccatcgctcggccagttgctcatccagtggctcgccccgtggttgtggcccaatccttcgtccagcagcccgtccagcagcagattgtccagagggctcagtacgtggcgccggtggctcagcaggtggtgttgccgcaacagcagctggtgggacacacctacaacagcagggctggataccagtaccgccgtccagtctatgtaagacgtttctatcgcctgcgccgctactaa

SEQ ID NO: 36984 - protein, 157 aa, DROSOPHILA
MVNILLFFLQKFFLLLALALVGIAAGAQLPDSATQGPNPQDIATPEPEYIDIDEPAPVAAAPAPRPVAAAPRPVFAAPAPIARPVAHPVARPVVVAQSFVQQPVQQQIVQRAQYVAPVAQQVVLPQQQLVGHTYNSRAGYQYRRPVYVRRFYRLRRY

SEQ ID NO: 36985 - DNA, 2879 bp, DROSOPHILA
cgtctatatccaaatggcccggttgtcagctaagcggcgtttaggggtctcgcccctttggcagccggtattgggaattggcattcaatttttattaaatctcttaattcgaagtcatctcgttgcgttggcttttgtttttttttggcccgaccagggagctctttatggctgggagccataaacgtgttgggttttacgatcaccgctgcgtttgccaagtacttaaaatagtttttggttaggcaattattgggataaatagtttatcgtacttttggagttgttagactatttatttcgtatgcattagtcatcatgtacctaagaaatgtataacattattgatacatcactatcaggttttaattaaaatgcttaaagacaaaatgaaagacaaatcaagtgtgctattaaagtaacctaatgtttaaacatttaaactttaacccttttcaaaagagcatactcaattcgttaggggcttaattatttatttctgtctaatcttttcatggcacctttaaaagacttgccccatctctgggcaacattgaaagaggtcaactgtcgtcccattgccgatggctgcaattggcgattagcgattttggttcggtttgaacctttctgtaaccgacaccgatcaatccctataaatatattcaaaccaaaactcacatcatttttcatccaaaaagacagtaattatcgacactgcaggtgatgatcgagctgaactaaagctaaaaccgaagccgtttggctatttcggttgattggccgcaattagatttggaggtcagattgaaatccacatggatcccttgggggctgggtgacagcaatttgggtttgatatctttgaccttgaggatggggaaagagtgcgagtggtgtaatactccattttattttttgttaaaaatgcttttaatgtgtacagcttaaaactagatgcagtgcttgtggtttggttttttttcggtggttgattatcctaatgcctgaaacggcgaagtggaggcttgtagtggtaaccaggctcggcgtcgtggattggacttggtgcagggcccaagggcagtgcataggatggaatcggtatgtggaaatctacctcaggctggggtggcagatatttttgttcgggcttaggaggcagatacttctcgacgggctcggaaggtggcaggtacttagtctccggctcggcaggaggaagatacagcttcttgggagccactggtgggggtggaggtggtggtggcagactgggtgcaaccttgggtggcagataccttgccactggagcaggtggcagatacttcacctcgggcgtcggaggaggaaggtacttggactctggcggactgggaggcagatatgtgggcttgggcgccacaactggaggtggtggtggaggaggcaggctgggagcgaccttgggtggcagatacttggccaccggttcggggggcaggtacttcacttcaggctttgagggaggcagataagttgccttgggcggtggaggtggtggcggtggcagggaaaccttgggcggcaggtacttctggcgaggtttctctggaggtccatagctatatccgctagggatatcgaacttggcctcttgatgatgatgatggtggtgatccggctgatagtgcagatcaatgtgcagatcatgatgatcgtgtgacgagggagaatggtggtgggaatggacatcatagtggtggtgatcatgatcgtgatcgtgatcatggtggtgatggtgatcatggccgtgatcgtggtaacctcctccgtacaggtgggacacgtctgcccgaatacagatggcaaagcctgccagagccaaaaggatcagcatgggtttctgtaaaataaccaacctcctgttaggtcatctttattagagaatatgccgctactgtttaccatttcctttaagagataatccaccgatcgagatgatgttgctgccgtttgatgacagcaggtagtaatgtcaataacgtcgatggtcaccgcttttatacaaagatcgcgccttcctcgaccggctggctatttggttttcttcacacttttcttggttttcatgaacttgaggtcggccaattatcggcgtgtgttatctccctctaccccaaaacaattaatgcgatttcgaccaaattagctctgcacaacaaagcagctcatgaatatgcagcggatgcgacgaaatcccagacaattgacggtgattgactcggccatctgtaccacttttgtcccatcccaataaatatttgggagataccgatgctaatggggttaacaaaacagcgtttattgagatggctttaaccttatataaacctaagcctagtggaacgatttaaaacaaaactaatccggggaaatcttccatgttcagttcgatcgcgattttgctcagaaggtgaactcttgggcgggcacatcgtagtggtaacccggttccggttgtggtggtgggggtggaaggtacgtgggcactggcgtgggtgcaggtgtcgttgtggttgtagtggtggtggtggtagtggtacgcggtggtggaggtgggggaggaaggtaagtgggagcaggagtgggagcgggagtggttgtcgtggtagtggtagtaggtggagggggaggaaggtaggtaggagcgggagtaggagccggagtggttgtggtggtagttgtggttgtgggcggaggaggaggtaggtaagtgggtactggtttgggtggcagataagtcggtggtggcggtggtggctccgtcgtcgaggtaatcacaaatggtatctccggcttggggtagtcatagccatagccatgctcatgatgctcct

SEQ ID NO: 36986 - DNA, 828 bp, DROSOPHILA
atgctgatccttttggctctggcaggctttgccatctgtattcgggcagacgtgtcccacctgtacggaggaggttaccacgatcacggccatgatcaccatcaccaccatgatcacgatcacgatcatgatcaccaccactatgatgtccattcccaccaccattctccctcgtcacacgatcatcatgatctgcacattgatctgcactatcagccggatcaccaccatcatcatcatcaagaggccaagttcgatatccctagcggatatagctatggacctccagagaaacctcgccagaagtacctgccgcccaaggtttccctgccaccgccaccacctccaccgcccaaggcaacttatctgcctccctcaaagcctgaagtgaagtacctgccccccgaaccggtggccaagtatctgccacccaagcccacatatctgcctcccagtccgccagagtccaagtaccttcctcctccgacgcccgaggtgaagtatctgccacctgctccagtggcaaggtatctgccacccaaggttgcacccagtctgccaccaccacctccacccccaccagtggctcccaagaagctgtatcttcctcctgccgagccggagactaagtacctgccaccttccgagcccgtcgagaagtatctgcctcctaagcccgaacaaaaatatctgccaccccagcctgaggtagatttccacataccgattccatcctatgcactgcccttgggccctgcaccaagtccaatccacgacgccgagcctggttaccactacaagcctccacttcgccgtttcaggcattag

SEQ ID NO: 36987 - protein, 275 aa, DROSOPHILA
MLILLALAGFAICIRADVSHLYGGGYHDHGHDHHHHHDHDHDHDHHHYDVHSHHHSPSSHDHHDLHIDLHYQPDHHHHHHQEAKFDIPSGYSYGPPEKPRQKYLPPKVSLPPPPPPPPKATYLPPSKPEVKYLPPEPVAKYLPPKPTYLPPSPPESKYLPPPTPEVKYLPPAPVARYLPPKVAPSLPPPPPPPPVAPKKLYLPPAEPETKYLPPSEPVEKYLPPKPEQKYLPPQPEVDFHIPIPSYALPLGPAPSPIHDAEPGYHYKPPLRRFRH

SEQ ID NO: 36988 - DNA, 2574 bp, DROSOPHILA
ggtggcagatacttggccaccggttcggggggcaggtacttcacttcaggctttgagggaggcagataagttgccttgggcggtggaggtggtggcggtggcagggaaaccttgggcggcaggtacttctggcgaggtttctctggaggtccatagctatatccgctagggatatcgaacttggcctcttgatgatgatgatggtggtgatccggctgatagtgcagatcaatgtgcagatcatgatgatcgtgtgacgagggagaatggtggtgggaatggacatcatagtggtggtgatcatgatcgtgatcgtgatcatggtggtgatggtgatcatggccgtgatcgtggtaacctcctccgtacaggtgggacacgtctgcccgaatacagatggcaaagcctgccagagccaaaaggatcagcatgggtttctgtaaaataaccaacctcctgttaggtcatctttattagagaatatgccgctactgtttaccatttcctttaagagataatccaccgatcgagatgatgttgctgccgtttgatgacagcaggtagtaatgtcaataacgtcgatggtcaccgcttttatacaaagatcgcgccttcctcgaccggctggctatttggttttcttcacacttttcttggttttcatgaacttgaggtcggccaattatcggcgtgtgttatctccctctaccccaaaacaattaatgcgatttcgaccaaattagctctgcacaacaaagcagctcatgaatatgcagcggatgcgacgaaatcccagacaattgacggtgattgactcggccatctgtaccacttttgtcccatcccaataaatatttgggagataccgatgctaatggggttaacaaaacagcgtttattgagatggctttaaccttatataaacctaagcctagtggaacgatttaaaacaaaactaatccggggaaatcttccatgttcagttcgatcgcgattttgctcagaaggtgaactcttgggcgggcacatcgtagtggtaacccggttccggttgtggtggtgggggtggaaggtacgtgggcactggcgtgggtgcaggtgtcgttgtggttgtagtggtggtggtggtagtggtacgcggtggtggaggtgggggaggaaggtaagtgggagcaggagtgggagcgggagtggttgtcgtggtagtggtagtaggtggagggggaggaaggtaggtaggagcgggagtaggagccggagtggttgtggtggtagttgtggttgtgggcggaggaggaggtaggtaagtgggtactggtttgggtggcagataagtcggtggtggcggtggtggctccgtcgtcgaggtaatcacaaatggtatctccggcttggggtagtcatagccatagccatgctcatgatgctcctccaggagttccagcggcaaatgcgaaacatcaccggctgcaaaagccagcagacaggtagccaaaatgaatagcttctgaaataggaaagaaatcgtgaagttcagattgcttctcatatctacaactgaccacactcaccatctcctttatgatatgtctaacaccttgagctcttaaaccacaaatgattgagcgtttgcatccacgtcggtttatttatagtcaaaattctaaaacagatcgatactgtccatggcgctctagaggccaattattatcatttaaatcgatataacaccgctagccccacggcattctttgtatcggtaaatgtatctgtatctgtagcgctctccgcagccatgtttatatgaatgattagcgccacaatagtgcgccgaagttgacagaggagcagcgtcaacatcgccaactttgtttcggaactattatgcctatatggggccctactgagccgtttttcatcaacgtcgtcacttgggttttcattgttacggtgttaaaggtatgaccaaacttccgacggaacctggggcacaaaagcttagcacacagaaaaacagtcataaattcataaaaattctgagcagattttgaatcaatttgaaataagtaatcagcgagtacttgcattctgatatgggttgctacatattttaaatgttaattaatgaaattcattcatacatgaaaggtacatgcacttaatgttatttattttaagctagtcaagctaaattttctctcagtgcatctgaagaggtagttccgtcgctggaagcgttgtaagcgtgctctgctggctgtcataaatcatttagacttcatttataataattatggctcgcgctgccttttgcaactcaagaagtttgagtggtcagagtttcatggacagatggacaatgaagctgtctgctggacatgatcttgcggaagcaattcagttacagatcagtcgagttatatagcagaggcggagaagatggtaaggagcttaacggccacggagaacaaggaaaattaagactattttcaaactaacatttttttaatggtggtagtcagaagatatcgaaatagttttaggagaagacctatgtttatagtgaatgaaatt

SEQ ID NO: 36989 - DNA, 519 bp, DROSOPHILA
atggtgagtgtgaagctattcattttggctacctgtctgctggcttttgcagccggtgatgtttcgcatttgccgctggaactcctggaggagcatcatgagcatggctatggctatgactaccccaagccggagataccatttgtgattacctcgacgacggagccaccaccgccaccaccgacttatctgccacccaaaccagtacccacttacctacctcctcctccgcccacaaccacaactaccaccacaaccactccggctcctactcccgctcctacctaccttcctccccctccacctactaccactaccacgacaaccactcccgctcccactcctgctcccacttaccttcctcccccacctccaccaccgcgtaccactaccaccaccaccactacaaccacaacgacacctgcacccacgccagtgcccacgtaccttccacccccaccaccacaaccggaaccgggttaccactacgatgtgcccgcccaagagttcaccttctga

SEQ ID NO: 36990 - protein, 172 aa, DROSOPHILA
MVSVKLFILATCLLAFAAGDVSHLPLELLEEHHEHGYGYDYPKPEIPFVITSTTEPPPPPPTYLPPKPVPTYLPPPPPTTTTTTTTTPAPTPAPTYLPPPPPTTTTTTTTPAPTPAPTYLPPPPPPPRTTTTTTTTTTTTPAPTPVPTYLPPPPPQPEPGYHYDVPAQEFTF

SEQ ID NO: 36991 - DNA, 2291 bp, DROSOPHILA
gctgccttttgcaactcaagaagtttgagtggtcagagtttcatggacagatggacaatgaagctgtctgctggacatgatcttgcggaagcaattcagttacagatcagtcgagttatatagcagaggcggagaagatggtaaggagcttaacggccacggagaacaaggaaaattaagactattttcaaactaacatttttttaatggtggtagtcagaagatatcgaaatagttttaggagaagacctatgtttatagtgaatgaaattatgaacaagtctggaaacatttaattttattcttaaggaatacttaaatattattgtttgaacagtttagacacggtgtttacaaaactaaaaaactattttaaataatgtctggattatttagaactctctattgattggagaccagccgccttaagttgactaattagttggattagcgtcttcggctacgattgtataaacaaacagacgatactggtccagattcaactatcacttttatttgaccgcatgccaaaaaatcaatgggttgttgaactgcatagtagagatcgaactgatcgattgtcaagtgccggaattggatggcgtgtgctgaaccatcctcgtttctgctcgcctttggccaaaatgcgagtaatttatgccgattatggaattaattgtcgttttttatgggcattcatctcagcgttggctaggcctcagcagttttgatctatcgcaaatctctgcgaatttcgtgattcctcaaccggtttggattagaaatatttggtcgagcagagacattttgtgctttttatgaatacactactctaagctgtgaatctcgttctgagccacgtccaaggcaatgagtttttggaataagccctgtccaagggcctgaattgtgaaaggaacgccgttagatttcgatttgattttattgtttattatctttacgaaactttggtacaaattggaattagtaagggtggaatttagctcttaaagcgccgactgggcacctggtatttgtatccatggattttcttggaggcagttgtgccggctgttgttggttctactggttcctccagatcttcagcctggccgagttccgcatcggagggagccactgggatggcatcctgggggaattcctcgcccgtaggaaactcgttgttcacctccagctctagttccgtgactttgggtacatcgtaaacaaatccattgccagatctcaccaactgggagacatctgctcgggcggccagacaaattgccataagcatgaaactgaataccaaaaagcgctatagagaaaatatataaaataatttgtttaaaaattataaccaaagttcttgtgagcaaaactagaagtgtgtattatctacaatagattataatcctaaaaacaaattatgataattttctgcattaaatagactcactattggaaaaaatccagttttggttgaattattaacaaaaaactttaaatagtcgatatatgatggaagtgcaaatttgatgaacaattatcttaagcttatgttaagcagggaacatgttctccttttttttaagttaaatgctccaattgcagtaactttgagataaatccaaattagtggtggttataagctactaaagacgatggcttaccatgatgttagatgatctttagctgggtataacttgaaagggaaacctttaagaatgccgtaatagttgtcgctaccaatggagcgttgctcaagcgaatgcaggcgccggcgatcgagcccaaactatttatacttctatatgttcgccacatttgcctcattttattaattgcgccaagccgatcgtgatgactgtgctgaagccaaaacataaaccgaaccagtggaacagtgagcggccctagataaacaaacaaacgaatcgatgtcttgggccaaatggtggtgctaccgcttcggcagcgggcactccactcaaaatgctacaacatctccatctccaaccacatcgccattgccaaggctaagacttgttttgtggggtcaagtgtcagtgcgttgcttttgtctctggcgcatttgtttgtcgatttgtatacgaactaatgattctgacagatcagtgtttgctcccatccacgtgatccgagtggctcctcacgtcttatattcaattatgcagccctgcccgatgcccggcggagcatatgtataaagcgcataaaagcgtcgcttcaacacgtttccgtttcattggattttatggctgcaaaac

SEQ ID NO: 36992 - DNA, 291 bp, DROSOPHILA
atggcaatttgtctggccgcccgagcagatgtctcccagttggtgagatctggcaatggatttgtttacgatgtacccaaagtcacggaactagagctggaggtgaacaacgagtttcctacgggcgaggaattcccccaggatgccatcccagtggctccctccgatgcggaactcggccaggctgaagatctggaggaaccagtagaaccaacaacagccggcacaactgcctccaagaaaatccatggatacaaataccaggtgcccagtcggcgctttaagagctaa

SEQ ID NO: 36993 - protein, 96 aa, DROSOPHILA
MAICLAARADVSQLVRSGNGFVYDVPKVTELELEVNNEFPTGEEFPQDAIPVAPSDAELGQAEDLEEPVEPTTAGTTASKKIHGYKYQVPSRRFKS

SEQ ID NO: 36994 - DNA, 3524 bp, DROSOPHILA
atatggagcctacctgaaacattcatcagaatgagtgaaaagaaattttacacttaacgtgtttcactgctacttcaccgtgttttccgaccatgtgtgtggttgtcagccatgttattattgctttctggtttcctttttttatatgcacagaaaaaagtacttcactaaatgaactttcgatgatatgtacgtttaaggtttctttggaaaataatgaaatgtgtttgattatcatggaaactgatttaacaattctgattttgtcccatttttgagatttctcgggatataacaaggctaagcccttttctaaataataaatatatctaataattgtgtcacactgaatatttttctcagtgcatatatttgcttaacagcttcttgcgggcttggaactctcattcattcagtcgctcactcacagtaaatgctttcagacgccacaacttgacgcggcctgcgttccgggtcccatgtcctgaatcccgctggtggccaggaccgtgttagctgtcctccttggacttggcatttgtcgccgaaatcccctgtccttgcagaccggcctaatcctgcgagggacactgcgaaaactacaaacgaaaatagcagaaaaaaaaccaacgtgtccctccatttttagtttagtttgttttggttttgttttcccggattattggcaaactcaggcctggagaaactttcataactgtcagaaggagcaacccgcctccacccacctggccattttttcagtctcctttcggtgcctttgctctgcgcctacttaagcttttctttacatttcctttctactcttttttctcaagtatttcaagtgtttctcctttacttcttcgagttttgaaatatttgcaccatggtttgctttgaatggcttgcaattgaaaattgtcatttaatggaaaaagttggggaaataatgcaaagggaaccaactttagtccaggggttaaaacaatattattatgcgatgcacttcattgtcattcgctttcattgcgttggcatcagttagatattcgtttgaagttggcaaaaatacgttactcattgttccccttttaatactatattctaaaactttaattattgtgccagtatatttaatttaatagccctagaaatttaatttatttgttaaaatatatttatggaattttatacttaaattttatgtgtatcccatcgtacagccatcaaccaagacactcgaaacttttgcttcattgaaatagtttttcatttacttgccttttgctgaaatgtgcaacaaagtcaagggggcagtggcaaaccacaccagaaataaagaaaaatagttggatgagtagtggtcgagaatgaaaatccataattcaatatgcagctacagtgacctcgataagtataccacgagcagtggtcagttggctagggtcaaaaccgcaactggtgctgtttaatgagtagtaagtcatcatcagcagcgacacacaggatgattgtgtgggtctgtttaaaaggacaggctaattagcaagaagtccttcaccacgctcgttcctctttcattttcaatcccatttcaatttgtcacatttttttccccttgcagagtacaataacgagccgagtggtactggagcgttggccggcagcttcgataagtcggtgctgcaaatttccgactggctgacttgggaacaaaacatgatcaagatacagagcgtgctcgtcgacgatggcgatgcagtgcgactggccatcgagaagcaggaggtgcgccccatgaaattcaacacacccattctggttcacacccatatcctattttctcacatcacatatatctcccgttcacagaaagtcctgcgtgaattgaaaatgaaaaagccgcagctcaacgaactggttcacacagcggaagtgctcaaaggcgacgtaaaacggcaacaactgcaggaaaaaggtgagtcctttaagaactatgggggttttaaatgcattgagtttggtatggcattttcaagagggtaacttcttaagatttctgatgatcatcaatcttctgcgccgtatctataaatttattttattttatttttttatttattttattttatttatttattttattttatgtgtgtatagaatttatagaatttcttttattttaagtgtgagttctgtgatttattacaaatctaaaatgctgaataattatctaagaagcattataatttctaatgcataacttattattcgtcaaatttagatcttaaatctttgccaaccacaatgtcgacttaccacttaactctcgcaaaagtaattattttatctaaggcattgattagactctgcaaatagttttgcatcttgcccattcgtgagtgtattttcgaatctcaattaatttctgaatgaaattgtgcaaattggctcacatatggaaatttcattaggccttgttagctgctctgtctccgctgccaaggggattggatacggctgatggctgtacaacacggatccatttcctcttttggaaaacccccggtagcgaaacccagaaatcacttcggtgcaaacaaatttccgccggtcgagacaaaatgcatgcaaggatatgggtaggtgagcgtatgaatgtggaaaagtgggaaaggggaaaagcgagacatttgagttttgtactgaacagcaacagaagccagcgaatggccacttaaattttgctaactcagtcaggggaatgttttcgaaggggattcgggaagagaagcggtggcagtgtggttaaaaggactgtcaacatttgcataagggggccgtgaacctcggtagccggtttgtttcaattcgaaaacgttctctttaaactggctgactcaaaacaatgtcaagaataaatactcacactaaggtggacaaaagagggagagagagagagtttcgcttgcttgttaaacaaatgattgcatactttcaggtcgtggtgagtcctgcagtttgacagccactgtattaagagcatttgcgggtaaagagctctccgttgagagaaaagtctcattcccatacatgctctcccgtttttatttgctttattttctctgcggaattttaatgtggcagttgagcaagcggcatgcaacatttatgccagttgacatttaattgacaagcgaggcagccggcggggaaaatgggaaaatatccagccagcaggatgctaactgaaatattttcatgctctttgggatcggggtggcatttcccggggggtggtgatgttagggcgagaggagccagatgagctgggagttgcctgcactgcttgttacacattattatgatgtttggtttgtcataaacatttgtaacttgtcggccacgttctctcatctcggccatttgtacgtgcatttctgccttatttttttcctgctttaagtgtgtgtttgcctctgtgattgtgtatatgtgtgtggagagagggggtcggaggaggg

SEQ ID NO: 36995 - DNA, 393 bp, DROSOPHILA
atgcacttcattgtcattcgctttcattgcgttggcatcaagtacaataacgagccgagtggtactggagcgttggccggcagcttcgataagtcggtgctgcaaatttccgactggctgacttgggaacaaaacatgatcaagatacagagcgtgctcgtcgacgatggcgatgcagtgcgactggccatcgagaagcaggaggtgcgccccatgaaattcaacacacccattctgaaagtcctgcgtgaattgaaaatgaaaaagccgcagctcaacgaactggttcacacagcggaagtgctcaaaggcgacgtaaaacggcaacaactgcaggaaaaaggccttgttagctgctctgtctccgctgccaaggggattggatacggctga

SEQ ID NO: 36996 - protein, 130 aa, DROSOPHILA
MHFIVIRFHCVGIKYNNEPSGTGALAGSFDKSVLQISDWLTWEQNMIKIQSVLVDDGDAVRLAIEKQEVRPMKFNTPILKVLRELKMKKPQLNELVHTAEVLKGDVKRQQLQEKGLVSCSVSAAKGIGYG

SEQ ID NO: 36997 - DNA, 3165 bp, DROSOPHILA
taaaatgattattaattaataattattgaatgtaagcattcaagcacacacgtatgctagcgtcccattgtttatgcaaattacataaaaatttctatatttaatttcctgtttttttttttttaccaaaaataattgatatgctttgtggttttattacagcacacaaacgttcacataattgaaatttaatatcttttactggctaaataattcgaaaattggcgaacaaaatccaaaccaaaactcttgaaacagcacgtacaagtttttgtttcattgtaattctattctatgcgtatgtgcactttcatttaaattgtctgttgatttacatttagcgttttaaaatttttatgtgcaacttaaaaagaaaaatttcttaggctacaatgcattttggtgcaagttacactcgtctctatatatgtttaataactaaaaatacaaaggacatcgatgtttcccgatgtttttcctacaccatttccgttttttgtttatgtttttataggaaaatggcagccagataccaaatgtgccatgtcaatggcacttttgacattttatgtgaatgttttcggtgttaacttacccagtgggaggtgggtggccatgccatgttccccatgttgtagaccccttttctagattccacaacagatgcagacatatgttgttgaatacatatttggcatgccagctacttggggttatgtggcagaagttaaggaaggaattatttagtaaaactttcgctttgttcaaatcgttttatatatatttcaattatattatagagtttttgagaagttgaccacaatttacatattataaaatccaaattgttgaatatattcagacaccacatcgaagtctcatatctctaaccagcaggagtgcaggaggtgtagagatctctcatcctttggcaatcctgctagctaagctacaagaaattgcttttgtgaccagtagccatgggtttttcgtaatgggatcagttcatctgcgtcgatatacgggccatatttctggtcatggtaacctgatcgttagatattttgaccaggccctgcgatcgcatatacctctccatttctaaactagctttttttgcgtaacgcacacttttgtcgtcaacctcctggtttgcatttggggccgccatcatcacatcgctcattttgcggccgtatttcgcaatggtgtactccccctcctgggaaatcttgcgtcgctctgcgaaactcagctgcggctcctggaattcctcgctaatcgagcacaacgtgctgtcgatctgggttaaccgcgggctcacaccatcaccgaccaggtctccatctggcggtgctccggggcggtgtaaaaactccgattctcgactttccgcgggcgttgccagtaggaccttccttttcccctttaacctcttcggcttcaccaggtttggcattgaatgttcgctcatatcggttgttttccataacatttcgtttatgtcggtcagccgccggcccagtactctgggattcaaggccacgcctttttttggatgcggagtgccaacggcaactatatccttgatactcctagtcagcgactggcgacgaaatacggatacagaaggctaaagaaaaagtgcaatggttacagtttcacgattttaactggcttgaaataagttcgtaaataattataaacaatactccttgaatgtgttgctaaaaattaaatgttgtttgaaatcatgcaaacattaccttagattttggcagggtcttcgacctatgagagctcccatcgctgatacttggacttccgtcgtccggcctttccggtctttctggcctttccgagcgtgaattgtttcgattatcagaaccagtacgcattatgaggcgggcctttagtaaactggcatcaactccttgctgcgcgcgaggatatggagtcgacgacttattagaggacttcattagcccatagtccctggaagcgatgggtaggggctccacggatttgaatttaagcttcggtatcctcaagagaacagatagttcccggtcaaccagattcaaggggtcatttagcgagttgtgcggcctcctagtcccactcccaatttcttccctgaacgaatctttctttgaatttcgcatcgcttcagtgttttttgttgtctaacgatttttttttatgaattgttttatttttcaactgtttttctttttattttttgagtgtatggtttttctctggaaaaacatgacaaatatctaaatggtaattatatgtgtttcttttaatttgtttcttttccaagtgaaagactacagttttaaagccatgtatgcaccgcttgacaaaagctggatgctgccgaactaattttggtgtgttgcaatgcctatagatgtcgctaaaagcgatgtatttgccgaatgtagacaactttgtttataggcttaaataacaacaattaaaaaaaaaatggaaccaagcttatttgctttataagtgatatggattatatcttaaattcaatttttatgtaatttaaggctaaaaagaaaacaaatgtgcgtaattctacaataatttaacatatttttaagcttgaaggatataattttggaaatttccgctttgtgcaagcttttcctcctgagcttttcaaagcttttttcgatttaaccgtttttatcagctgttggacacaaagaaggaaacatttgaaaataaatcgttcagcggcaaggaagtaaaaattctttaaggtggaagtgatacttataatgcaatacgacagaaaataataataaatgtgaaaacctgagtgtaaattagcgcaattcaaattaaaaaaaatagctggaatactattttaactttaactttaacttcaaaattaaaaattaaaaattaaaataaaacggaacggcgcgcaaataaatggaataaatcatataaaaaatgcaaataaaggaatggaatgaaatctagagatatttgtgagatataaataaataacaaataatcaaggtgctgagtcgtgtaacttgtaggtgaataccaaaacagcgataaacatttaccatataatataagtaacaaattaaagcccatcaaggtcatccatcacttaaagtgaaaacttta

SEQ ID NO: 36998 - DNA, 1032 bp, DROSOPHILA
atgcgaaattcaaagaaagattcgttcagggaagaaattgggagtgggactaggaggccgcacaactcgctaaatgaccccttgaatctggttgaccgggaactatctgttctcttgaggataccgaagcttaaattcaaatccgtggagcccctacccatcgcttccagggactatgggctaatgaagtcctctaataagtcgtcgactccatatcctcgcgcgcagcaaggagttgatgccagtttactaaaggcccgcctcataatgcgtactggttctgataatcgaaacaattcacgctcggaaaggccagaaagaccggaaaggccggacgacggaagtccaagtatcagcgatgggagctctcataggtcgaagaccctgccaaaatctaagccttctgtatccgtatttcgtcgccagtcgctgactaggagtatcaaggatatagttgccgttggcactccgcatccaaaaaaaggcgtggccttgaatcccagagtactgggccggcggctgaccgacataaacgaaatgttatggaaaacaaccgatatgagcgaacattcaatgccaaacctggtgaagccgaagaggttaaaggggaaaaggaaggtcctactggcaacgcccgcggaaagtcgagaatcggagtttttacaccgccccggagcaccgccagatggagacctggtcggtgatggtgtgagcccgcggttaacccagatcgacagcacgttgtgctcgattagcgaggaattccaggagccgcagctgagtttcgcagagcgacgcaagatttcccaggagggggagtacaccattgcgaaatacggccgcaaaatgagcgatgtgatgatggcggccccaaatgcaaaccaggaggttgacgacaaaagtgtgcgttacgcaaaaaaagctagtttagaaatggagaggtatatgcgatcgcagggcctggtcaaaatatctaacgatcaggttaccatgaccagaaatatggcccgtatatcgacgcagatgaactga

SEQ ID NO: 36999 - protein, 343 aa, DROSOPHILA
MRNSKKDSFREEIGSGTRRPHNSLNDPLNLVDRELSVLLRIPKLKFKSVEPLPIASRDYGLMKSSNKSSTPYPRAQQGVDASLLKARLIMRTGSDNRNNSRSERPERPERPDDGSPSISDGSSHRSKTLPKSKPSVSVFRRQSLTRSIKDIVAVGTPHPKKGVALNPRVLGRRLTDINEMLWKTTDMSEHSMPNLVKPKRLKGKRKVLLATPAESRESEFLHRPGAPPDGDLVGDGVSPRLTQIDSTLCSISEEFQEPQLSFAERRKISQEGEYTIAKYGRKMSDVMMAAPNANQEVDDKSVRYAKKASLEMERYMRSQGLVKISNDQVTMTRNMARISTQMN

SEQ ID NO: 37000 - DNA, 3126 bp, DROSOPHILA
gtgatccggatcagtagtatatatatatatatatatatacgctgattttccatgaatccggtatacccttcaccctacgattcccatgagtctctaacgatactctccgcatccaaacagaagtcagtcgtcggaagttgttcaaacgctttctttcttttcctaatgccccaagggagataaactaatagcaacagattccccatgtttgcactgtattaccgcattatagcctgcactcagaatcggctatataccacctgctcgttctacattgtcgacatcagttgatgattcgcgatagcagcagttttgtgtgccgaaatggatctccaaagtgtcctagagaaatgcggcaactttggcccttatcaaatcctccttctgggactctttggatacaccaacattgtgtcctccctgcactacttttcgcagaccatcattagtttcacgccatcgcacaggtagcggcatatttgtgataaaaaaaaattatgaaatttattaacgcgatggcgggctttacactttgaaaatcttcaatttaaatagatcatgccacttttatttaaataacgttccattcacgaaatgtatattacaaagtttcctttcgttttagatgttctcggccagaagattatcaaccaaattccacttccctgctgtcctgcagtgtcatgcagttcgataaagaattcaagtgtacctcctgggattttgaaagagaaagcaactacgagagtatcaccacagaggtatgtttcagcccaaaagtataaaactgattttttaatcaaacacacccggtccgaaatattgaacacagctggagtgggtgtgcgacgatgcctacaaactggcggtgggtcagtccttcttcttcattggatccgcgctgggaagtatattcttcggatacttggccgatcgcataggtcgactccctgcctgcgttctatcgaccttgacaggagcctctggagatttctttacctccttcgtgggaagtttgccctggttctcgttcacccgatttatatccggtctgtttatggacacccagtatgtcctaatgtacattttgggtatgtacattcaacaattttcattaatagtttagaaaaactcaaccctttttacagttttcgagtacttgagtccacaacaccgcaccttcgggctaaacatcatcctcggcgtattctattgcgttgggctaatgatatctccgtggatagctatttgggtgactaactggcggaattacctctgggctgcatcacttccagcgttgggaatgctactatttccagtgtttctccacgaaagcgccgagtggctgctgacaaagggaaaattcgaaaaggcagaaaaaagtcttcgaggtgtcgccaagtttaatgggcgacaagttgatgactctgttttcgatgagtttattaagcactaccgcgaaaagctaaacaactcacagaataaatcttcggatacctttatgggtatgttaaggactccaagactgagaaagttcaccattattctattgatcaaatcgtgagttaaaatgagatatgttcaatatgttaaaccatcttttatattatttcagaatgatcattacaattgcattcgacatcctgagtcgcaatgttgaaggcgtgggcatatcgccattcaagctcttctcctactctggattctgttacctgcctgccggcctcaccattatcctatttcagaacaaaatcgggcggaagggcatggcatgcgcctccctgttcgtgggtgccataatcacggcggctactggctacttggtagccactttggatccatcagactactctgttcttttgggcttcatggtcagtctgggaagatatggagcagtggtggcctacgatgctgaggcccagtatgcagctgaaattattccaacgagtgtgaaaggacgaggagtggccaacatccatgtggtgggcaatgccttcgcgttcttcagctcctacatcatctacttgggaactttctacaagccattgccatctcttatgatcagtttcattctgcttatcggcgcttgtttgtgcctggctctgcccgagactttgcacaagtaagtcttctacattccgaatacattaaattactaagatatttataatattttgttggcagaaatcttccgcagaatctcgaggagggcgaaatgtttgcgaagggcgagaaatggtacttctttccctgcttttcacgcagaccaaaaactcagaagtctgcgactcaattggagtcatccgacggaattacaaataagttataagtttttattcaaaatacaaatacagattacaaatcgcatcaaaacatgtttactgggctcttagttatatggacagttctagacaaattctgtttggacaagaattactaattatatggtttcggacattcataaacgctaccaatttcaccatattctggtttcatttctacaactgaggtctttgttatcccaggcccagacatttatttctcataatgcatttttatctggcctgtctacacttaattagcttctgccagacttttcgtagttccggaaatattacaacaaaaagccaataaaattctaaataaatcaagttgtatagaatatgtttggtggatttacttaaattttacgaattcatagcgttgctataaaaacaagtcagaccacacgttttagcttaaatactcagtacaaaatatttattatgagtgtctagcaccctgtttaatgttactctgttgtcttaagtccgctcgagttcagcagttagtttatgaatatggaaagaagaagtcggagtgtagtaagtcggatcttttagttatttaaattgatgtttcctaattatgtgtgagcttttcaacagaaaagttttatgatactaacgagactttgtttgcgcagattaccctgtttctatttgccagacagctctattttactggacctcaaaacacccatggagataagtaagcccaaacttatgttgtgcggccgtcacattactaatcggcccatgggtctagaaagaatctctccacacgccaaacagacgccagacgtcg

SEQ ID NO: 37001 - DNA, 1260 bp, DROSOPHILA
atgcagttcgataaagaattcaagtgtacctcctgggattttgaaagagaaagcaactacgagagtatcaccacagagctggagtgggtgtgcgacgatgcctacaaactggcggtgggtcagtccttcttcttcattggatccgcgctgggaagtatattcttcggatacttggccgatcgcataggtcgactccctgcctgcgttctatcgaccttgacaggagcctctggagatttctttacctccttcgtgggaagtttgccctggttctcgttcacccgatttatatccggtctgtttatggacacccagtatgtcctaatgtacattttggttttcgagtacttgagtccacaacaccgcaccttcgggctaaacatcatcctcggcgtattctattgcgttgggctaatgatatctccgtggatagctatttgggtgactaactggcggaattacctctgggctgcatcacttccagcgttgggaatgctactatttccagtgtttctccacgaaagcgccgagtggctgctgacaaagggaaaattcgaaaaggcagaaaaaagtcttcgaggtgtcgccaagtttaatgggcgacaagttgatgactctgttttcgatgagtttattaagcactaccgcgaaaagctaaacaactcacagaataaatcttcggatacctttatgggtatgttaaggactccaagactgagaaagttcaccattattctattgatcaaatcaatgatcattacaattgcattcgacatcctgagtcgcaatgttgaaggcgtgggcatatcgccattcaagctcttctcctactctggattctgttacctgcctgccggcctcaccattatcctatttcagaacaaaatcgggcggaagggcatggcatgcgcctccctgttcgtgggtgccataatcacggcggctactggctacttggtagccactttggatccatcagactactctgttcttttgggcttcatggtcagtctgggaagatatggagcagtggtggcctacgatgctgaggcccagtatgcagctgaaattattccaacgagtgtgaaaggacgaggagtggccaacatccatgtggtgggcaatgccttcgcgttcttcagctcctacatcatctacttgggaactttctacaagccattgccatctcttatgatcagtttcattctgcttatcggcgcttgtttgtgcctggctctgcccgagactttgcacaagtaa

SEQ ID NO: 37002 - protein, 419 aa, DROSOPHILA
MQFDKEFKCTSWDFERESNYESITTELEWVCDDAYKLAVGQSFFFIGSALGSIFFGYLADRIGRLPACVLSTLTGASGDFFTSFVGSLPWFSFTRFISGLFMDTQYVLMYILVFEYLSPQHRTFGLNIILGVFYCVGLMISPWIAIWVTNWRNYLWAASLPALGMLLFPVFLHESAEWLLTKGKFEKAEKSLRGVAKFNGRQVDDSVFDEFIKHYREKLNNSQNKSSDTFMGMLRTPRLRKFTIILLIKSMIITIAFDILSRNVEGVGISPFKLFSYSGFCYLPAGLTIILFQNKIGRKGMACASLFVGAIITAATGYLVATLDPSDYSVLLGFMVSLGRYGAVVAYDAEAQYAAEIIPTSVKGRGVANIHVVGNAFAFFSSYIIYLGTFYKPLPSLMISFILLIGACLCLALPETLHK

SEQ ID NO: 37003 - DNA, 4162 bp, DROSOPHILA
aaaaactcagaagtctgcgactcaattggagtcatccgacggaattacaaataagttataagtttttattcaaaatacaaatacagattacaaatcgcatcaaaacatgtttactgggctcttagttatatggacagttctagacaaattctgtttggacaagaattactaattatatggtttcggacattcataaacgctaccaatttcaccatattctggtttcatttctacaactgaggtctttgttatcccaggcccagacatttatttctcataatgcatttttatctggcctgtctacacttaattagcttctgccagacttttcgtagttccggaaatattacaacaaaaagccaataaaattctaaataaatcaagttgtatagaatatgtttggtggatttacttaaattttacgaattcatagcgttgctataaaaacaagtcagaccacacgttttagcttaaatactcagtacaaaatatttattatgagtgtctagcaccctgtttaatgttactctgttgtcttaagtccgctcgagttcagcagttagtttatgaatatggaaagaagaagtcggagtgtagtaagtcggatcttttagttatttaaattgatgtttcctaattatgtgtgagcttttcaacagaaaagttttatgatactaacgagactttgtttgcgcagattaccctgtttctatttgccagacagctctattttactggacctcaaaacacccatggagataagtaagcccaaacttatgttgtgcggccgtcacattactaatcggcccatgggtctagaaagaatctctccacacgccaaacagacgccagacgtcggaaatggttcgcaagctctattccttcctcatgccccggtgtgagataaactagcagcagatattatgtgtttgcagagtattagccatatatccaggggccagaatggtgtatataccagctgctcgcccccttcgctggcatcagtcggtggtctgcgatcagagcggtttcttgtgccgaaatggatcttcagcgtgtcctggagaagtgcggaaacttcggcccctaccaaatcctgctccttggactctatggatacactaatatagtgtcctcgctgcactacttttcgcagactctgatcagtttcacgccctcgcacaggtgagaattttaaaagaccactttgcacaatataaaactttacgaaattttattgtaaaagttaattcctaaaaaatatttcaaagttgtcaatcgtggtaatagatattttaaatgtactttttcgaatcagttattcaaatccaatattaacctaaagaaattatatacaatccaaatcgggaccacatctaatttcacaataaaagaaatatgctcaccttaaatattttcaatcttaatatttcagatgttctgcgccagtggaagaattttcacagaatttcactgaactgttgtcctgcagtgtcattcagtatgatgtcgacatgacctcttttcgggataacaagtgctcctcctgggacttcgataaggaaagcaactacgagagtatcaccacagaggtatgtttcagcccaaaagtagaaaacccattttataatcaacactctcgtccgaaatattgaacacagctggagtgggtctgcgatgatgcctacaaactggcggtgggtcagtccttcttctttattggatccgcgctgggaagtatattcttcggatacttggccgatcgcataggtcgtctccctgcctgcgttctatcgaccttgacaggagcctctggagatttcttcacctccttcgtgggcagtctgcctatgttctcgttcacccgttttatatctggtctctccatggacacacaatatgtcctaatgtacattttgggtgagtttatataaaatatttatgttttatactctacattcaaacccatattattgcagttttcgagtacttgagcccacaacaccgcacctttggtctgaatatcatcttgggtgttttctactcaattggactaatgatctcgccctggatagcaatttggctgggcaattggcgtagttacctctgggcggcctcccttccagctctaggaatgttaatttttccgctgttccttcacgaaagcgtcgagtggctactaacgaaaggaaaattcgacaaggcagttaacaacctcaaaagtgtcgccaaattcaatggacgccaagtagaagactctgttttcgatgagttcatcaagcattatcgagagaagttgaacagtgcccaaaagaaatcctcagatacctttatgggtatgttgaggactccaagactgagaaagttcacaattattctattgatcaaatcgtgagttgcaatgatactgagatattttgaaaatgttagaacttcagttatattatttcaggatgatcattacaattgcattcgacatcctgagtcgcaatgttgaaggcgtgggcatatcaccattcaagctcttctcctactcaggattcgtcgtccttcctggtggtctatccattatcctgttccagaacaaaatcgggcgaaaaggcatggcctgcgcctctcttcttgttggtgccttcatcacggcgaccaccggctacctggtgggcactctagatccagcaaactactctgtactcctgggattcatggtgtgcttggcaagattcggagcggttgttgcctacgatgcggaggctcagtacgcggcggagattatacctaccagtgttcgaggacgaggagtggccaacatccatgtggtgggcaatgccttcgctttcttcagctcctacatcatctacttgggaacattctacaagccattgccctcactgttgatcagcttcctcctcattataggcgcttgtttgtgcctaactcttccagaaactttgcacaagtgggttttcgataacttattccatatattcatatataataactattttatcctgcaggcaactaccacaaactctagaggagggcgaaatattcgccaagggcgagaaatggtactttttcccttgcttttcacgcaaacggcagtcgaataaatccgaatctcagttggagtcagccaacgaaattacaaagtagttatagtaaatgtattaagaatataataaatgctaatgccaaagagtacagagtaataacaaaacatgtttactagtatcttaagttgtgtggatggttactaagacaataatcccatgttttattggcccctgataatacaaaaagtatctgatttcatcatatactgaccgcatctctagaactcagatatattaatcccaggctcagacatttattaagcttcgtagtgcccagttactctcccattcggttcgtttaaacttaattagcttttgtctacgacttgatttatatagatcacgccaatggttccggaacttttactagccggcgagataatggaattctggagaggcttttgtttggcgcctgcgagaagtagacctgtaatctatactatatataatctatatatctaaacgagaacccattaaagtgtccagccacaaacaacgaatccgtatatccggcaaatcccccccccattaaaaaagactccatttcaggcgtgacttacagcacgacagtggttaatccgtcataaatctaagacaaagtaaacaaacggaaagaagccaaatttttcgagaaagtccgtcacttgaccaagttaaatgcctgataaggataggaaaacgcatttcagaaaagccctatttacaaagaaaccagaaatcaaggtcatgtatcgctaagtttgactgaagagcatgttgatacagtttatgctgatccacatttaatcattataaacatcaattgtatgctaggtaaacaaataacttctgtatagggttgttcgttcacctgttccgtagactgtttactctggcctcagcatctgcatcttatcatcggcacacaccccaaaaagcgagagattgcctagcccaatctcggtgttactaattacccatcctaatcagcgacaacgcctatatctttatactatataaggcagctgccgatcctagtaggtgtcaaaatactgctcgtacaggca

SEQ ID NO: 37004 - DNA, 1665 bp, DROSOPHILA
atcagtcggtggtctgcgatcagagcggtttcttgtgccgaaatggatcttcagcgtgtcctggagaagtgcggaaacttcggcccctaccaaatcctgctccttggactctatggatacactaatatagtgtcctcgctgcactacttttcgcagactctgatcagtttcacgccctcgcacagatgttctgcgccagtggaagaattttcacagaatttcactgaactgttgtcctgcagtgtcattcagtatgatgtcgacatgacctcttttcgggataacaagtgctcctcctgggacttcgataaggaaagcaactacgagagtatcaccacagagctggagtgggtctgcgatgatgcctacaaactggcggtgggtcagtccttcttctttattggatccgcgctgggaagtatattcttcggatacttggccgatcgcataggtcgtctccctgcctgcgttctatcgaccttgacaggagcctctggagatttcttcacctccttcgtgggcagtctgcctatgttctcgttcacccgttttatatctggtctctccatggacacacaatatgtcctaatgtacattttggttttcgagtacttgagcccacaacaccgcacctttggtctgaatatcatcttgggtgttttctactcaattggactaatgatctcgccctggatagcaatttggctgggcaattggcgtagttacctctgggcggcctcccttccagctctaggaatgttaatttttccgctgttccttcacgaaagcgtcgagtggctactaacgaaaggaaaattcgacaaggcagttaacaacctcaaaagtgtcgccaaattcaatggacgccaagtagaagactctgttttcgatgagttcatcaagcattatcgagagaagttgaacagtgcccaaaagaaatcctcagatacctttatgggtatgttgaggactccaagactgagaaagttcacaattattctattgatcaaatcgatgatcattacaattgcattcgacatcctgagtcgcaatgttgaaggcgtgggcatatcaccattcaagctcttctcctactcaggattcgtcgtccttcctggtggtctatccattatcctgttccagaacaaaatcgggcgaaaaggcatggcctgcgcctctcttcttgttggtgccttcatcacggcgaccaccggctacctggtgggcactctagatccagcaaactactctgtactcctgggattcatggtgtgcttggcaagattcggagcggttgttgcctacgatgcggaggctcagtacgcggcggagattatacctaccagtgttcgaggacgaggagtggccaacatccatgtggtgggcaatgccttcgctttcttcagctcctacatcatctacttgggaacattctacaagccattgccctcactgttgatcagcttcctcctcattataggcgcttgtttgtgcctaactcttccagaaactttgcacaagcaactaccacaaactctagaggagggcgaaatattcgccaagggcgagaaatggtactttttcccttgcttttcacgcaaacggcagtcgaataaatccgaatctcagttggagtcagccaacgaaattacaaagtagttatag

SEQ ID NO: 37005 - protein, 538 aa, DROSOPHILA
MDLQRVLEKCGNFGPYQILLLGLYGYTNIVSSLHYFSQTLISFTPSHRCSAPVEEFSQNFTELLSCSVIQYDVDMTSFRDNKCSSWDFDKESNYESITTELEWVCDDAYKLAVGQSFFFIGSALGSIFFGYLADRIGRLPACVLSTLTGASGDFFTSFVGSLPMFSFTRFISGLSMDTQYVLMYILVFEYLSPQHRTFGLNIILGVFYSIGLMISPWIAIWLGNWRSYLWAASLPALGMLIFPLFLHESVEWLLTKGKFDKAVNNLKSVAKFNGRQVEDSVFDEFIKHYREKLNSAQKKSSDTFMGMLRTPRLRKFTIILLIKSMIITIAFDILSRNVEGVGISPFKLFSYSGFVVLPGGLSIILFQNKIGRKGMACASLLVGAFITATTGYLVGTLDPANYSVLLGFMVCLARFGAVVAYDAEAQYAAEIIPTSVRGRGVANIHVVGNAFAFFSSYIIYLGTFYKPLPSLLISFLLIIGACLCLTLPETLHKQLPQTLEEGEIFAKGEKWYFFPCFSRKRQSNKSESQLESANEITK

SEQ ID NO: 37006 - DNA, 1976 bp, DROSOPHILA
agttcttttgtggataataattgaagaattgaatagggttactatcgcatcaacaatgtattatcctcccgactgcgccacttacgtattttactattcgagtcgaacaaatgatccgtcgtttgactaagatcaacgcctttaaagaagtttcagaatcaacacgaggtattttttagtttagatctttatttcttcgttgtcggcttaagactgactgtacagagtttttgatcggctcgaagtgagtcgcgagaaacgggaatgtctaatcagtatatgtgtacaaaaaaaaacggaaaaataacggtatggatgcacaacaaattatgcgcttaagtgtaagtaaaaatgtaaactggtttcatgtgtttatgcatgtgcaagattgtatgtacaattagtgtaagtatgtaaacgtaatatgagaagcatattatgttactatatacctgtactatatatatatagtatagtatatatttgagtgctctgcatacttttaggcatccgcgtagtcgatcacatcagcaatttggacggtcacatcactgccgccagagtgatccgagccggagtccatgtgctccatggccgccaagctggcggcgccatcgaggcactcgaagctgcgcctccgctgacccctgacctgtgacctctgagtgtacggcggcggctgaagcggcggcagaatctgcaggatttgtctttggttgcgcgttgaggtcagctggttgggatggaactgtggggagttctgcagagcctgccgcaaatccttgacagctctgggcgctgtggcggtggccgacccctcctgtgagcccgagggtgggcggctagtgggcgtggcacttggagtggacctccaaacggggatggcataattggccgtcgtcgacggctgctgatgctgcatctggtggcatggcaggatgcgcatcggtgtggcatattgatatgccggtggcatgtcgttcgtatctgtaaagaataatggtataggctataaatatgagctgactaaacaaattacaccagttaattacaccaacattgaggggaagtatagttaatatcgatctagtttacgcatacacatagaatactaatctacacatacatacatacatacacagcatacatgtaccaaagttttttatagaaagagagaatttggaatccgtcaccatgtttttgggttgcatttggaaatatttaactacgatctgttttcactacctttgtgggttaatacgttccgcatttgtgagctgcctttttgccattgtgtgtttgtgacactcgactccttgtgttttctttaataataattttgggtggctatacaataatttttgagtgctaaagtgacgtaaatgtgcgagagtaaaatgaggagacaaatagatatatagacttatatcgtatataaatatgatatatagatagatattgtgctatacgtgttagtgttgcggttaagtttatatattcgtatatatttatattattattatatttttttttatagttatgaaaattaggttttcatgaaccaagtttttggtattattcacttaggggcaccttttttatatacagatcaaagtttcgtttagcgtatttcatgtttttttcaataggtatttcataggtgtttcgatattcctgaggatttgggtcagtctctgcaaaggttattttaatgtcattaacaattatcaattccgagaccattttggcgatgtcgctttacatcataaatattgaataatcaatatccgctacatacgtttttaaacatttagggttatatgtaagtacaatattcaattgttatataatataagattcgtgtaacagttagcccagccaagtagagtgaaaagacttgactacactactacaatcgattgggtatcggcagtaggggccgattcggactgggattggattgctcggaagtgtag

SEQ ID NO: 37007 - DNA, 492 bp, DROSOPHILA
atgccaccggcatatcaatatgccacaccgatgcgcatcctgccatgccaccagatgcagcatcagcagccgtcgacgacggccaattatgccatccccgtttggaggtccactccaagtgccacgcccactagccgcccaccctcgggctcacaggaggggtcggccaccgccacagcgcccagagctgtcaaggatttgcggcaggctctgcagaactccccacagttccatcccaaccagctgacctcaacgcgcaaccaaagacaaatcctgcagattctgccgccgcttcagccgccgccgtacactcagaggtcacaggtcaggggtcagcggaggcgcagcttcgagtgcctcgatggcgccgccagcttggcggccatggagcacatggactccggctcggatcactctggcggcagtgatgtgaccgtccaaattgctgatgtgatcgactacgcggatgcctaaaagtatgcagagcactca

SEQ ID NO: 37008 - protein, 157 aa, DROSOPHILA
MPPAYQYATPMRILPCHQMQHQQPSTTANYAIPVWRSTPSATPTSRPPSGSQEGSATATAPRAVKDLRQALQNSPQFHPNQLTSTRNQRQILQILPPLQPPPYTQRSQVRGQRRRSFECLDGAASLAAMEHMDSGSDHSGGSDVTVQIADVIDYADA

SEQ ID NO: 37009 - DNA, 2674 bp, DROSOPHILA
ctagatattgaagccggcatcgcgcatgcacttcttgtgcgcctctatcagcgccaagcaattctcctcgccgttctccacaatgctggtggggatttggtatcgaaattggataagaattttgttgttagccatgtggttgcgtcatgggatgcaaaaggtgcacactcaccaggcgtcacgtgccctcttggtctccgggcaggcgcaacaggccttgcacttgggcttctcgccggatgcggtggctgcggatgcggtggttgtggatgcggtggctgcggatgcggtggtcaacgggtgggccgccgaaacacttggagctgcaactccttgagatgcactgttgcccattcttcaatcgggtatcggtcaaaagcggctgagaaacaatattatggacgttactgaaccgcctcacgtttgtttatataataaaactcacttcgagacggatatttcaccacaattcggtttatcggcgcacagcacacgaaaataactaaattcaagttcagcgaacagggctgtcaatggctgacaaatatcgccgtgagtgctaagggttggtagtccgtaaaactatcgttacgcgttgcttagaattgttagaaaattgttgtaagatctgttattaaatctgtccgcttaaaaacagtatgctattacaaaattattaatattaaattgcatattcttttccagcattgtatatacatatattttgaaattctttctcagttgtgaaatttataaataaagtcataatttttccatctagcgtccgattataatctgagctatagtgattttacattaagtttcagaattgaaggcactagggtatttgaagccatgtgacagatgtaccgaacgtgacaaccctaccgaagtttattttaacgcagaacagctgcaccaccaatcgatagcaagtagtgttgctcaatagcaaaatacaaatgtcaacaaacaattacagttttaatttacatttattttatgtttccatctgctcgctggtttcttttttcttagactgctccttcagccgctgcagcatgttataggagactaggtcgagtttcaggtgctgcacactgagcgcactgccgtcccaatcgcgcagcattttcagcttgagtggatcgcagaggttcatcagctccagaccgccagtgcggaattcgttgcgctccttctccagcgtcatggtgatcacatccttgcgggcggcatgctgattggcccgatgtttgccaatcgactgctttaggttaatctgctccagctcctcgtcgaatcgcgtaaaatagagctcaatcagatcctccagctcctgcggcctcagcggttcagtgcgtccctcatcgatttggccgagaaaccagctcaacttctcgccagtgatgttgcttttgatggcatgacccaaacggaccttgtgcttgttgttttggcgacgtgccttcttgcccagcgccttggttttccggctgttggggtgcttgcatttctccagttccttgcgcagattcgtctgggattttaagttgtggaaactttagttttagagataaattgcgatgtattaaccgcgcacttaccatttttacgtgtgctattgtttatcacgttgttagttctagtgttggttaacacgtgcaagcacatgttatgtacgatcagctggatccctagtggtgggcactttagcaatgatgatttaaatatattttcataatttaatatttactgaagaaataaaaatattcgtgtattgtgaatgcaataaatatatttagaaggggtttataattatttataagtgcagttcagttctatttttttctaagttttgcattggcgatcttgcatttatatcgatactttgtccatctcttctctgaatcatatgttgccgcatgcacacatacacacacacacacacaggcacagctgctcgatcgcatgaggctaaaacccacgatccgaaccgatccgcgtttttatcccttgcatttctaggttccaaagtcccgctaaatggcaacacacctcctccgaaacggcgctacatgttggctgctcaggaactgcatttcccaacgtgccgcggtgagtagcccccaaaaaccacccgccaatcggtggtcaaaagaaaaacaacaccgctgttatgtaatctcacaaacacctttcgcgcgcgaaagcgagaagaagaatatctctatactcttccaatcggcggaatttgtttttcttacacagaggaaaaaagtgagatcaaagatcatcaagattcggaatatatccaaaaattagtttattctcaaataattattgattacttatatatatatattgacatatatgtatgtcaatttttaacaataaaataaaataatatattagaagtcattttgtatattgtataattacgtctaattttaattttatatagcgcaatgcattagtaattgataattgaaaataattgtagggcatttcaaaaatcgctttctaaatatttcgataccaatatcagtatataacaataaaaaataattagaatagaaattcttagcatgaggtaaataattatacctttattccatccagttgagacgctgcctgcatgtgacctcaagcctggacaagacggtctccttca

SEQ ID NO: 37010 - DNA, 579 bp, DROSOPHILA
atgtgcttgcacgtgttaaccaacactagaactaacaacacgaatctgcgcaaggaactggagaaatgcaagcaccccaacagccggaaaaccaaggcgctgggcaagaaggcacgtcgccaaaacaacaagcacaaggtccgtttgggtcatgccatcaaaagcaacatcactggcgagaagttgagctggtttctcggccaaatcgatgagggacgcactgaaccgctgaggccgcaggagctggaggatctgattgagctctattttacgcgattcgacgaggagctggagcagattaacctaaagcagtcgattggcaaacatcgggccaatcagcatgccgcccgcaaggatgtgatcaccatgacgctggagaaggagcgcaacgaattccgcactggcggtctggagctgatgaacctctgcgatccactcaagctgaaaatgctgcgcgattgggacggcagtgcgctcagtgtgcagcacctgaaactcgacctagtctcctataacatgctgcagcggctgaaggagcagtctaagaaaaaagaaaccagcgagcagatggaaacataa

SEQ ID NO: 37011 - protein, 192 aa, DROSOPHILA
MCLHVLTNTRTNNTNLRKELEKCKHPNSRKTKALGKKARRQNNKHKVRLGHAIKSNITGEKLSWFLGQIDEGRTEPLRPQELEDLIELYFTRFDEELEQINLKQSIGKHRANQHAARKDVITMTLEKERNEFRTGGLELMNLCDPLKLKMLRDWDGSALSVQHLKLDLVSYNMLQRLKEQSKKKETSEQMET

SEQ ID NO: 37012 - DNA, 4577 bp, DROSOPHILA
tagcagcagcctctagccctttaagtgcttcaaagcgaaggaataaaagaaaaaaaaaagggtcggcttcaccacccactgccatattttttcgggcagtgcatatatttttaagccaacaaaaaagaccacaaggacgccgccaacggtgagcagcggttgaagcggcgctgcagccgcagaaaatggccgcatccacgactgcagcggcgataacaatagcagcagcagcgactgaagcagcagcaacatgaatgaaacctgcagcaactgtggcagcaacattccacggaaacgccgatgatgatgcagatgcagatgatgatgatgacaatgctgatgatgcagacgacgattacgacgatgacgacgttgccgagttgcagtttcaagagccacaacacaatgccaagtgccaacaacaagctgagcgaagggggaaattaagtgccaaaggcaaccgcagcaacatagcaacagcaacagcagcagccgtagaagcagcagcagcaacagcgaaaagatttttctccagccaaactgaatccaaactaaatttgcataacaaaacacgtgcagcgagcgcagaagtaaaatctccatttcccagaagcgtagtcaataaggaggcagcaacagcagcaactgcagcaatatagccagctgcaacatgcccggcagcaacatgtcgctctcactgggcgttcgggggcgtggcgccctctggttggcgctcctgctggccaccactgcattctgcggtgctgcctgggcggcgcccacagtgggtggtgctgcgtcagcggtggtggcggggcaaaagcagtcgcatcaccaataccaccacttggaaatcggagtgcagggcaatacgccaacgttgatggaggcgagcaccactagaggtgggaaacatgccacagtgcccaccactcaggcaccaccaaagcccagcaccaccgccacacgcactaccaccaccaccaccaccaccaccgagatggcaagagccacagataaactagaggtgaccaaagaggtgccaagcgccaagacagaagcatctgcaatcggaagcaccactgaaattagcaccattgggaaaatcagaatcactgagatcagcagcaccactgagaaatcaactgcgatcaatgaaacactaagcagttctgtcatagagagaaccacaacaacagtagcagcagcatcagcaagcaaggaaactaataaagaagatttgcaagtggtgcggctattagacttggagcacacagtggcgccaccgttggacaatggtcacgatggccgcaagctgaccaagaagaagcagctgctggagcagcactttcccaccacaacggtggcgaccaccaccattgaaacggaaatggaaaggatacccacaacaagcagcagcaccacaaccaccacaattttgagcagcagcacgaccagcgcaccaccgctcccgttcacattcccgccgctgcgaccctccaatcttgcctttctggaagcgatattttccacggcaccacccatgaccactgacttagcaggaacaaaatcaaccaggacaccaccgacaccatccacgttagcgccaccgcaccatggctacttgggaccgatatttatgggcgagagaaccatcggtgtggtgcatccgctgaagaagccacagccggcgagccaccagcacgtcgcttcgattgagagccagctgcgaaatggccgtttggtggagattctggcgcccacggcgctgctcgagcagattcccgagcccagcaccacccatgcaccaccacagctgggagctgcatctgtgctgtccaccaccgttttccaagtgcccgatgtccagaccagcaccacccgcctgcccacaagcaatagcaatgaaaataatgtcgctggtggtgccgaggtggttgcaccaccacgcaccgagtccaagatctcggacattcagatcgaagtgtacgattccacggtggactccatcgtggcttcgacgaatttccgcgacaacgaaggcttttatgcaccaccgcagacccatgtggaaattggcaccaccaagccgccgcatgagatgcagttgccgcaggagcggtttacccagtatgttatcgatcgcgctgatgtttccacccagccggcatcgggtggtgtcggtggttctggtggtgcagcgatgggcaagccagagccggcagccatcgaaatccacatcaatgtgtccgaggcatttggcagcgaaagcgaagatctggagttctcctatcggcagccctcgttggcggccgataagccgggaaagtctggcgatgagattttggtagttgagatcatcgacagtggtgcggacaatagtagctcggaatcgggtggctcatcctcctcagcgagcggggagcacatcaatccgatcttcaccttccgcaactcggatgcagcggctgcaccaccaccccccgttcgtccaccgcagtctgttcaggatgctgacgagctattcatggccgatctaaaggacggcggtggtggtgcagtgccacgcccgccgcctccaccaccgccaccaccaccgcgaaagcccaacatcgatcgcgattcggacacgatcttttacatttcgaacacagaagtcaaggtgggtgaatcgctgccaacgatggtgccagtgggtgagcagcagcgcaagttccagctggagaaccagttcttccccgccagctatgtgatggattcacagcagcagcagcaacagttgcaatcccagcaggcgcagcagccagatgaggacatcatcctatcgccactgcatcacaatgcggatggattgaagattttccgcagctcctcgtcgaacagtggcgatggagcaccaccgctagacgtgacctatgtgggtgagtcggtcatcgaggtggagcaacagccgcagggttggagcagcacgttgccaccgggacaacagcagcagcaggatatcgttatccagccggcagtgctgccggatttggcgatcggtgtgcccgtcattggggaacttccaccgcagatcgagctcaaggagatcgactacatgcccggtgagctgggaatgggtcagaacggaattggcatctacgagaacgacatccagagcaacagcatcgacagcgaaccggatgtgatcgagagttccatacagtacggtggggatctaattgacgatggagccggcggtggctttgatggcgtcgagggttcctatcccttcgagagccccgcgcaccgccagcagcaggtgggcctgagccaccagccccatcgccagtccgccaatcatttgcaccgcgaacagctccctgttgcggaaatggtcaatgctacgctcctccagcgatatgacagtgggtctggatcgggatccggttcaggatcgggatcggggtctgcatcggcaatggctcctctgctcgcaagtggaagtagccgttctggaaatgccactgctctctcggaagatcctctggctgactacgacggtgagttgaaggatttaaaaggtatattattgtaggtaaaatatatatctaaacatgttttctttttttttttgaaggattctttaatctttttgctgtttctatgggcctcattattgtcatcctaccatcagctcttttggtatctatgtactgcgctataaagtaagtaaaataaatatatgctattgtagatatggccaaaatataggattttatatactcaggttgataagtatataaggtctaaagaaaaatccccttaataaatataattatatacaacataaagccacaggagagccataaatcgaaaagtaggaatcttaagttatcgaaccctcttaaatttaagaagagtccatcgcccacttagccccaaccacaaccttctgccacacaaaattaactgtcattcctggggccaactgtacatagacagtatgttcttttatccgggactccttagccatttggctgagctaattggttacgcctcgtgtggcgcttaatcagcttagacggcgatgtcccacacaaatcaaaaataattgcaagaaattgcgaggaagcagtgacagcgaatggggagcaaaaagggatcagaaggatgcggtatggtggatacgaaatgcgggttgcggggtgcttggagcaggatgagctgggactaaagccacctttaaatagaaagacagcagatgtgggtggcgctgagccgtgagtggcagccaaccccaatccgataccaagcgcaaaaccttcatttcaaggattccctgggcgagatgtgttgcctactttagagcgacgacccacgcatggcaaaagaatgcactcaatctaaagcaattttccggggcaaccacctgaccccttggcatccaccaccttctcccatccgcccactaaccaccgcctcaccccgcagcgttgcgctgcaggcaaggcgtggcaaatcgcatttatcagcttcattcgtggcgttttatttctcattcgcattgccagcgacagacagcagaaatagcaaca

SEQ ID NO: 37013 - DNA, 2577 bp, DROSOPHILA
atggcaagagccacagataaactagaggtgaccaaagaggtgccaagcgccaagacagaagcatctgcaatcggaagcaccactgaaattagcaccattgggaaaatcagaatcactgagatcagcagcaccactgagaaatcaactgcgatcaatgaaacactaagcagttctgtcatagagagaaccacaacaacagtagcagcagcatcagcaagcaaggaaactaataaagaagatttgcaagtggtgcggctattagacttggagcacacagtggcgccaccgttggacaatggtcacgatggccgcaagctgaccaagaagaagcagctgctggagcagcactttcccaccacaacggtggcgaccaccaccattgaaacggaaatggaaaggatacccacaacaagcagcagcaccacaaccaccacaattttgagcagcagcacgaccagcgcaccaccgctcccgttcacattcccgccgctgcgaccctccaatcttgcctttctggaagcgatattttccacggcaccacccatgaccactgacttagcaggaacaaaatcaaccaggacaccaccgacaccatccacgttagcgccaccgcaccatggctacttgggaccgatatttatgggcgagagaaccatcggtgtggtgcatccgctgaagaagccacagccggcgagccaccagcacgtcgcttcgattgagagccagctgcgaaatggccgtttggtggagattctggcgcccacggcgctgctcgagcagattcccgagcccagcaccacccatgcaccaccacagctgggagctgcatctgtgctgtccaccaccgttttccaagtgcccgatgtccagaccagcaccacccgcctgcccacaagcaatagcaatgaaaataatgtcgctggtggtgccgaggtggttgcaccaccacgcaccgagtccaagatctcggacattcagatcgaagtgtacgattccacggtggactccatcgtggcttcgacgaatttccgcgacaacgaaggcttttatgcaccaccgcagacccatgtggaaattggcaccaccaagccgccgcatgagatgcagttgccgcaggagcggtttacccagtatgttatcgatcgcgctgatgtttccacccagccggcatcgggtggtgtcggtggttctggtggtgcagcgatgggcaagccagagccggcagccatcgaaatccacatcaatgtgtccgaggcatttggcagcgaaagcgaagatctggagttctcctatcggcagccctcgttggcggccgataagccgggaaagtctggcgatgagattttggtagttgagatcatcgacagtggtgcggacaatagtagctcggaatcgggtggctcatcctcctcagcgagcggggagcacatcaatccgatcttcaccttccgcaactcggatgcagcggctgcaccaccaccccccgttcgtccaccgcagtctgttcaggatgctgacgagctattcatggccgatctaaaggacggcggtggtggtgcagtgccacgcccgccgcctccaccaccgccaccaccaccgcgaaagcccaacatcgatcgcgattcggacacgatcttttacatttcgaacacagaagtcaaggtgggtgaatcgctgccaacgatggtgccagtgggtgagcagcagcgcaagttccagctggagaaccagttcttccccgccagctatgtgatggattcacagcagcagcagcaacagttgcaatcccagcaggcgcagcagccagatgaggacatcatcctatcgccactgcatcacaatgcggatggattgaagattttccgcagctcctcgtcgaacagtggcgatggagcaccaccgctagacgtgacctatgtgggtgagtcggtcatcgaggtggagcaacagccgcagggttggagcagcacgttgccaccgggacaacagcagcagcaggatatcgttatccagccggcagtgctgccggatttggcgatcggtgtgcccgtcattggggaacttccaccgcagatcgagctcaaggagatcgactacatgcccggtgagctgggaatgggtcagaacggaattggcatctacgagaacgacatccagagcaacagcatcgacagcgaaccggatgtgatcgagagttccatacagtacggtggggatctaattgacgatggagccggcggtggctttgatggcgtcgagggttcctatcccttcgagagccccgcgcaccgccagcagcaggtgggcctgagccaccagccccatcgccagtccgccaatcatttgcaccgcgaacagctccctgttgcggaaatggtcaatgctacgctcctccagcgatatgacagtgggtctggatcgggatccggttcaggatcgggatcggggtctgcatcggcaatggctcctctgctcgcaagtggaagtagccgttctggaaatgccactgctctctcggaagatcctctggctgactacgacggtgagttgaaggatttaaaaggtatattattgtag

SEQ ID NO: 37014 - protein, 858 aa, DROSOPHILA
MARATDKLEVTKEVPSAKTEASAIGSTTEISTIGKIRITEISSTTEKSTAINETLSSSVIERTTTTVAAASASKETNKEDLQVVRLLDLEHTVAPPLDNGHDGRKLTKKKQLLEQHFPTTTVATTTIETEMERIPTTSSSTTTTTILSSSTTSAPPLPFTFPPLRPSNLAFLEAIFSTAPPMTTDLAGTKSTRTPPTPSTLAPPHHGYLGPIFMGERTIGVVHPLKKPQPASHQHVASIESQLRNGRLVEILAPTALLEQIPEPSTTHAPPQLGAASVLSTTVFQVPDVQTSTTRLPTSNSNENNVAGGAEVVAPPRTESKISDIQIEVYDSTVDSIVASTNFRDNEGFYAPPQTHVEIGTTKPPHEMQLPQERFTQYVIDRADVSTQPASGGVGGSGGAAMGKPEPAAIEIHINVSEAFGSESEDLEFSYRQPSLAADKPGKSGDEILVVEIIDSGADNSSSESGGSSSSASGEHINPIFTFRNSDAAAAPPPPVRPPQSVQDADELFMADLKDGGGGAVPRPPPPPPPPPPRKPNIDRDSDTIFYISNTEVKVGESLPTMVPVGEQQRKFQLENQFFPASYVMDSQQQQQQLQSQQAQQPDEDIILSPLHHNADGLKIFRSSSSNSGDGAPPLDVTYVGESVIEVEQQPQGWSSTLPPGQQQQQDIVIQPAVLPDLAIGVPVIGELPPQIELKEIDYMPGELGMGQNGIGIYENDIQSNSIDSEPDVIESSIQYGGDLIDDGAGGGFDGVEGSYPFESPAHRQQQVGLSHQPHRQSANHLHREQLPVAEMVNATLLQRYDSGSGSGSGSGSGSGSASAMAPLLASGSSRSGNATALSEDPLADYDGELKDLKGILL

SEQ ID NO: 37015 - DNA, 5853 bp, DROSOPHILA
aacaaaatgaaaccggggaacgggcatctgtgagtgtcaggttgatggggagcccggagaaaactgaaggcgcaacaaatcaacacggcggaattgggaatcggcgaggccggaaacggaagtcgccgcacgcacacacacacacacacacactcgcgcacacaacacatcctcattctcggatgatgtagatgccagaagctaacaaggcagctgcttctggggaaggtgatcccagcttttgcccgaatttccccgcttttcggctgccgcaggaaaaacgcataaagcggcaaatggcaaaccacaaacgttgccagtttgttgttgctcaccctcgttttcaaaaaaaaagaaagtaaaacgaaaaaagtgccgtgaaaagccagcgtcaaaataaaaaggaaacacacaatttatttgccttattcccaactggcgggccggactgacattgtgggtacatcgggtgtctggaaggaaattgcacaataaactctcgagacgagaaattagttgtgcgtgtggaccgtttcggcggcttcgcaacttgaaatttgttgagtgccaatagcattacgaaggctagaaaggacctcactttgcagggggccacaacaatggaatactcttggggcatcgccaggatattcactcactcacgaaactttcccagccgagtgctaatatttatggcgctttcgcaggaatttttgggcgtcaagcattcgcagattattccagagcttaaaaacttcttatattacgcttttcttagacacacttcaatcttaactacttactactttgctggcaaatatagcccaggtaatttagaatttttaaatatccaatgtaatcagatttttcggcatggttagcattcccccctaagtccttgttttttctcctgattaagtcaaagtatcgtacctgggtgattgcaggcaggcgcaaagtaggcaacaaaatgttaatttcattcgcggcatcattagaaatgcattggattttgaaactctgggctccaaaaagctgcgccaagccgtcgactgcttaacaactttgccgtttttggcccaaaagacattccatcagtaaccacctcgcgttttctcatcccttgccacttctttttccacaggtatgtgctgagcaagaactcgggagcgggcacgggtggcgcccacggcgatgacagcgaacagggccaggactccaagcacgaggtgagttcatagcgaatagctgaataagccaaagaccctccactcccacaagcacctcctgtcgaaccacccaaccccacccagaaatccccgcctcatgcgccgcatgaaaattgaaattcaaacgcaagtgccatcgcagggtgtctttaacccgcagttttccccccaaccctttgtgaatgcactcgtctgctgaagttgcgctctcgggctcttgagaaaattaaacaatggcggaaatttccgcgggaaattttattgcgttcccgctgaaattgagagctgagaggccaaaattaaagatgatactgcggttgtcagtaaggatactactttgaaccatttaagagaaaacagcatagcctaactgaatgttttgaaaaatgtccttcggaattccatattcaattagtaacgtagaatactgctaaaaatatttaatggcatttaaaaaactaatcgtaaagtattcatttaaaaaatggttaagactattgtgaagtagctgcagtggaaggttagggttaacgttttaatggagcacacgttgacttggtataggaataaattcccctggctggtaatgaaattttcttggttttgtgctggtgtgctgggcacagagtgtgtgaaagagacggagtgcgcgcgagaattgcattccagttaagtacagtgcctgcactctctccttccctttctctattcgcctcttgcagtctaagtcgtcgtcattctcatcatctggctcggccaccgcttcaaccatcccgcaaccacgtccacgcccagtgccaccgcaccacccaccgcccactgcgaagcccccgagcggcgtcagtcaaggccatttactgacgcctggcctggagtgcctcgagtttcgattcgaaggaggcagcgtgggcaaggtgggcgaggtggtccaggtgggtctggaggcgtttggtgatggtaatggtaatgcctcctctattggcggctcaaatggtggcattggcggtggctgctttgctgcctgtggctccgtcaccaagatgacgctcaaagataatcatctgattgttgtcaccgaggagcggcacgtaagttcgttagtcatccgatcggcccgtcgtcctctttaacgccgccgccgccacctctggcctggattctagatgtgtcctcctctgtctcgtttctgtttctctgtctctgcttgaactctcctcctccgctcggaacaggatgtgcctgtgcctgcgcctggttgttgtcgtagttagtttgctgtactgttcttggtgcctgcctatccaatcaaatctctgacttggcctgcacaccaccgaaatcctacaattttgattcgattgcatccaacaaatcgtttttgttatgtgtgtttgaaaagtcttctcctaagataaatatactttctagctgcaaagtaaacttacttgaaaaggcacagatctatttattttatgattgattcgatttggctagcaactactattatttcgtatgatactattttttctataattttatttatcctttacaaaacagcattgtttcgtacatttaaagcttcgttagtttcttgtgttaccttgaggtgggcactttgctgtctctgtttttgaaccttttgtgtttaagtgagtactttatttaccgcactctcgccctctgacactttggggaagcactttcccacttgttcatttgccctggccttgaatgtccttgggtggtcctggttgtcctggcgcatcaatgggctcctgcgggccatgagacaacgaacaggggccagattcgagtccgaacaacggcccggtgtcgtctatttgtcaactatgagcgcctgtgctagtgtgtgtatttagcggtgtatccttggggcgtatatgtgccacaagcatatgcaaatgcaattttcgacactttccgcatggcagccaaccgatttgtccgctctgtcgcctcacccgagctccattttccctcttttctcctcgtccttcgaccactttctccactttttcccacctctactcctatatcaatctcgtatccttgatgttgtagccgatgttgtgtgcgtgcgtggttgttttgtgtgaaaatcctgcactttctagctaatattctgtgtttttgggttacctgcccatcgatttcaatgaaaatttatctcgctcttcgcaggacatttcacgaaacgcccgagagacaaaaatgcatacagacaaggatggtgtcttcgtggtggaggtggcccgaggcatcgactccaagcagttgaccggtgatcattccggcgtgaccttggacgccaccgaactgcccttcgacaacaaactggcgcccaacggggggcatttgcttgaaaagactctgcccagtcacgaacaggtgcagatccatgcaccgccacaggactttgccactggccatcctgccccactgcatctcattgaggaggccgaggagcatgtcgccgaggatctgagtcagcaggcagtcgaaactcccgctatcttggcacgcactggactctcgcaatcggatctcagctcgacttcctccagtgactccaacaagcgttactcttacggcaatcaggagctatatgtcatcgagcagccgggctatgccaccagttcacccacagcaaagcccattttgataagtccaaatcaaaattcaggccaggatctggagcagaagtcacagctatccaccagtactgaacaaaccgaaatcgattcaagtcaaggaactaaaaagccagatgaagaagttgctaggccagaagaggcggtaaaagagattatttcggaaaaggaggtagccaaacctctccagaaagaggtagctactccacctgattatgaggtgaaaaccactccggaagaggcggtagatgtaaaacaagaagagtcagttgttccggaaaagttgacagaggttcaacctgtagtggatgatgtggcttcacgctatgaggaagaggttccaccaaaagaagaattgcctccaccaacagttgaagtgtctccaccaaaggaagatcaagttccgattgagaatgatgtgcaggagcaggaggagaaaccagacaaccaagttgaagtccaaaccgagtcaaacccagatcccactgggatgaacgcaaagttaccagatgaatccctgaaaccagaggagacagtggaaatccaaaacgaaccggaggccgagagcaactatgacagtctgatgagcctgccagcgccaccatccacggaggagatcaaagagctgggcgactatgcgctcatggagtccaaccagttggacagcctgccaccaccaccaccgccactccaagatgtccccagcactccgcctgcaagcgggaggcctgctgccatcaatgtcagcaatgagaatgggactggcaaggtgtcggtggtgatcaccggcggtggactagttggtggtggggccgaggagccctccaccctgacaccacccgcctcgccgcccgccactccaccaccgtcgcagacatcgacgcagtacgccagcaatggactcaccaatggcatccatgccctggccgtggtcgatgtgaacggcagttaagaaaggccaggtgagatgggaaaataagtatatatgtttttttttttttttcattgaatctcgaagagatcagcccgggtggcgatattaactattccacgatgagaaggctagcttgtaaggattactaggagtactgaaaccccaaatagggaaaacatgaaatgtggcaaaaacgttctcaaccaaaaacttaaatttaaatatacactaaatagagagaaactttttccacttactgtttgttgattttcgaatataacgaataataacaattaaatgcgattaatataaatataaatataaatcataattaattgtttgtctatttgcggctggcggccactcccccccacctaccatccacccacaaccacccattcgacccacttccctctccatttcggggggtcggttagttagtgcggctaacgagtatttcaatgtctataaatctacaataaagctaacaaaaaatacaaaaataacaagaaaaaaaaatagtatacaaatggaaaagcaaatacaaatacaaatacgataaaatctgcatacgaactacatatgagtatatgataaatgaaatgcgatacataggcaaacagaacagagctaggtgcgccaaaaagagagtaactaccgatatgtaacgatgcataattaattaggctaattatttacacacacaacaatgccaaaaatggtaaatggtaaacggtgaatgtcaaaccagcagcaaccgcataaatggcataattgtagtaaatttatttgggttcgattgaatggccaataagatcaaagtgtgtcctgtgtccggattctcattgatatgtaggtgtaaagagttttaattggcagaaatccgaaaggaagtccgagttggtttcaaaaacatcaattgttgtctagagggattatattgaaaacggatttccgatgaaaacaaagtcattttagctgaatattcagtgtcaacattagaaagtcctacaaaatt

SEQ ID NO: 37016 - DNA, 1920 bp, DROSOPHILA
atgcattggattttgaaactctgggctccaaaaagctgcgccaagccgtatgtgctgagcaagaactcgggagcgggcacgggtggcgcccacggcgatgacagcgaacagggccaggactccaagcacgagtctaagtcgtcgtcattctcatcatctggctcggccaccgcttcaaccatcccgcaaccacgtccacgcccagtgccaccgcaccacccaccgcccactgcgaagcccccgagcggcgtcagtcaaggccatttactgacgcctggcctggagtgcctcgagtttcgattcgaaggaggcagcgtgggcaaggtgggcgaggtggtccaggtgggtctggaggcgtttggtgatggtaatggtaatgcctcctctattggcggctcaaatggtggcattggcggtggctgctttgctgcctgtggctccgtcaccaagatgacgctcaaagataatcatctgattgttgtcaccgaggagcggcacgacatttcacgaaacgcccgagagacaaaaatgcatacagacaaggatggtgtcttcgtggtggaggtggcccgaggcatcgactccaagcagttgaccggtgatcattccggcgtgaccttggacgccaccgaactgcccttcgacaacaaactggcgcccaacggggggcatttgcttgaaaagactctgcccagtcacgaacaggtgcagatccatgcaccgccacaggactttgccactggccatcctgccccactgcatctcattgaggaggccgaggagcatgtcgccgaggatctgagtcagcaggcagtcgaaactcccgctatcttggcacgcactggactctcgcaatcggatctcagctcgacttcctccagtgactccaacaagcgttactcttacggcaatcaggagctatatgtcatcgagcagccgggctatgccaccagttcacccacagcaaagcccattttgataagtccaaatcaaaattcaggccaggatctggagcagaagtcacagctatccaccagtactgaacaaaccgaaatcgattcaagtcaaggaactaaaaagccagatgaagaagttgctaggccagaagaggcggtaaaagagattatttcggaaaaggaggtagccaaacctctccagaaagaggtagctactccacctgattatgaggtgaaaaccactccggaagaggcggtagatgtaaaacaagaagagtcagttgttccggaaaagttgacagaggttcaacctgtagtggatgatgtggcttcacgctatgaggaagaggttccaccaaaagaagaattgcctccaccaacagttgaagtgtctccaccaaaggaagatcaagttccgattgagaatgatgtgcaggagcaggaggagaaaccagacaaccaagttgaagtccaaaccgagtcaaacccagatcccactgggatgaacgcaaagttaccagatgaatccctgaaaccagaggagacagtggaaatccaaaacgaaccggaggccgagagcaactatgacagtctgatgagcctgccagcgccaccatccacggaggagatcaaagagctgggcgactatgcgctcatggagtccaaccagttggacagcctgccaccaccaccaccgccactccaagatgtccccagcactccgcctgcaagcgggaggcctgctgccatcaatgtcagcaatgagaatgggactggcaaggtgtcggtggtgatcaccggcggtggactagttggtggtggggccgaggagccctccaccctgacaccacccgcctcgccgcccgccactccaccaccgtcgcagacatcgacgcagtacgccagcaatggactcaccaatggcatccatgccctggccgtggtcgatgtgaacggcagttaa

SEQ ID NO: 37017 - protein, 639 aa, DROSOPHILA
MHWILKLWAPKSCAKPYVLSKNSGAGTGGAHGDDSEQGQDSKHESKSSSFSSSGSATASTIPQPRPRPVPPHHPPPTAKPPSGVSQGHLLTPGLECLEFRFEGGSVGKVGEVVQVGLEAFGDGNGNASSIGGSNGGIGGGCFAACGSVTKMTLKDNHLIVVTEERHDISRNARETKMHTDKDGVFVVEVARGIDSKQLTGDHSGVTLDATELPFDNKLAPNGGHLLEKTLPSHEQVQIHAPPQDFATGHPAPLHLIEEAEEHVAEDLSQQAVETPAILARTGLSQSDLSSTSSSDSNKRYSYGNQELYVIEQPGYATSSPTAKPILISPNQNSGQDLEQKSQLSTSTEQTEIDSSQGTKKPDEEVARPEEAVKEIISEKEVAKPLQKEVATPPDYEVKTTPEEAVDVKQEESVVPEKLTEVQPVVDDVASRYEEEVPPKEELPPPTVEVSPPKEDQVPIENDVQEQEEKPDNQVEVQTESNPDPTGMNAKLPDESLKPEETVEIQNEPEAESNYDSLMSLPAPPSTEEIKELGDYALMESNQLDSLPPPPPPLQDVPSTPPASGRPAAINVSNENGTGKVSVVITGGGLVGGGAEEPSTLTPPASPPATPPPSQTSTQYASNGLTNGIHALAVVDVNGS

SEQ ID NO: 37018 - DNA, 2270 bp, DROSOPHILA
atattaaatatttctttgaaatccttaaataatcaaatcaagcaccctcctctatataaaataattatatataactaacaaatacaaaccgatcatcatgatcaaatacttaatgaatgcggtaacaaattcccgataattggaaagcatcagtgatttgcgtccgtaatccgtaggcatcatttatttatgagattcgtttaataatgttttgatttctcgtaaggcaatttagccggggaaatcgtttatcggtacgtggcgaaagccacggatacatggggtttatacactggctggcttgttgttattggatccaccttgtgaccgcccaagcagccatgccaactacctttaaccaccccaagccacccacaaccaccccaaaacacccacaaccacctggtcacgtggcgtcggcgataacaaacaaatgcaattatggatttacgcggcgtatgcgccatatttatatgttttttacgctgccgcttgcggttgccttacattttaattgagttgcttgtgcagctggcagcgccaacaaaaaaaaaagaaacattagttgtatctgtatctgtatccgtatctgaatcggaaccaactgaaaatgtggacaagtgttgggtggcgtgaagaaggaaattgatgcgcttcgggtgcaaaagacatcaaacacttgaaatattttgtgtaaacttgaaaaatgacatgaaagcggcctgaaataacaggccaaacgatgggtggatggggctggttgtttatttttttcgagtggatggatggcagaatggcatgcaaaagtaaacaaacaatttgcgggtcttgtctctgacatatgagttcgaatatttctgttgggcggtgggagggtagggggcggggagagagggcggaaaggggagctgtgcccgaggtctccgggatctcacatcttactcgatgtctccttgagcttgtgaatggcatgcgtgggcgtgcaaagtgtttctgaaagatgattgatacgatttggagtgctcccagggccgccgacatccgcttccctcgatccgctcctgaatttgccgcccgggggcgtcgcataagcggcggcgtaatgaagcggaaatcgatttgcgagcgcgcgcgcgtcttcaacccgtgcgacccgggaaatcgctcgtcggcagcgggcgtgcgtgaaaagtttgacagcagccaggagcaggccaccagacatccaccggccaaccgcccaaccgcccaaccgcccaacacccactagccaaccactcagccagcaccacccgcaacgccatctcacgggatgatgaacagtggggcgccaccagcagcagcagtaccagccgctaccccgcaccgccaaaaaccacacggcgagaaaatgtaaatgcttaaaataaaataaataaaatatgttgcgaaaataatatttaataagggtgcacagaaatcgcaataattttattcatgaaagttgcaagaaatgtcattttgctggtaagataacccagccatgcagacatacataaaataatatttttttccagtgcaccccttttcccctttttttcacgaagaaagcgtaaacaagaaaatattaagcagctgcgagagcaaaacaaaaacgtaacgctgccgaaaaaaaacttggggtagggaaaacgaagtgcgcgaaacaagttttccgggaggggcagtgggaaaacaagcgaaataaagtaaagaaacgaaaggaatgatgctgtggggagagaagggggggaggggtgaggggagcgatttccgccgctcgctcgtaacttttcacttaagcatttttgtcacgtctgccatttttccttttctccattttccggcacacccgcgcctatccgaaagccttgtgtaatacatttttgtaatatttactctgcgctttgttggatctgtgcatccttgatcggcatgggtatatacgctattgggcagcttggagcatttcgtgtttttcacattcccagttgaaaggaattccttggcataccagagcattggaaattcgctgtgtgcaaagcttaaagttgagttgatattattttcttttttttttgttctatatacagacatatttgttgttgtttattttacgccaacccagattcccagtgacttggtgtcctttttttcgggttccggccagtttcttaatttcttttcgtgttttctctttatacatgcacacccgctatttgatttccccctcgccaggcaaaaatcatatt

SEQ ID NO: 37019 - DNA, 270 bp, DROSOPHILA
atgattgatacgatttggagtgctcccagggccgccgacatccgcttccctcgatccgctcctgaatttgccgcccgggggcgtcgcataagcggcggcgtaatgaagcggaaatcgatttgcgagcgcgcgcgcgtcttcaacccgtgcgacccgggaaatcgctcgtcggcagcgggcgtgcgtgaaaagtttgacagcagccaggagcaggccaccagacatccaccggccaaccgcccaaccgcccaaccgcccaacacccactag

SEQ ID NO: 37020 - protein, 89 aa, DROSOPHILA
MIDTIWSAPRAADIRFPRSAPEFAARGRRISGGVMKRKSICERARVFNPCDPGNRSSAAGVREKFDSSQEQATRHPPANRPTAQPPNTH

SEQ ID NO: 37021 - DNA, 2802 bp, DROSOPHILA
taacaagcacccagttttccgagatctgctcggcttactgggcatcttgctcctaattggttgccagttatagaatacgtaaaacgtgcgacacaaattcaagttcaatggaattctacgggaattctacctttcagagtggaaatgaactaagggagaagaaaataggaaacacagagattttcattagtggaaaacccacagtggaactaagaacctttctagaatttcatttaatttgcagttccgcagatagttttggttgctcttgctctccctttcgctcactattgccggctctttctgggccgtgtgagttgtgtaattcgtgcaagcgagagggcgatagagtttgtgatagggagagggggacagagaataggccgcgcaaaaaagttggcagacttattttttcccccatttttgcactctaaagttccttatactcccacagttttgtgcttttgtttttgtttcgctagaatttgttcaatttaatgtaacatgaaggagaaggcacaaaaaccagaaacagggcggcgaacttgggggtgggcgtgagaaacaggcggaaacacaacatggaaaactgaaaagtttgcggtgacgccggaaaattccatcaaaactgtgggaaacagccttaaaatgactttaagggtttcccaattatttggaaggccctgaaaaaataaggaaaattgttcagatcactaaaagcttgataaactaatataaaatttttatttgattatgtttttatatgtatttatgatttatatatatcctaaagaacgtagaaattattcaaaatacatgtattatttaattttgaacgatttaatactatgtaacacgcaaacgcaagcaaattaaatgaattttaagcgataaggaataacaccttgatcagtgttgaaatttaacagaatatcaacaacgtacaacgggcggtcagcggttaattcttcgccatcgtcttccagctctcctgatcctcctaatcctccagatccctcagttcctccagatcctccagatgcgtcaggtactccagatgctgcggctgtttctgtttctccagatccagcagacctctcccctgtttcagtatttcctgtttgttcagttcctcctgttttgtccaatcctttggtgtcgtctgtgtctcctgatccctcggctcgtacagtttcttcagaaccccctgttacttctttctttgtaccgaaatcagacattataaacttattcaaaacctgctttttctgcgcctgcatggcacgccactcgtcgagtgtatattgttcggtctcctccgatgaatcgtactcgtagacgaaactcgatacctttggtaacttcatcccttcgaaggtgcgcaaattggtcctctgacgcaagtcgatctcctgctggatggatccccagttgtgggccccggctccattgcgtttttccaccgcctttacgccagtgcgtttcgatccggaacggcgatcaaagagtcggtcaccaggacgattgcgtctggttttgcaaagtttgtttttcggtactgtaacgaatactgactctacttccttctcaagaggatctgccaccttgatgtccttcacccgttcctttttgggtgcagtcaatggagtggtcaaagtaatcttgttctccacctttggctgaaatagacgtgctgccttctgtggtttctgcgacatcttgggaacggccaccattgatgacttcttctgtgacttcttcatcttgggatccttggtgagggctacgagtggtacgttcatactgtcgtcgaaggtgcaacgattgttaaagctcgaatttaagtaaaaatcagatatataatttattatataatcggagctctgaaggcgagcgagtttggagctgaactgaatgagaaacggaatgagcctggcagctgatcgactgggcaactaagttttcccaaaaacggtttaagattgactcagcaaatataagccagaagttacagttgctcagtttttgtttgataagtttgataagatcataatatatattcatataactcaattaatatatgctttgcatatgtttaatggaggcttttgaaatgcattatgttatgtacttcttgtgcattggtacataaatactgagttgatatatatggacatcataattttttcaaattccaataaaaggctactcaaggaatttcgttataaaatatttgtatttttcataacattcaattacgtgtctctagtgttcgcaacccctcatttatttcgaaaagttatatatatgattgccatggagttgctaggatattcatttaagcgttcagttaccagcgcaattttccggcattattatttataactttatacgctcgccgagtgcttcgttctacccactccgttcatttcatttggcttcccgttcctgtggctcccttgtgtctctgtggagtggccaaaagtccagtggccaagagtccagtggtcgaggggtcggtccatggtcttggccatcaagttctgtgttttgtcataagtcatgtgtctgctcgtcctcgttgtgtgttgcttctgtttttccagcacaaagttgtgtacttatgaaaattagtttctgctctgctctgctactatttttcataattaaagtgcaaataaaaaactaagctggcgaacaaacaattgcaattaactcttgttgttgctgtggcccccctgttgatgtagttattcggcatttatttgcgagattcggtgtttttctaccgccccatttttg

SEQ ID NO: 37022 - DNA, 750 bp, DROSOPHILA
atgaacgtaccactcgtagccctcaccaaggatcccaagatgaagaagtcacagaagaagtcatcaatggtggccgttcccaagatgtcgcagaaaccacagaaggcagcacgtctatttcagccaaaggtggagaacaagattactttgaccactccattgactgcacccaaaaaggaacgggtgaaggacatcaaggtggcagatcctcttgagaaggaagtagagtcagtattcgttacagtaccgaaaaacaaactttgcaaaaccagacgcaatcgtcctggtgaccgactctttgatcgccgttccggatcgaaacgcactggcgtaaaggcggtggaaaaacgcaatggagccggggcccacaactggggatccatccagcaggagatcgacttgcgtcagaggaccaatttgcgcaccttcgaagggatgaagttaccaaaggtatcgagtttcgtctacgagtacgattcatcggaggagaccgaacaatatacactcgacgagtggcgtgccatgcaggcgcagaaaaagcagggggttctgaagaaactgtacgagccgagggatcaggagacacagacgacaccaaaggattggacaaaacaggaggaactgaacaaacaggaaatactgaaacaggggagaggtctgctggatctggagaaacagaaacagccgcagcatctggagtacctgacgcatctggaggatctggaggaactgagggatctggaggattag

SEQ ID NO: 37023 - protein, 249 aa, DROSOPHILA
MNVPLVALTKDPKMKKSQKKSSMVAVPKMSQKPQKAARLFQPKVENKITLTTPLTAPKKERVKDIKVADPLEKEVESVFVTVPKNKLCKTRRNRPGDRLFDRRSGSKRTGVKAVEKRNGAGAHNWGSIQQEIDLRQRTNLRTFEGMKLPKVSSFVYEYDSSEETEQYTLDEWRAMQAQKKQGVLKKLYEPRDQETQTTPKDWTKQEELNKQEILKQGRGLLDLEKQKQPQHLEYLTHLEDLEELRDLED

SEQ ID NO: 37024 - DNA, 2834 bp, DROSOPHILA
gaaagcttcaattgtccacaagggaaaacaaataaacagccagctcgagggcaaaaaaaaaaaaaatacaaaatttatgaccagaactccccgcaattccctcgatccacaaatgcgattgtcatgtgaatcagaggcaagaaaataatacacgaaaatatgccaaaggaaatggaggaagtaaatatagttcaaagatctgccctgaatagacggttatatttttgtgtgtgatctgagcaggtccatgggcacatacatacatacatacatgcatatgtacatagtacatatatatagtagtgttttgaattatttataggcgacacttggataggattcgcatataaataacgtggacttctttgacttttcatttgcttcggcttttgcttgtgtcattcaagcaaaaaaaaaaagtgaatcccttcccttttctgcgccgccgcccatgacttttcaaatatcatttatggttttgagcgttttacgagttcgatcattaaaaaatcgcaggaacgtcgagtcccaattgcgttcatttccttggtcagctatttgatttcgttggcagctaaatttagtttttcgaaaatacaacaaaataataatttgagaacagcattggacaataaaaacacaatgttcggctcttaagtgcactgggaaaaatacacacaatagcacacaaatataaattccttacataaatgttaattttgaatgaatctattattattactattattagttttagtctttagaacgagtttatataactttaagtattaattagaaaatcaattttcatacattttttggctgccatttttccatcagtgcagccaccattaaatgggaaaataatctattgggcaattagaattagaggggccctagaattcttatcagccatcaatgatgcaatgatctcctcagccgatcgctcacagaacctgtccaactctctgtttttgtttttttttttcagctggagaacatggagggtgccagtcgcagcaggaactcctccacgagccacagtcagggtcgcggccaggacattgaggatctcaagcaagacattccctactttgacgaaccgccggcgctcgatgccgatctgcttgttctgggcaagagcgaatgccagctggacgagctggcctgggatcgtgatgcggatggggatgcggatgcgccgctagagacggcacccgccgtcgatctcgaggaggataactatccggatgagaacgagagctcggtgctgggcagcgactatgcgcccagtgggagtgggagtggtgcgaacagtttctaccaatcgccgacgccctctgccaccggatctggttgcgatctgatgctccgaccgccatcgaattccatgtaccatttcaattaccgatcgccgggtagtccaatgcctgtggctccaggagtgaccaactcacgaggtctgcatccgtatgcacattccccggcgcatggtaatccgcctggtttctatccgaatatgtggtatccgaatgcaccatacggatcggcaggagcggcaggatccgccggaggagccgtttccggtggcaggtacatgggctatggaccgggcggagtgccaggaggaaccaattcgggtccgggtgcgggtcctggagcaatgcaagctgcgtatcctggacactcggctcacatgcatgcgctgcatcatcaatatccgcagccacatccgcacgcccaccacccgcagcatccgcatcattcaccacatccgcaccacccgcatccgcacgagaccatgatggagatgtttcagctctcgaataggtgagttccatagatcttttaattcatttgatagcttctccagctgcaatacattgaatattcaagtttctagggtatacaaattcgttttgattagccagaaactcattgtaaatatgaaactgaaagctttaagatgtgaaaacggaatatttcagcccgccaattggaatgattgctttgttatccaaaacctggggcatgtactagttcaaggcgcacgcatttcgtgtgcaccgccatttcgaggcgaggaacccacccaccgcgctaatggggggcagcatccacccgtggcccctcgacgggcggtcgggtggccaatttggcattattcagaagcacccactccgagcttccagcttcccgctgagtggctggcctgattgaagattgctcccccccccccaattaggcgtcatcttgtggcacttgtggcacttgcggcacttgcttcacttgtgccaccaactaagcaccccaaaccaccgaaaaccatttgattaggcggccgtgggcgctgctaatatatttttatcaacatttcgtttgatttattttcgtcaacgagacgactggactgaattcattcggcattcggagttcctaattcagtgaaatcgccattcatccgaactgcaggagagctgcacaagtccacccaccctttttggccaatcccttcaagaccattcgctttgctaaccgcccactttgattgacagaccataaacagaacactgtgctcacttatttccttattcacttggccatatgtgtttgcatatgtatcgctcttgccgttgctgtaccgttactctcgaacttataatccgatgcgtttcgatacgtcattagcgcggcttcaaggtcgctactactgcatccgtcgattgagagagggggggcggtgggtgttgggtgttgggtggtgccggcagttatcgatacgcgcgcacttacattgtaagcggcagcaaacaaacagaaagcgcgaacgagac

SEQ ID NO: 37025 - DNA, 834 bp, DROSOPHILA
atggagggtgccagtcgcagcaggaactcctccacgagccacagtcagggtcgcggccaggacattgaggatctcaagcaagacattccctactttgacgaaccgccggcgctcgatgccgatctgcttgttctgggcaagagcgaatgccagctggacgagctggcctgggatcgtgatgcggatggggatgcggatgcgccgctagagacggcacccgccgtcgatctcgaggaggataactatccggatgagaacgagagctcggtgctgggcagcgactatgcgcccagtgggagtgggagtggtgcgaacagtttctaccaatcgccgacgccctctgccaccggatctggttgcgatctgatgctccgaccgccatcgaattccatgtaccatttcaattaccgatcgccgggtagtccaatgcctgtggctccaggagtgaccaactcacgaggtctgcatccgtatgcacattccccggcgcatggtaatccgcctggtttctatccgaatatgtggtatccgaatgcaccatacggatcggcaggagcggcaggatccgccggaggagccgtttccggtggcaggtacatgggctatggaccgggcggagtgccaggaggaaccaattcgggtccgggtgcgggtcctggagcaatgcaagctgcgtatcctggacactcggctcacatgcatgcgctgcatcatcaatatccgcagccacatccgcacgcccaccacccgcagcatccgcatcattcaccacatccgcaccacccgcatccgcacgagaccatgatggagatgtttcagctctcgaataggtga

SEQ ID NO: 37026 - protein, 277 aa, DROSOPHILA
MEGASRSRNSSTSHSQGRGQDIEDLKQDIPYFDEPPALDADLLVLGKSECQLDELAWDRDADGDADAPLETAPAVDLEEDNYPDENESSVLGSDYAPSGSGSGANSFYQSPTPSATGSGCDLMLRPPSNSMYHFNYRSPGSPMPVAPGVTNSRGLHPYAHSPAHGNPPGFYPNMWYPNAPYGSAGAAGSAGGAVSGGRYMGYGPGGVPGGTNSGPGAGPGAMQAAYPGHSAHMHALHHQYPQPHPHAHHPQHPHHSPHPHHPHPHETMMEMFQLSNR

SEQ ID NO: 37027 - DNA, 3756 bp, DROSOPHILA
caaaagtctgtttcagctcgaatttgacggaatcggtgaagccgtcagtcggcgatttgatgagcttgaagcccagcaggagctcctcgttggtggcctctatgatctccatttccggcggcatggcagcggtttgaaatgaaaatggaaatggaaaattaaatggatttgtcgaataagtcactaaattctattcaagaatttatttctgctgtcaaaacgtgttccagcggcaaggactattcgaagttagaggcggagaaactttttacgccaacatcgatgacatcgatgttttcgaaatatcagaaacatcgatgtttttctaggaatgttaagaacaattgctggaggatgaaaaggttgtcaccaaatactgcctttttatttaaaatattaaaaaataatccttaaataaaaaagatcaatgatcgaaaaagattaaagataaaaaagattgtttatattttataacaacatctatgtttttcgccaaaaacatcgaaacatataaataatttgaaaaatggttttatgtctcatgttatatattcaatatcgtatttactattttatttaaacgggaaagttgtttgaaatgcaaatagtgaaataccctataaatctgaaaaaaatcaggaaatactttacaggaagtgctattattttgaccaatttgcttaatgatttatgtgcatttagtatcttgtgtttattgagttttttgaaaagtatttttattgaatccttactgaattgaaatccatgcgaaaattacgttttagcaatgtatcttcgggttttaaccaaaaatctgccgtgtgatttgcttttatctaactttatcttagttcaaaacagtagaacatttaatatattaccagcaccagtcaccctaccatttacacaaatgcaaattgtttaacaatttcaactaatgatctaataattaatttaagtgttttttttagttttttttttcaaaaacagtttctagtttcgttaatgagatcgaacttcttaagttcagaggtatttattcataattctgttcatcccagccaaatcgacagttcatctatggtttttttatctatatctctagattaactcaatatttattgatagtcataacgttagctactaaaaactacttctttttctgctgctttgccttccccttggaggctggagtgggttgctgcttgcgcttcattggcttcctcttccggtggccgtgatcactggagacatcgctgtcgctgtcggagaagtcgtcgctctccttttcttccgatgagttgctttcttctgaggattcctcggctttctgttgcgccttctttgcctgtatcttgttcttcttcccctttcccttcttcttctcggcatccagattcttatcctgctcgtactcgatggtcacgaatccccgaggtgctgcaggcttggcactttggtcagactccactttcgcctttggtttctcctccactttaatgcgttgttccaccggttggacattgccgaactggcggagatccagcaggcccaagtcggtgggtcggcagtccatgaagctgctggcaatctcctccagcttgcgcgtttccatgtcgatcttccagactttgatttcaccagcgctggaaaagataaatttgtatatataaaaacgaataatgtgatgggtgttcttagttatctgggtgtagcttggatttttatagaataactcacctggagacggtggccagtaattcgttcagataggcgatggccttgacccttgcctcgtgtgcaagaatgaaggtgggctgcaaagaaagcgcatttaagtatcatagataacaggctgagaaagtgcaattcttactggtgtatcatcctcgtccttgagggaaatccaggcaatgttgccgttgtccaggccagttaaacactcgttcccatccagccaggtgatgcaaatgggtttcgacggcatctcaatgcgacgcataacatgggcgttctcgatgccccagatctccagaaccaatggaccgctcagtgtgaagtgatcgccctgcttggaccacgacaaacagcccgtttggaaatccagcgtagccttgttctttaaattggtcttgtgggcgacgcagccattgaccagattccaggtgttcagcacctggtcgccgcccaaagataaggccaacttgctgctgggatggcaactgacatgggtgacggcctggccggcatgggccttctgccaatcaccctctttggtccagctgcccacgcgtgtggcgatcatatggccatcgtcgctcccggagagcaagtgcgacaggtcaggtgtgaatttcagtgtgttcactcttccggcgtgcgagagtatgatctgcgactgtttccgcgtgcgcatgtcgtagacgaagatcctgtcgtcggtaccgccactggccacccaaggccactgcacggccaccgatgtaatggatcctgcatgggagctgtctgcaaaagtctgtttcagctcaaatttgacggaatcggtcaagccgtcagtcggcgatttgatgagcttgaagcccagcaggacctcctcgtaggtgcccactatgatctccatttccggcggcatggcagcggtttgaaatgaaaatggaaatggaaaattaaatggatttgtcgaataagtcactaaattctattcaagaatttgtttctgctggcaaaacgtgttccaacgacaacgactattcaaagttagaggcggaaaaacattttaggccaacatcgatgtcttcgaaatatcagaaacatcgatgttttcggtgaatcagcgatgttttttcatctctattgctcatcggagaataaaagcgtataaattgtaagtataaattaatttttatatattctaatacaattattaatggcgtattgcaaatttaatgtgacttgttggctggcgtcgtggctgtataaatgtattagtctcgttcacttttccattgaattgcattatttggtatgatttccaatatgtatgtttatatatgttttctaagaacaattactggaccagcgaaaaatgggaaggtggacaccaaacgcagcatactgcaatattaaaaaagaaaattatcttttaatccttaaaatatccttagataaaaatagattaaagataaaaaagatagtttatattttataacaacaacgatgtttctcgccaaaaacatcgaaaacatcgatgttcgccaacagtctgcttgcagtcactagcagtgacggaccgcaccgtaacagagctgttaatgctgtaatcgataactttgattggcacttgtgcgatatctgacgtttaataagtagtattttgtgatatgttgcgaatgaaaattcgctaatatctgtataaaaacaattgcattctactgcgcgccgtgtccgggtaactaagggcagtgggaatcgcgcatagccagcaccgaccgtcatttggaggcgttgcatcgtcaaaccggcgaacagaaatccaaagaaagcgccatgtcgaaaagttccgggtaagttttgcctcatcaaattgtttgaaaacagatatactaattgctttattttcccgcaaaaggcgcgatcgagacagggagcgcgaccgggagagagagagggagcgcgaccgtgagagagagcgcgacagggatcgtgagcgggacaaccggcacgacagtcgcagtcgcgactatgatatgggca

SEQ ID NO: 37028 - DNA, 1603 bp, DROSOPHILA
gaatagtcgttgtcgttggaacacgttttgccagcagaaacaaattcttgaatagaatttagtgacttattcgacaaatccatttaattttccatttccattttcatttcaaaccgctgccatgccgccggaaatggagatcatagtgggcacctacgaggaggtcctgctgggcttcaagctcatcaaatcgccgactgacggcttgaccgattccgtcaaatttgagctgaaacagacttttgcagacagctcccatgcaggatccattacatcggtggccgtgcagtggccttgggtggccagtggcggtaccgacgacaggatcttcgtctacgacatgcgcacgcggaaacagtcgcagatcatactctcgcacgccggaagagtgaacacactgaaattcacacctgacctgtcgcacttgctctccgggagcgacgatggccatatgatcgccacacgcgtgggcagctggaccaaagagggtgattggcagaaggcccatgccggccaggccgtcacccatgtcagttgccatcccagcagcaagttggccttatctttgggcggcgaccaggtgctgaacacctggaatctggtcaatggctgcgtcgcccacaagaccaatttaaagaacaaggctacgctggatttccaaacgggctgtttgtcgtggtccaagcagggcgatcacttcacactgagcggtccattggttctggagatctggggcatcgagaacgcccatgttatgcgtcgcattgagatgccgtcgaaacccatttgcatcacctggctggatgggaacgagtgtttaactggcctggacaacggcaacattgcctggatttccctcaaggacgaggatgatacaccacccaccttcattcttgcacacgaggcaagggtcaaggccatcgcctatctgaacgaattactggccaccgtctccagcgctggtgaaatcaaagtctggaagatcgacatggaaacgcgcaagctggaggagattgccagcagcttcatggactgccgacccaccgacttgggcctgctggatctccgccagttcggcaatgtccaaccggtggaacaacgcattaaagtggaggagaaaccaaaggcgaaagtggagtctgaccaaagtgccaagcctgcagcacctcggggattcgtgaccatcgagtacgagcaggataagaatctggatgccgagaagaagaagggaaaggggaagaagaacaagatacaggcaaagaaggcgcaacagaaagccgaggaatcctcagaagaaagcaactcatcggaagaaaaggagagcgacgacttctccgacagcgacagcgatgtctccagtgatcacggccaccggaagaggaagccaatgaagcgcaagcagcaacccactccagcctccaaggggaaggcaaagcagcagaaaaagaagtagtttttagtagctaacgttatgactatcaataaatattgagttaatctagagatatagataaaaaaaccatagatgaactgtcgatttggctgggatgaacagaattatgaataaatacctctgaacttaagaagttcgatctcattaacg

SEQ ID NO: 37029 - protein, 443 aa, DROSOPHILA
MPPEMEIIVGTYEEVLLGFKLIKSPTDGLTDSVKFELKQTFADSSHAGSITSVAVQWPWVASGGTDDRIFVYDMRTRKQSQIILSHAGRVNTLKFTPDLSHLLSGSDDGHMIATRVGSWTKEGDWQKAHAGQAVTHVSCHPSSKLALSLGGDQVLNTWNLVNGCVAHKTNLKNKATLDFQTGCLSWSKQGDHFTLSGPLVLEIWGIENAHVMRRIEMPSKPICITWLDGNECLTGLDNGNIAWISLKDEDDTPPTFILAHEARVKAIAYLNELLATVSSAGEIKVWKIDMETRKLEEIASSFMDCRPTDLGLLDLRQFGNVQPVEQRIKVEEKPKAKVESDQSAKPAAPRGFVTIEYEQDKNLDAEKKKGKGKKNKIQAKKAQQKAEESSEESNSSEEKESDDFSDSDSDVSSDHGHRKRKPMKRKQQPTPASKGKAKQQKKK

SEQ ID NO: 37030 - DNA, 2537 bp, DROSOPHILA
aaatcaattgtacataagtattttgtagtattcagctacttcttcaatgctttcctcttacatattagactttgattaacattccccttttaacactacgccactgtaggtgtttgccaacgtctaaagcatttcggtgattgtgtcagtttgagtttttgcaaatttgcatcggattattgcaataaacataattatgcgcgctgcatatgatttttcaattaaacacatgccaaccctgcgtgaaaaaccccctctttgaggggttatcattgtggactcctgggtctttctgctggggcgtggcaaataaagggttaagctggctttttcggagatggaaaacgggggactagatatttgataccgagggattctgggatgacatgaccaaccaattgctgctcgttgcgggtgtttgtaatgcatatttgttaattaagtgtcgcatatgtgtgaaaaacccccaaacacccagcatgtggtgccattctagcggtgcttaagtggaatcaatggattgtaatgcaaagataatcatttttagcaaaaaaaaaaaaaaaattaaataaagaacgaaaaaaagtggcgcacatataattatatttattctgaagagcctttgccttgagtggaaaaatggaaaaacagaatggggcgttgccaatgagacatatgccacgcactcaacagaaattgcagaaatttcaattagatgaggtgttgaagctgaaattttgcggtgcaattgaatttgtgtttgtcatttcaagcgtattgcacttgatgactggctaccccattcttattcccaacatatcgtaagccataacgaaatatttttgtctttgaaagtgaagtcattatattgatattcaaggtaaaagtaaacttaaatatgaagaagaagaacgcttgtcgtgtcatatggatccacccggaacatatcaaaaatcactatataaaaaaaaaaattaagaaaaaaaatgtttatatacccttaagtcagggtaacagtagccacaagtcctgctactgggacctcacgatccaacaaggataactgcaacagatagtcgcctttgggtgcattgtccggtaggaaattggtctccaattcgtagttatcgatagtatatttgcctttcggaaatgggcatgtatcctgatccggtaaattggaagccttttgtatgcttggatacgagtcctcatcctctttaatgaactgacagaacggctttttaacagccattaccatcgaacccctttgattggcattggaatcgtagacataaaccatgagaacaatctaaaatgaaatatattaacgattgttaaataaagatttgcaggaaagttgctcggaagaaggtatatatacgatatatttcaaatcacttaccttctgctcatcggccatattgagtttgaattcaaagtctccgctaaccacaaattgatttcgtgagacctttttcatactcagcgttccccagtctacccaattttcctgattttcgatggtgtcgtccatcgtaaaggtgtttagctccacactgtacggcttttcggctcgacaactatgaaccaagagtatcgaaagcaatagtgtaattggacccattctgaaacggatggaccctgccattgtgctactgtcactacaatgtcggttgtcggaataaatctccaaatatatatgtctacaaagtactggggaaatttcatttcgcacgccaaatcgttgtttaaatcctattatgtgcatctatctggatgtatctttttgccgtaatttttatgagttttaattgtggttgtcatttcgtgcatcgcaaaaattttgcgacaaggttaaaactagtttatgaacatagctcgtaatagttgtttgaaatctgtgagcaccatttaagtgaccttactagaacttgtctcgttaatacaaagtttaaaatatatagatcatcatcgaatgcgtttgtgtactgacgtatttgaaatggctccgttgagatgtataattgtatttgcgttctttcaaatccccgtttcacctgtttgccaacaattgttatccgctgtctgctcaacttttccgttgaaattctataaatattttataccaactaatctcttaacactcaattgagacatgtaaacttttaatagcatttgcttcactctgccaaagtctgatgaagtaaaacgatggggaaaatgggaaatattggtggtctggagaccttgttttatggcctgcagcagttttcgtgtttgaacatcaaaagtaataaattcatcgaaccattacaggctagaaattcagcggctaaggattttgttgttttaggtcgttgctcaataacttttcgccggcttttcccactttacttacttttccatcggtcttgccgttaattttccgcgaactcccctgcgttgtttgccgttgtttttgcctcgttttccaccgtttttcctcctcgactgttgctgctgctgctgcaaagttatttaggtaactgtcttga

SEQ ID NO: 37031 - DNA, 444 bp, DROSOPHILA
atggacgacaccatcgaaaatcaggaaaattgggtagactggggaacgctgagtatgaaaaaggtctcacgaaatcaatttgtggttagcggagactttgaattcaaactcaatatggccgatgagcagaagattgttctcatggtttatgtctacgattccaatgccaatcaaaggggttcgatggtaatggctgttaaaaagccgttctgtcagttcattaaagaggatgaggactcgtatccaagcatacaaaaggcttccaatttaccggatcaggatacatgcccatttccgaaaggcaaatatactatcgataactacgaattggagaccaatttcctaccggacaatgcacccaaaggcgactatctgttgcagttatccttgttggatcgtgaggtcccagtagcaggacttgtggctactgttaccctgacttaa

SEQ ID NO: 37032 - protein, 147 aa, DROSOPHILA
MDDTIENQENWVDWGTLSMKKVSRNQFVVSGDFEFKLNMADEQKIVLMVYVYDSNANQRGSMVMAVKKPFCQFIKEDEDSYPSIQKASNLPDQDTCPFPKGKYTIDNYELETNFLPDNAPKGDYLLQLSLLDREVPVAGLVATVTLT

SEQ ID NO: 37033 - DNA, 2315 bp, DROSOPHILA
tgtgttgtcgcgatgagaaacgtgccgatgcataatcattcaggccattatcatttatttcactcaaaggtgtcgttgccgtttcgcttccgttttgcgccgtgtgccacctgcaaaaatcaaaaacacacgcaccgccaacagaacggaagtaaaaacaaaaacccaaagcttacctatgcatagccaggagatttttggccctaagctccacggtccgatttgataaattctggaaaatacaattaaacggcaattttcaacatgcacatattaagtggattttacaaattatgaacacgaaacatttctcttaatttttatcttacatattcaaagaatattttaaagatagaatatcgtacctgaaatcttaagcactgtgaacggttattaagtttccctacatctaaaaaaaaaaagcaacagcgcacaaacgtcatactgctctaaaaatgtatcaacccgaatgctacggtaacccactcatccaagccacaaattctgcaaaacccatagtccttttgggtggacagtgtacgcgatttttggcctatttgtttaggtcacaactataaaaatctaacaaactatagcgtaatgaaatcaaaataaaacgggacccatatttccgtgaataagtcaacacaataagagaggcaaccatatattgtgttgataaaatagcttcacgaccgtggtaataatacattttgtttggattataaatatgaatgtgattcactcaatactggaaataaacatagttaccatagccagaaacgtaagttgattgtcacagtcctacggctcgaacatttggatatagtttagttttctctgacccggtgaacgataagcaaccaaaaatttaggaatacaatacaatacaatacaatagaatacaaaatttataaattttttttctttacaaaatcgcaagcaacagtatctaggaaaatccaatacaatccaattcaatccagtagggactgaagtcatggcgttaaagatgaatcaataccagaaccaggtcaagataaactacgtgcaacaatatgtgggtagggtggctggtcccctagtcgagcccattttccccgtgccgcaaatgtcatcggcaaccctacgagtccgtcgagctgtcgtcgaatcctatcgcggaccccaaattgctcccgatgatgccatgctcccgatgccgccccacaacaaggctcaaaatatgtctgagattctgcacgaccttcaattcaagctgaaagatttcaagctgtggaatcaagtcattcgtcttctgaagaaacgggtctagtctggacgtatagatgtaatgcgcaactgacggatcggagtctacgccttattcctccgtctactctcaaaatcccaactaaaaaagttcgaattgcgttcggtgtttggttgtacaatccattataaacaccgtaaaatcgattacatgtattttaagtctggcgtcctctccaaatttgtattcacaaattatttatcaaatgttaatcaaaattgaattacaaaaaaaaaagtgcaaggaataaagggtgcaagcaatgctaacaatgtgtaactatccattcataactctcaagatcccacattacacgcgatacgttaaccaacgatttgaacaccattccacatagcgagcaatttaaatgtattaagagtggagttgggacatctggccaggcccaaatcgcagaaggccaacacttgcaaactggaacaataacaatggcaaaaagtgcaaaaacaaaattaaattccaacattaaaataagtttttaaaactaagcagcgtggcttatgtcacaaaaagagtggcacaaaacaaagcagcaaaaaagcccagcagaaccacaggacagacggcatttagaatataaatttagttaaacaaatctcggacgaggcgacctccccaaggtacaaatgcggccagagttgccactgacatgtataagttttctcgcgaagaaccacgctgtccgaaaatgcagcatcacctgtagttgtctattcaaaaatgttattataaatataattaaataattaatatcttagttttgggtttttaaagaaaaagattaggtaatattatttaaggttttgttgtgtttgtgtataattatacaaacctaatagaacaccgtttaaatcttaattaatatattttttaatgctaaatttaagacaataataatcccgactgtagggcactggcaaaagctttcgaccccagacccccaaagtgcatttcatacgttttagggttagggttaccgcggcac

SEQ ID NO: 37034 - DNA, 315 bp, DROSOPHILA
atggcgttaaagatgaatcaataccagaaccaggtcaagataaactacgtgcaacaatatgtgggtagggtggctggtcccctagtcgagcccattttccccgtgccgcaaatgtcatcggcaaccctacgagtccgtcgagctgtcgtcgaatcctatcgcggaccccaaattgctcccgatgatgccatgctcccgatgccgccccacaacaaggctcaaaatatgtctgagattctgcacgaccttcaattcaagctgaaagatttcaagctgtggaatcaagtcattcgtcttctgaagaaacgggtctag

SEQ ID NO: 37035 - protein, 104 aa, DROSOPHILA
MALKMNQYQNQVKINYVQQYVGRVAGPLVEPIFPVPQMSSATLRVRRAVVESYRGPQIAPDDAMLPMPPHNKAQNMSEILHDLQFKLKDFKLWNQVIRLLKKRV

SEQ ID NO: 37036 - DNA, 3125 bp, DROSOPHILA
cgatgacgacgatgaatgtatttaagcaattcaatggtatttcaaaaacagcacacagtacaaaaaaaaaaaaaaaatacaaaaaaatattataaaaaatttttaaattaaataattaattttaattagataagtattgtaacagcatgaaaagtggatgaacttctttatgatgttatgtcaatattgtacccatataatattttacatagaacaactacttccaaaaaatcatagaaggcgattaagaaattaaaaaatgtaattgtattaaacctttttttttttgagtgcagcgccacctgcaccacccacagctgcagcacttcatcccagtcgagtggcaagcaatgagctatgcatgcaattcaagtgccacatctgcaagtgcagctggaaatgcaactgcaattgcagtgactgccttccgattcccagacaacaaccaaaaaagtgcacagtccacggggaagccccaaaaatttcggttggtttgatggggcttgcagatccgaggggcattccagcttccattcccatgtggcaccacttggtatctgtttgtgtccgtaattgtgcataattgagttgagccctccattttcagaggtatctttgtggcacgggcaaatggtatggaggaataaaggcgggtgggcaatgtgctttatatctatgttccaaaacgattataggcagtttaaattcactgaaaatatttaaataggtgagattcgattggaaaagcaaaatagttcgatattaagaagaaatacttagcaaaataaaggtttatataacaatacactttatgttaggtggaattttatttttaacaactgatggatgatagatggcgttgatttagtcgaaatatatgtcaaatagatgtgacaccccttcgatttagttttcgtctgacattcgtttgaatagcacacaatcgcgtagatttcgtataacatatacacatagttttgtataaaggaaagcgcaggctatggatgtcgaaacaagtctggatatcgaagaaatgcgccgaaggattcagcaaggcatcaacagatgctgtgaacaactgcttgaaatagccatgattttaacccataaaggtggtcaggttttaaaccgtttgaagggagcatcattcccggagctcgcccaaaatagtgaaaatatcggtaatggttcaatgtccgaaaatcagaatcaaaggctcgatcccatgacaagtgcacaatatactactttaggatttggaaactttgatggcgagggggactacttgcggcagaagaataaaatcaacattcaacttccgcgtcttgtgagcgtgacttgcggctttgccaaggatcacataagatatccggaatataatcgtggaaagtttggtgaggatgcctggttcatgtcctccagtccacaggcgtgcataatgggcgtggccgatggagtgggcggttggcgaaattatggcgttgatcccggaaaattcagtatgaccctaatgcgatcctgtgaacgaatgtcacatgcacccgattttaagccgaacagaccggaaatactactggaacgagcctattttgatctcctagaccaaaagtgtcccattgttggcagctgtacggcgtgtattttagctcttaaacgagatgatagcaccttatatgcagcaaatatcggagacagtggttttttggtggtgcgatctggtaaagtggtttgccggtcccaggagcagcagcatcaatttaacacgccctatcaattggcatcgccgcctccgggttatgacttcgatgcagtatcggatgggcccgaatcagcggataccattcaattcccgatgcaactgggcgacgtcattctgctggccaccgatggggtctacgataatgtacctgaaagctttctcgtggaggtccttacggaaatgtctggcatatcgaatcccgtacggcttcaaatggccgccaatacggtggctttaatggcccgcacgttgagcttcagtccgaaacacgattctccatttagtcagaatgcccggaaacacgacatcgatgcatggggtggaaaaccggatgacattacggtcctattggccagtgtcgtctagaatagatcggatatccaaggctatatacaatcattgaacagccacttcgtagcaaattttactgacaaaaaagaattgttccaaaaaacttttcaatcacttatcacttaacacaatcacttatagtagatattcaatcatttaagactcttttcttttcaactctgccatcacaaaccaatttgttttgtacctctttttgtttcaagttcggcctacaactatgccagttatcgaacaaaatttttaaagtgtaataaaatttttgttttaccatatggtactgatattgttattattaagttgcttgctctgtttgttatgttctctccaaaacaaagtggtcaataaaccatgaataagttgagaaacaaaatctgtgcagaatgtcaagtaagtgtcgtggccctaataaacttaatcaaatttttaccatcttcgtgcactgcttgcaccgatgtcctttttctttcttttttggtcctgccaatgtgtgacgtgacatacgatatttgagtttggagttttgtggcttttaacatcatttttttttagctcttaaccccgcttttgtgtctgccatctatgaggtgttaatgctttgtaaagtttgtagaaaaaaaaaaacaaccaactcaaaagcaggagccaaagaattccgagcgagagtttggggatgggacacaaaaaccttgccatcaaacaataaaaaaaaaaaccagcaaaaaataaaagagaaaagaaattccaaaccacaaagcatttttatgagtctcgtagtgtgtgtgagtaattctgtctctcacatttctttaactctgtctctctcttttggactcacgactgcatttttttttattttaagtggtcttttacttagtagggccacaacatcggattttctttgagaaaaaacttagcaccaaggtgaaagagtggcgaagaagaattggaaattattcgaagtttgttcttctaatcggttgatggacggtggcat

SEQ ID NO: 37037 - DNA, 1125 bp, DROSOPHILA
atggatgtcgaaacaagtctggatatcgaagaaatgcgccgaaggattcagcaaggcatcaacagatgctgtgaacaactgcttgaaatagccatgattttaacccataaaggtggtcaggttttaaaccgtttgaagggagcatcattcccggagctcgcccaaaatagtgaaaatatcggtaatggttcaatgtccgaaaatcagaatcaaaggctcgatcccatgacaagtgcacaatatactactttaggatttggaaactttgatggcgagggggactacttgcggcagaagaataaaatcaacattcaacttccgcgtcttgtgagcgtgacttgcggctttgccaaggatcacataagatatccggaatataatcgtggaaagtttggtgaggatgcctggttcatgtcctccagtccacaggcgtgcataatgggcgtggccgatggagtgggcggttggcgaaattatggcgttgatcccggaaaattcagtatgaccctaatgcgatcctgtgaacgaatgtcacatgcacccgattttaagccgaacagaccggaaatactactggaacgagcctattttgatctcctagaccaaaagtgtcccattgttggcagctgtacggcgtgtattttagctcttaaacgagatgatagcaccttatatgcagcaaatatcggagacagtggttttttggtggtgcgatctggtaaagtggtttgccggtcccaggagcagcagcatcaatttaacacgccctatcaattggcatcgccgcctccgggttatgacttcgatgcagtatcggatgggcccgaatcagcggataccattcaattcccgatgcaactgggcgacgtcattctgctggccaccgatggggtctacgataatgtacctgaaagctttctcgtggaggtccttacggaaatgtctggcatatcgaatcccgtacggcttcaaatggccgccaatacggtggctttaatggcccgcacgttgagcttcagtccgaaacacgattctccatttagtcagaatgcccggaaacacgacatcgatgcatggggtggaaaaccggatgacattacggtcctattggccagtgtcgtctag

SEQ ID NO: 37038 - protein, 374 aa, DROSOPHILA
MDVETSLDIEEMRRRIQQGINRCCEQLLEIAMILTHKGGQVLNRLKGASFPELAQNSENIGNGSMSENQNQRLDPMTSAQYTTLGFGNFDGEGDYLRQKNKINIQLPRLVSVTCGFAKDHIRYPEYNRGKFGEDAWFMSSSPQACIMGVADGVGGWRNYGVDPGKFSMTLMRSCERMSHAPDFKPNRPEILLERAYFDLLDQKCPIVGSCTACILALKRDDSTLYAANIGDSGFLVVRSGKVVCRSQEQQHQFNTPYQLASPPPGYDFDAVSDGPESADTIQFPMQLGDVILLATDGVYDNVPESFLVEVLTEMSGISNPVRLQMAANTVALMARTLSFSPKHDSPFSQNARKHDIDAWGGKPDDITVLLASVV

SEQ ID NO: 37039 - DNA, 2219 bp, DROSOPHILA
ttataattaaaattcatatggaaattgtcgaaaaaagcagccactacagaatggaaggcgagaacaatggcccgctgatgttgttgttgaccaaaagatttcatctaaaagagacccaagaaatgcagtggtcgaaaaagagggactccgagctgcgggtttattgtttgcggggaacatgtgttcctccaacaatccccttccccttcgagtttccctcaatcttttccctgccaaaacaatgtcagcttatagaattagaagagctccaaaaggggttacaagtgaaggtccagaggaacgaaggggtggtctctacctgtgcaccacacatatagccaaaagcactgaaaaaaatgctccatcgaaatacttaagacataagtactaccactaaagcttgaataactaaaggctaaaactatttttgctgctgttagtaattatccaattaagtttatttgaatactatgattcgaaattgtagtatacggaatattatatttttttttgtagtgtacacaaagcacaatggtcagaggagccagatggaaaaacgcatgccggctgcttattttcttgttgtcgtttcatttttggcacttttatgcgataaaatatttaattatattcggcagcttcgtttgtgcattgtgcggtggcctttcacagccgttttagcccattttacatcaccttggggagtgggcgtggctgaaattgcatttcgagtgtctgccgcaaagtatgcaatgatttcggatgccttttccatttgaaaagtggcaggaatgggcattacaacgttttcaacagaataaattgaagattaccctgcgataaaggtagaatttcgaaaatagtatggtattcaagaaaccaattggatatatactgttaaaccatagattataagatttggaaactattcttaagcgttgatcagaggagctaagtgtatttctacaaattgtttgtgttgaatttagaatattcctttttaaccagcggccgtggttgttgctctggttgtagtggttgttgtggttgtagttgttgttgttgtcgtggtggtggtggtggccaatggtcgcttgatgatcgttatccgtatacatccggcatgatccggatgctcaccgatgggcgccgtgtcgccaaggcttaaacactccagggcaaccaacagtgcgaatatgtgctttatggattgcctcatcgtgatcctcggcccgagaattcccccaaacaactgattgtgttcaacggcgcttccattcatttttatagttcgcttttcttgcagctccattcaattggccacaatgacgacggacaattggatatgttgtatcaacaaatacgatcacaaattgcagcctcacctctgaccatgggccatgtagggtatggcccagcctatatatgtatactgtattttctctccaacatcagatagctttaatttcattttttttttgtcgttgaacttttgtcaaattaatgccgattttaatcgccgcgcgggaagtccggccaaatggtttcagacgttacatatcaataatgaaagtctcacaaaagcgaagagattttagataataaatgatgcaaattgtgcaaaatgtagaattttatatttcaatgaattcatttcagtatcttaaaacgagataagatagatatattgccaattacgaataaataaaaacgaatatttactaaaactgtggtttaaaacactggaactattttttttttttttttgctggaatggtttttctatattttttgaagctataggattacataatggtaggtttcatttaaatcgtccgtcaatggaaattttgccagttttctcgtgttttgctttcaatttatttaacccgaagaactggcggtggtggtccgaggtggtggaggagcaccacgcggtggtggtgagccggtgaagttgcgatgatgaccggcagcctccagtccgcgcaccaaattcactccagccacggagaattgctagaataaagggcacgaatatttcgaatatgcgcaatctgtaatgttatcgagcatttaagttaccagcagacagcagctcatggccaaaaggaacagtagacagaaacgcatcttgatgtggaatgattgacattggcctcgaacacctcgcttttatgggccaccaattgtttaaccgatttcaaacaaatatatta

SEQ ID NO: 37040 - DNA, 219 bp, DROSOPHILA
atgaggcaatccataaagcacatattcgcactgttggttgccctggagtgtttaagccttggcgacacggcgcccatcggtgagcatccggatcatgccggatgtatacggataacgatcatcaagcgaccattggccaccaccaccaccacgacaacaacaacaactacaaccacaacaaccactacaaccagagcaacaaccacggccgctggttaa

SEQ ID NO: 37041 - protein, 72 aa, DROSOPHILA
MRQSIKHIFALLVALECLSLGDTAPIGEHPDHAGCIRITIIKRPLATTTTTTTTTTTTTTTTTTRATTTAAG

SEQ ID NO: 37042 - DNA, 2273 bp, DROSOPHILA
atatcataaaaagtgtgtgtgtgtgtgtgtgtgtgtgtgcatgtgtgcgagcataatgatttcgatctgtctttgctcggtcgttataaagtcggaaaagacggacacatatatgtaggtcgaagcaaaagaaatcctggcagtttatttcgaatattcgctatctattgtttagctgtatagacctaaatacacatccatcagattcagctttttgtgggcgtggcgcggtttcccacatttttcaaacgtagtaattctacacaactggaaatgtgaggatactttagttgagatcgtttgctagttgaacattcaaaataaactgctcagcgaagaatttctagtgcatcgatgggttttcgtgttggatattgaatgttgttggtcaaataaatttgaaaatcctaaaaaattgcttaaccaccggtattaatatgtatatggtatataaaccgttctttttttactcatacttaagactacaaaatatatatatatatatagaagaagatgggtattcttacgttttgcgaagctgatgttagtgaaaattatttaaagttaggtctagggatcgtaagcatatatgtaaaagtccgagttctttttcatatagctgtcggtgtagaaaactatttgatagatcatctctataaatacgttagtttaactgaacacatttttgaaaaatcaaacagagcttttccaacttccatgcttgtgggtgttgttgttgttgttgttcttatgcgtgggtgtgtgcctgtgtgtgggcatcggtatttgttgttgttggcagatatctcagtctaaaatgctcacacgcacacacacacacccacgcctgaaaagtgtctccatcgtgtatctaagtgtagctaaatacgaaaaaaaaaaaatggctaacgaaaactgaagatacaaataagaactatgtttaacatgaactaagtgcggtggttctcgggaggggactggctccggatgtggaggcggatcagaggagcatcatcaaaagcagcggcaggcccaggaccaacagcagcaccagcaacactagcagccacagccacagccagagccaagtggcgatggttccctggttcccagcctcatcgccgacaggcacagccaccgctggctgctgcagttgcgcgtccatctcctcttccacttcgttcgccgccgccgttttgttcttgcggccgccaaagcgacgacgctgcagcaggagcagcaggcgcaccagccgctggtagcccgtacccatgggcagtgccagcgacacgttgttaaagttgctgatggtagtggcttagcgactgcagttggtactgatggggatgtgggtgcggatgcggatgcgcgtggggatgcgagtgtggctggggttgctggtggggatggggttgaccgtgctgtggtgggtgcgcatgaccccgggcatggccatgcatgtgcagctgccgcgtgctgggataaaagttcggcatcagcgagtgatacgcgatcgctgcgcccgatcggccgttgttattgctgaccgtggacagcgcaggtggtgctcccagtagtgggggtcttcgctccgatcgctcgtagctggccacgctgcttggtgctgctgaagctgcagcagctgcagccgcagctgcaactgcagctgatgctgatgacgatgctgttgctggtgtattgctaaccggtgtggctgctactgggattgctgctgctgtccctcctcctcctgctgctgtagctgttgctaatcccacagagctgctagccggcgtgtccagcaaatgatgatgcctgtggtgatggtggtgatgatgatggttgtgtccgttcactgagtcgctgatggcgatgttgatgttgccgccgttgctgctgctgttgttgttggtaatgacgccgctgctgctgctattgccgatgttgttgtgattaccagcgctgttgttgctgctgctactcgcagccaccgttgttgtcttgcactcagctgtggccgatgtccctgccgccgccgtcgttgtcgccaatgttgctgttgccactgccgtcatcagattgcaggagtcaagtctttgtcatttggagttgctctgcagggccgcattgatctgggtccacagctcctttttgcatgatttcgatctgcaacaggaatcgaccacatagtaaacatacttcaaagtacacatttcaggatctcttaccgcttgatagactgcagccagtccttgaattgcgcgttcccctcc

SEQ ID NO: 37043 - DNA, 273 bp, DROSOPHILA
atgggtacgggctaccagcggctggtgcgcctgctgctcctgctgcagcgtcgtcgctttggcggccgcaagaacaaaacggcggcggcgaacgaagtggaagaggagatggacgcgcaactgcagcagccagcggtggctgtgcctgtcggcgatgaggctgggaaccagggaaccatcgccacttggctctggctgtggctgtggctgctagtgttgctggtgctgctgttggtcctgggcctgccgctgcttttgatgatgctcctctga

SEQ ID NO: 37044 - protein, 90 aa, DROSOPHILA
MGTGYQRLVRLLLLLQRRRFGGRKNKTAAANEVEEEMDAQLQQPAVAVPVGDEAGNQGTIATWLWLWLWLLVLLVLLLVLGLPLLLMMLL

SEQ ID NO: 37045 - DNA, 2288 bp, DROSOPHILA
aaaggaaaataagcaaacgaatgcagtggatgggcaaatgacgaagacgaatggaggatacgaaagagaaacagcgacgaggacgaactgcgcagtcgcagccagatatccagatattacatgatgatagtgctgtgcggcggcgcacaggatacagaaaacgtgtaaggaacgtctcttggcaggcccgaaacaaaaaaaaaaaacaataccccagccacatgcacaagcgtaatgagccacagggaaagacaaagggacgcaacaaaaaggtaaaaaggaaactcgtataaacgaatgaaaataaaaaacgttggcagccaaagtcgtgattttgacttcagcgataagcagaggacttcgaggaaatgcggggaaacgaagaagacaattgcagacagagggcaacaacaattacagcctgctcgttgttgtgcctaagtcaattttacagaatttaccaaaagcgaaaaggtcatgcgtataattacaggcagcacagtgtagccatattgcaaatagccaaatgcgaccaagctagtaaaacatagaactaaagcatatcactctacttagcttaaaaagtaaattgtgtagcaagtaattgattatttaacgctatacggatataaatctgtataaaatgtacatgtaagtttctcattgtaaagggaaagttataggtataaactattttggttgccttatggttttaaaaacaattaaggaagtcaatatcttttgtatgcgacatatgaaagcttcttatgagaaagtctttcttaattcctgaataaaagaggatacttttttgatatctttaggacgcacacttttcgaactctaaaaactgtcaatgttgtacaatgtttttcggattttaagaagctctcttcagtttagatttgtatctgtgattttcacaactgtagtttcactggtgtaatgctcaatggtccgggtacactgccctaaatcccgccctagcaacaaggagatgctactcaccataatgtctgccgcaggtggatgtgttggccatggccgttccattgccgcccggtgtgcaggaaccagaggctcctgctcctccgaacggcggtgctcctgagccgccggccacagccataccgcccatgccgctcaagccgccattgcctgcgccgctgcctgcagcgggcttcttccagccgcgccagttgttgcacagcgattccggttcagagctccagctgcagagggagtcttcctcgaagcggatggagtcgtcgaagctgaagcggtccatttcctccggattccattcgttggccgctgctcctgcagcgtctctgcccgccgctccggctcctgcgccgcctcctgctgctccttcggcgccagcgccgactgcagccgctcctccgcctcctccattgttgttgttgttaccgccgcctcctcctcctctgttgttgttgccgccgttgcgattcgccagcgtgaggctgagattgtgtgtgtttacagttgctccttctactgctgaagctgattcttgttcttcttcttcagctgctcccccgtttgtttgttttcctcagcttcctcttcctccgtctctctcactgttactctcctctctttttggatggatgtatatgtataatggatctctgccaaacgctcaatttaaaatcgtgtaaaaggcgaatttctcttgagcgttcttctcttcctcttttctctctcgctgtgttcctctccttcggttctcccctttcaaactcaagcacactgccggactcgcttgcttttaattaacttattaactgtagatttatgcttagggctctaagtttcccttttagacttaactttaggtttagatttagattttggggagtttaaaaactatttttgtttatatgtacaaaatacgttcagtgcgccgcggtctctgtcgctgcctctgcccgcgtcgactgcgactgctattgtttgttgtcgttgttgttgcatgtgaactttttcgtatcccccaacgaacgagagagcgagatggggctatgctatgcgactgccgaaataagagggccaatttgtagttgtagttcttgttgttgatgttcttgcttctgttattattgttgatgtggttcttgctgttgttgttgattttgcaggggacccccagtcgttgttattgttgttaacgctcctcttttatccgctctgcgctttgcagtccgctttgccgttaattattttttcactccttcgctttgtggctcatcttcgctttatcc

SEQ ID NO: 37046 - DNA, 288 bp, DROSOPHILA
atggaccgcttcagcttcgacgactccatccgcttcgaggaagactccctctgcagctggagctctgaaccggaatcgctgtgcaacaactggcgcggctggaagaagcccgctgcaggcagcggcgcaggcaatggcggcttgagcggcatgggcggtatggctgtggccggcggctcaggagcaccgccgttcggaggagcaggagcctctggttcctgcacaccgggcggcaatggaacggccatggccaacacatccacctgcggcagacattatggtgagtag

SEQ ID NO: 37047 - protein, 95 aa, DROSOPHILA
MDRFSFDDSIRFEEDSLCSWSSEPESLCNNWRGWKKPAAGSGAGNGGLSGMGGMAVAGGSGAPPFGGAGASGSCTPGGNGTAMANTSTCGRHYGE

SEQ ID NO: 37048 - DNA, 2417 bp, DROSOPHILA
cctgttcgggtttagccaccttctctgttggccatctcgtctgatcggacacgtttaatcattttaatgattagactgtgtcccagctcccatgcctcgctctttgccaatatagctgcgaacaagccactagggctgaacggagcacctgacttcgtctttagctgctccctcttcatcgcaaacctggagcagtgcattagcacatgctcttctgttttctcacaaatgacgcagaacaatcgacgtagataggcccgaatgcagccatggtccgtgtgaaactgggttaggtggtagtccaagcatttgtgttggcactctgcccaaaccgccgactcaggaatgagctggtaagaccacctgttctgccactcacccaacagccactcgtcggtaagcgccaccccgctttaggccgagagccttgatctccgatcaattggcggcctgccagagttagtgccgcgtcttcacatattgtcctgaatcctctaatgagcctgagggccatggctcctttcaggtatgaacccctgcttgtagcattgctacagattggtgcagcgtacagcagcgaagccagtttcctggccagatagcttggaccaccgatgttgggcaccagtctagccaatgaagaaactgtgactgatgcattcttgctgccgtaactcgcgtggttctatcatagcacccaggtacttgagggactcttgggaggtcacctgtgtcgcattgacagaggactagcatattctccacctttttcctgctgcttagtacttactgcttcggtcttgcgagccgctattgctagcccggctttccagtggacggcagctccaatcgtggtgttacatttgtcctgcaactctgcaattgttttggcgactgctgtaattgccgcatcgtctgcaaaacagtgcagctctactcccaagggcctgttgatgctcctctactatcgtatcctcgtccagtccactgcaggatagtgctattctttgagctgccgcacagatgccaaatcattgaccgtcgcctctagatcgcttttatacttgggaaagcttcccgaggcttttcccactacttcgagcaacagctcatctagctgagttctccgaattcttctgcccagttcgctaaggctcgggtccgatcttagtttccggagcatctctgcgtaccaagcctcacccgtcttcttcacgatccgtgcctcaggctttttacgcgggcgcataggcttcaccttggtccaatatgcactcgtgctagcattcttggcgacagatgcgtagctgcctgtattggactcgtttgatctggatgtcgccttcccttctcctctaccagtcgtgcggtttgagcgccagaactttgggcacttgtcccttggacacctgcgcattgtgagaagcgtttttggtaggcttttgtactttagtctgggtagcaatgctcgtcaagcggtgctcgctagtgaccccttcgtacaactctatcatcttgttaagggctgaatgttcagaaactaggctcttggtctctcttgtgacggttatgtcggttaagtctcaaatgcggatagcagcaagtttatcttgccattcatcctggtgagtatgcacttcaggtcgttgttctggagagccgtggtcaggtccgaagaccgattaggggatccagctggctacatacgcaaccagatgggtgacgagatgtccaagcacaaaaagttcatcttcctgacgtggatcgggcaggaggtgggcgttatccagcgggccaagatgtccacggacaaggcgctgatcaaggatgtcctcaacgtgagtagccaatagctagagatgccagagcccagaggcagaaatagatcctctcatcactaatcttttgcagaattttgccgtggaacttcaggcgggagtggaggccgagctggacattgagctcttccgtgaagcactgaacctccaagttactttatatatactgcttaccaaactgctcctttctctttaattattatgaattaattttatgaaatttaaaaactgtacattttatgaaatattatacaagcaattgtaaaatcagtttctataccatacattttgttgtgtctatagtgggactgctgaatttctatgataataagacaaaaattttactcactaaacacaaaattctaaagtggacagacatggcagaattcacttaaactagtctagtttgctaaacatacgctggatggatcgactcgaattttataagcgcgaaatgaaaatggattacgttgttgaactaaatagaaaaaattatctagttgctgtagttcccgggctctgcctcgcacttcctagcgggccctgaagagtaccgagtgaagtgcatcgatgtccacc

SEQ ID NO: 37049 - DNA, 417 bp, DROSOPHILA
atgcgcaggtgtccaagggacaagtgcccaaagttctggcgctcaaaccgcacgactggtagaggagaagggaaggcgacatccagatcaaacgagtccaatacaggcagctacgcatctgtcgccaagaatgctagcacgagtgcatattggaccaaggtgaagcctatgcgcccgcgtaaaaagcctgaggcacggatcgtgaagaagacgggtgaggcttggtacgcagagatgctccggaaactaagatcggacccgagccttagcgaactgggcagaagaattcggagaactcagctagatgagctgttgctcgaagtagtgggaaaagcctcgggaagctttcccaagtataaaagcgatctagaggcgacggtcaatgatttggcatctgtgcggcagctcaaagaatag

SEQ ID NO: 37050 - protein, 138 aa, DROSOPHILA
MRRCPRDKCPKFWRSNRTTGRGEGKATSRSNESNTGSYASVAKNASTSAYWTKVKPMRPRKKPEARIVKKTGEAWYAEMLRKLRSDPSLSELGRRIRRTQLDELLLEVVGKASGSFPKYKSDLEATVNDLASVRQLKE

SEQ ID NO: 37051 - DNA, 2975 bp, DROSOPHILA
actcatttaatcaatcaattaatcaaaagttagcgagcaaaagccgggggattgaaacgattgaaaagataaggcgagcacttaaggggtttattggaagaaattaaattaaattttcacgctaatgagcaacgcatcgggcatcggggggaagtcggaatttgcgcttagggatgtcggatggggatgagtccttttgccaggcggttgtgtctgtggggttaaactgtgtgcgttgtgtaatttcttgaagtaatttcggaatttactttgacagccaaaaactaatttcgtcggtggtttttggatttgcggcaagagttcgcaacttcgctttagcatacagactgtgttcgtcatcatcgttctgaagtattcataaatcatagccggactcggtgagtttgggccgtatctttccgcctcatttgcccagccagactcaagaattaatcaaacttgaaatggagccctcaacacgcattggggcgaagtgaatgtccttcggattgtcaaacaggtggctgcggtgtattcagacatgttgtcaatggcacaataggtcaaatggatggcaagtgtatctaaaggaaaggaatatttggtagagctagtcattcatattttctatgcttacttacttttgactgttttgatgggcaggttgaaaagaaggtcattgatttttgctctcctaactgctgttcatttcttttgctccagataatttcatattttcttcatatttcatttggcatgatcgactaaaatttgtactatattttaactacttaatgttagtccccactctgcttatttgctgcgtattcatttatcttgactattgtaatgcatgaagattcaggaatgtcttggctttttggaatcgtaaattaccctaatgaagtactttcccagcttgcccttgtctgtggtccataatcctgttttaaacttaacacaagaaaagcaatttagaaacattggttagaaacgttggctaaaatatatctggagtgggttcgtcgggcttcgaaggaagcgatagcgttggcaacttctggcagcgatcgtgtccaggacgtaatgacctttgacccgtgcgaaccttccaatgcattttgtacagctcctcatcctccgactggccatcgttggccagagcatattttgccatcctggaggtcgtcggctgctcactgtccagatccttctggttcatcttggtcttggatacggaatcaccaggacgtgcctgcaatgtggacaaagtctctgaaagatctcccacggaggtgtccgacgagcgattgcccaaattccgcttccagatgatgttttgcttaaaatctgggattttcagacgcggcctgtcgaacgccagtggcccaacctgcgcatccatgcgcatcttgaccatatcggcgattctctggccggaacgatggctctccttgctgctggcatcagtggattcccttttggtcatggatttcaaattaaagtccgaccaaagcttcgcaaacctctcggatcttggaatattttgtttcttggcgtttgcgttagattgttggttatccgactcctcagctccatcttcctgctccaggaaagcaaatcgatcaacgtagtagggcttctctggcggttttcccttgccggaagtcatctgatactcgatcatctggagtttgtacacattaagttgataccgcatgttgcgcatccggcagcgtatgaattcggcactaagatgactgcccagttggctggcaatcttctcccatgaactgcgcttcatgtccgcatccttgtacgccggcagcgtgatcttccacaggcacggctgctccctgtagaggtccaccaggcgcaaattgaattccttctcctgactggaaggcagtgatgatgcagcatggcgcatggccaataaacgcttctggcgctcgagacgctgtatttccatcattttggagctgttgtgtggatgtgtctattgcttgtctatccggatgaacgaagtgtatccaggggcctgctcaggttgctttcatgggggaatcgattgaatccaccttgaaatattagctcttaaagtctgtcagctgttattacggatgctgacgtcttggataccaggtaagctagcagcaaaaggtttagcctgcgactgagcctggccaggaatgcgtaaccgctcgatgtcagcactcacatgcttcagtgcatccgcataatttgtgctccgggcaggatgggcggctcaaaaggcaacagaatgttgcaaccgcatagttgccccgccagttggcaggtggaaggggccaacggaacagacggaggcaaatgcgtctcatgaaagttgcaacaaaggacacggcttgcactcacaagtaagtgggtggtggtgggctggggcatggatatacgaagggacatggcacttcaacgacaacaaagctcagaaggaagctcgcaagtgctgccggtttatcctttttttttttttttttttttgtatagcttgccctgcatctcgccgataaattcccaaaattccttagtgttttgcaaattttcggcagaaatttatcatccgatttctagcaatctttgcgagtgacaacatttatcttttgataaaaccgataaaggtcaggcattttgttatagttgtaattccttaaagtttcggcatacgctcaaattctaagaacatcatgtttatgaaatggaatagttagttgtaaaatattttatcccgaatagttttatttttacccgtcgaatgagtacatctctacgactcacatgatgggtgggccactttagtgatattaaatcgcagctcaggccaaatccgtcaacgtaaagccgtcctgctccttcttctgggccaccttctgatcctgctcctgcttccattgacatctgcaggatgcgtgtccaatgactactcctcgaatgcg

SEQ ID NO: 37052 - DNA, 975 bp, DROSOPHILA
atgatggaaatacagcgtctcgagcgccagaagcgtttattggccatgcgccatgctgcatcatcactgccttccagtcaggagaaggaattcaatttgcgcctggtggacctctacagggagcagccgtgcctgtggaagatcacgctgccggcgtacaaggatgcggacatgaagcgcagttcatgggagaagattgccagccaactgggcagtcatcttagtgccgaattcatacgctgccggatgcgcaacatgcggtatcaacttaatgtgtacaaactccagatgatcgagtatcagatgacttccggcaagggaaaaccgccagagaagccctactacgttgatcgatttgctttcctggagcaggaagatggagctgaggagtcggataaccaacaatctaacgcaaacgccaagaaacaaaatattccaagatccgagaggtttgcgaagctttggtcggactttaatttgaaatccatgaccaaaagggaatccactgatgccagcagcaaggagagccatcgttccggccagagaatcgccgatatggtcaagatgcgcatggatgcgcaggttgggccactggcgttcgacaggccgcgtctgaaaatcccagattttaagcaaaacatcatctggaagcggaatttgggcaatcgctcgtcggacacctccgtgggagatctttcagagactttgtccacattgcaggcacgtcctggtgattccgtatccaagaccaagatgaaccagaaggatctggacagtgagcagccgacgacctccaggatggcaaaatatgctctggccaacgatggccagtcggaggatgaggagctgtacaaaatgcattggaaggttcgcacgggtcaaaggtcattacgtcctggacacgatcgctgccagaagttgccaacgctatcgcttccttcgaagcccgacgaacccactccagatatattttag

SEQ ID NO: 37053 - protein, 324 aa, DROSOPHILA
MMEIQRLERQKRLLAMRHAASSLPSSQEKEFNLRLVDLYREQPCLWKITLPAYKDADMKRSSWEKIASQLGSHLSAEFIRCRMRNMRYQLNVYKLQMIEYQMTSGKGKPPEKPYYVDRFAFLEQEDGAEESDNQQSNANAKKQNIPRSERFAKLWSDFNLKSMTKRESTDASSKESHRSGQRIADMVKMRMDAQVGPLAFDRPRLKIPDFKQNIIWKRNLGNRSSDTSVGDLSETLSTLQARPGDSVSKTKMNQKDLDSEQPTTSRMAKYALANDGQSEDEELYKMHWKVRTGQRSLRPGHDRCQKLPTLSLPSKPDEPTPDIF

SEQ ID NO: 37054 - DNA, 7588 bp, DROSOPHILA
cccccccctcaccacatctcgcgaaagtgacccggctacattctcatccttcgattgcgattgcgatgatgattccaattgcaccgcagctgtggttaattgtagattaaaaatgtagccaatgcggttgaggttcagggaagcgttaaacgtctggtcaaactatgggcgttgggcaaacaaagttggaccagcacactttaacctggttaacccgcacccgcatcagccattgcatcgactctttaactgttaaatgtttaactgccgcgacttgcaattaattacacatgaggagatctgtaagcatgcatgcgaaatgcacggctagctcctgctcctgctcctcggtatccttatccacatgctcctcctggattctgagcacgggaaggcgggaggccgcccaaggacgctttagaatgcaggcagcgtaaaagattagcccgattagttcaaagggttcacggagagcccacttgagaattccacggcgtaaacacatttcctttttggtccggggaggatggagtctcatgtctaaatccgcgatttgccattgccacatcgttatatgaatatggaatgaccggcatccgaggggtggatttggcctattcaatgggaagacaatcgcagtgtgcgtgttttttatttaatcgaataaaaaaaacatgataattttgaaagtaaaaagtctttccttctggatacttttacttcaggaaggaggcgtaggaaggttgggttttcttcttctgctcattgtctttgttctggttgttgttctgattcttgctttggatgttctggtttttgttctgattcttgctttgcatgttgttctggttgttctgattcttgctttggatgttgttctggttgttctgattcttgctttggatgttgttctgattcttgctttggatgttgttctggttgttgttctgattcttgctttggttgttctgactcttgctttggatgttgttctggttgttgttctgattcttgctttggatgttattctggttgttgttctgattcttgctttggatgttattctggttgttgttctgattcttgctttggatgttattctggttgttgttctgattcttgctttggatgttaatctggttgttgttttgatttctgctttgcatgttctgatttctgctttggatggtgttctggttgttgttctgatttttgctttggatgctgttctgggtgttgttctgattcttgctttggatgttgtactggttgtcctgattcttgctttggatgttgttctgattcttgctttggaagttgttctcgttgttctcattcttgctttggatgttctggttgttgttttgactcttgctttggatgttgttctggttgttgctttctttcttgctttggatgttgttctggttgttgttctgattcttgctttggatgttgttctggttgttgctttcattcttgctttggatgttgttctggttgttctgattcttgctttcgatgttgttttgactcttgctttggatgttgttctcgttgttgttgtggttgctgttctcattcatactttggatgttgttctggttgttgttctgattcttgctttggatgttattttggttgttgttctcattctggctttggatgttattttggttgttctcattcttgctttggatgttgttctcgttgttattgtggttgctgttctcattcatgctttggatgttgttctcattctggctttggatgttgttctggttgttgttctcattctttctttggatgttgttctggttgttctcattcttgctttggatgttgttctggttgttgttctgatcattgctttcgatgttgccctggttgttgttctcattcttgctttggatgttgatctggttgttgctctgatccttgctttgaatgttgtcctggctgttgctctgatccttgctttggatgttgttgttgttgttgttgggtgcgccatcatcttggacacgtgctccactttggggaacggatcgtggcgaggaaatacccaagatgcgaatactttgcgtgttgtcacgcgacataccaacattgtgttcgaaagtctgtcgtggatcgggaggtctgtttatttgctgttgcatctcggcgctcccactgctcatgttcactcctacaggtccgccatatggcggaatcttgttcgtgtccgggttgcttccactctggtgataggtattgacattgcgtcgaggactcacaaggttaagtggtgacatgttcatgggcatacccatggagccaggctgctccatccgacttggactgagcatctgcaaaggcaacggaagcaatccgactcccatgcccctgcccatgtgactgacctggttcatgtggttcatattcggagccatattgccgttaaaggacattccgtagtgggatgtatgagtctggtgtgtcggatgtggcggatgtggcgaatgtggcgaaggtaccggatgggtcatatgtccgtaaggattctggctatgggtgccttgattcggactaggaccgtatccacgaccacgaccatgaccgtacccgctgccactgttgacgttctgcatcatgggcgggccggcgctgtggccggtattgccacccacctcgaacaggatcggtcccatgggcttctcttgccgtattggatacatgtgtagcgggtgcggtggtggtgttggttgtgccggaggaggaggtctcatataaatgccactgggacctgcctgctccttgctgaataaagctgcattgtagtcgggatagggccactgctgttggctgtacatcggattgaactggttaccactatagtgttcctgggaagtcgaaggcttcttggattgagtaccagccgggcttccattgtgatagggccacttctgttggctgtacatcggattgaactggttacccatatactgttcctgggaagtcgaaggcttcttggtttgagtaccagccggacctccattgggattgggccactgctgttggttgtacatcggattgaactggttaccactatagtgttcctgggaagtcgaaggcatcttggattgagtcccaggcgggcctccattggggttgggccattgctgttggctgtactttagattgaactggttaccaccatggtattcgtgggaagtcgaaggcatcttggattgagttccagccgggcctccattaggatttggccattgctgttggctgtacttcggattgaactggttaccactatagtgttcgtgggaagtcgaaggcatcttggattgagaaccagccgggcctccattgccattgcaagccacgccaacttttttgggcattggaggtattggaggcattggcggcatctggggcaaaggtggcaacaattcctgatcggactgatcgataggaagacgatggcctgtgatataagttggaatcacattgggtgtcccctgggagcaggacggtgtggtagaccccgacgtgatgtagtttacgaactctccgaagcggtaaggccgctgctggaccttgccgccactgtgctttggatcaggcaccttcgcattcttgtttttatgctcatcatcttcgtcatcatcatcgtcgtcagcgtccacttcgtcgatgttgtctttgcatggcttattattctttacatgttcccggtcctccatctgggcgaactggagtaagccggaggtttcggtgctcgacgaatcggagctcgatgtagaggattccacctgcatattggttttacccatgtattcacagctcggtggatccacgttcagcctcagctgctcaaattccatagggtagacaaatctcacgcggggttgggttagatcagaagccatcttatcgctgccgctttgtgtgctcgcatagagagggtttcctccgttgttgttgttgtagttcgtattgctgaagttgttagagttcccgtcactattgtcgccggtataagcactaccgatgggcccataacgacattgattcggcaggttgcgcggactgtggggaccttggatgcggtagccgcggtatcccccatcttggaagcgcactgctccacctagcctgtgcggctgtgggctattctttgacgccatcggattacccgcctgcattcccggatgtggatgtggatgcggatgggaatgggcataggtatgcggatggggatgaagatgaggatgcggatgtggtgttggtgaatggtgatgcgctggtgaattcggatgcggaaaggcctttggatgcggtggccggggcatgcgatgttgcatgtttattgctagcgaggtatagaatggaggtatgcagattaagtcagcagccagggaatcgttagctaaatcaaacttacgcataggcctactcaagaagccaaacggctgttgtgttggtggtccgctctgtgaggctcctgtcggatacggcggcggtattctcggtccaccgggtcctccgcctggtgccctgtgcattcgcggagcgttaataggtgagcctgtatagaatgcagtcgccgagcaggagggtggcggcggcccaggtgttggcggcggcccatgtgctggcggtgctggaggtgctggtgctggtacaggtgctggtggtggcacaggtgatggcgttggcacacccgccgacgccgatctttcctgattaaagaacatgcagatgcaaaggtattccgtctgagtggtggcttccacatgcttgggcaatttctggggagaccgcggtgttggagccaatgctacctgaacttgaaatgcacaacactcacctggacgatggccagatcctctggcgtgagactgttcggatggatgtcaaagggccgattgagtccagtgaggttcgtccagggacgcggtgtattctatagatggggtcacgatatcatttagcatgttattagattcccaaccttaccgctggcaagaagatactcggatgtagcggaggtgtctccaaaattgcgctggtgtattcggccatctgtaaggttgtcatgtatttaaagggaccctggagtaggggcaacatcaggtcattggctcgtattagaaggtttcgcagcgttgccatgaactcatcccgtttcacacccatgtcgtccagctgcccggcaaaggactcgaaggacggaaactcgggggatatttttaacttcgttggatcttggaggaaatggcgagaattgttgggcctgggtatcgacgctcgtccagtagccttctgcgtggcattttcttctgttggtggctgtggtggtgcttgctgtggtggtgattgctgtggtggtgatggttgtggtgctggtggtgatggtggcgttgttggttttttgtttaagttggcaatccaggattctcttgctttcgattgtggaatatctcgccggttggggattagttcaatccggtgtacttcggtctttgttcccgtattgttgttgttgatgcgcttgccggtggtaggatcgacgaagtagtagctccgaggaatatcgcccccccctggtccgatgtatggccccgttccgtttgcgaggccaaactcgaaggagtttctcggcgccgaattgcgtgctgaactcggtggggtctcctcttcgtttgacagtatggttgatagtctggtacccatgggataaaacacaggtgcgtcagcggacattttaactttgatgggcctgtcctgtttactcgatggcttctggagcagggagtgtgcctggttagcttgttcatcaatgggttcctttgggtgattagttggtaactctgttggctgatcttttgggggacttatatgtgaatctggtggtgaatctggttgaagatctagttggagttctgcttggagatctggttggagatttggttggagatttagttggagatctggttggagatctcgttgtaattctagtggttcatctgctggtggatctggtgggatatctgcttgattatttgctagggaatctgctgaggaatccgctggcgaatctgctggcgaatccgctggcgaatctgctggcgaatccgctggcgaatccgctggcgaatctgctggcgaatccgctgaagagtccgctgaaggatccgctgatgaatctgctggaggatccgctgaaggatcggctggaggatctgctggtgaagccgctgttggatctgcttggggatatgttgggagatctgctgggatatcagcaggttgttctgttgggggatctgctgggagttgagctggatgctcaactaaaggttctggtcgggattgtcgtagtgggtctgcttctagcaccggttccacctccaatccatggtcaccctcctcactcctccgttcgatgagcggaaaaccattgtggataagggccagggcagtggaggccaaggacatgctggatgtgttggacatttccgcattcggtatggggctgaccaagtctgtggagcatagctcctcgccgggcactgccggttccgtcatgctggaaactgggctgagatccgggcaatcctggataaaagaaaggtttcatgattcatagttcgtgtgatttaataaggctatgcttactctagtgcctgggcaaaggatacattatgggtgatcgagttgccttactggcagacgcgtaagctgctgctaaaggacgtgcttggaattgacaagtagtgggggtctttcgcgcaagacaaagcctctaagaccctccgcaactcttgtcgcagcccccaccgctcttcctctttcgcggagatcctgtctgttgttgctgccgctgctgctgtaaaaacatttttgcaattattttaaatatttttcaacacggctttgaaacggcgacgtgccgacgagctggcgttcgggacgaaacccttttgttctcgcatctcgcgccaaaatatttttccgcatttcatttggcgcatattttttactgcctcgccttggcgcgaaattagcgtgaagcaaggagcacggagcacggaggacacagcaaggagcaagcgaaaggatggcgaagataaactttaaataaaacatggcacacaaagggccaaaggggagggccggcaaggatatttggcaggcaggaatcggtcggcgggtggcgggttgcgtggctcccgaaggagagacgtcgaacggcgcggcacagaccgcaattcaaataaaatcctttagggcttttgacttttaactcatccgtttaacgagcgctcatgttcgtgaggcagcaaaatatgcaatcccgtccagggtggggggatttcccggccaggacaacagcacccttgacacctacacacacacacacacacacatatgcgaaggcagagagcccgacacgtcccacggtccacgtccttcgtccttcgtgcttcgtacttcttgccccatgcaattgcaaaacgggagcgaaacaaaacgcgaaacaagcaaatccaacttaagaccaggaggtatgcgacttgcgaatacc

SEQ ID NO: 37055 - DNA, 5688 bp, DROSOPHILA
atgacggaaccggcagtgcccggcgaggagctatgctccacagacttggtcagccccataccgaatgcggaaatgtccaacacatccagcatgtccttggcctccactgccctggcccttatccacaatggttttccgctcatcgaacggaggagtgaggagggtgaccatggattggaggtggaaccggtgctagaagcagacccactacgacaatcccgaccagaacctttagttgagcatccagctcaactcccagcagatcccccaacagaacaacctgctgatatcccagcagatctcccaacatatccccaagcagatccaacagcggcttcaccagcagatcctccagccgatccttcagcggatcctccagcagattcatcagcggatccttcagcggactcttcagcggattcgccagcagattcgccagcggattcgccagcggattcgccagcagattcgccagcggattcgccagcagattcgccagcggattcctcagcagattccctagcaaataatcaagcagatatcccaccagatccaccagcagatgaaccactagaattacaacgagatctccaaccagatctccaactaaatctccaaccaaatctccaaccagatctccaagcagaactccaactagatcttcaaccagattcaccaccagattcacatataagtcccccaaaagatcagccaacagagttaccaactaatcacccaaaggaacccattgatgaacaagctaaccaggcacactccctgctccagaagccatcgagtaaacaggacaggcccatcaaagttaaaatgtccgctgacgcacctgtgttttatcccatgggtaccagactatcaaccatactgtcaaacgaagaggagaccccaccgagttcagcacgcaattcggcgccgagaaactccttcgagtttggcctcgcaaacggaacggggccatacatcggaccaggggggggcgatattcctcggagctactacttcgtcgatcctaccaccggcaagcgcatcaacaacaacaatacgggaacaaagaccgaagtacaccggattgaactaatccccaaccggcgagatattccacaatcgaaagcaagagaatcctggattgccaacttaaacaaaaaaccaacaacgccaccatcaccaccagcaccacaaccatcaccaccacagcaatcaccaccacagcaagcaccaccacagccaccaacagaagaaaatgccacgcagaaggctactggacgagcgtcgatacccaggcccaacaattctcgccatttcctccaagatccaacgaagttaaaaatatcccccgagtttccgtccttcgagtcctttgccgggcagctggacgacatgggtgtgaaacgggatgagttcatggcaacgctgcgaaaccttctaatacgagccaatgacctgatgttgcccctactccagggtccctttaaatacatgacaaccttacagatggccgaatacaccagcgcaattttggagacacctccgctacatccgagtatcttcttgccagcgaatacaccgcgtccctggacgaacctcactggactcaatcggccctttgacatccatccgaacagtctcacgccagaggatctggccatcgtccagaaattgcccaagcatgtggaagccaccactcagacggaatacctttgcatctgcatgttctttaatcaggaaagatcggcgtcggcgggtgtgccaacgccatcacctgtgccaccaccagcacctgtaccagcaccagcacctccagcaccgccagcacatgggccgccgccaacacctgggccgccgccaccctcctgctcggcgactgcattctatacaggctcacctattaacgctccgcgaatgcacagggcaccaggcggaggacccggtggaccgagaataccgccgccgtatccgacaggagcctcacagagcggaccaccaacacaacagccgtttggcttcttgagtaggcctatgccaataaacatgcaacatcgcatgccccggccaccgcatccaaaggcctttccgcatccgaattcaccagcgcatcaccattcaccaacaccacatccgcatcctcatcttcatccccatccgcatacctatgcccattcccatccgcatccacatccacatccgggaatgcaggcgggtaatccgatggcgtcaaagaatagcccacagccgcacaggctaggtggagcagtgcgcttccaagatgggggataccgcggctaccgcatccaaggtccccacagtccgcgcaacctgccgaatcaatgtcgttatgggcccatcggtagtgcttataccggcgacaatagtgacgggaactctaacaacttcagcaatacgaactacaacaacaacaacggaggaaaccctctctatgcgagcacacaaagcggcagcgataagatggcttctgatctaacccaaccccgcgtgagatttgtctaccctatggaatttgagcagctgaggctgaacgtggatccaccgagctgtgaatacatgggtaaaaccaatatgcaggtggaatcctctacatcgagctccgattcgtcgagcaccgaaacctccggcttactccagttcgcccagatggaggaccgggaacatgtaaagaataataagccatgcaaagacaacatcgacgaagtggacgctgacgacgatgatgatgacgaagatgatgagcataaaaacaagaatgcgaaggtgcctgatccaaagcacagtggcggcaaggtccagcagcggccttaccgcttcggagagttcgtaaactacatcacgtcggggtctaccacaccgtcctgctcccaggggacacccaatgtgattccaacttatatcacaggccatcgtcttcctatcgatcagtccgatcaggaattgttgccacctttgccccagatgccgccaatgcctccaatacctccaatgcccaaaaaagttggcgtggcttgcaatggcaatggaggcccggctggttctcaatccaagatgccttcgacttcccacgaacactatagtggtaaccagttcaatccgaagtacagccaacagcaatggccaaatcctaatggaggcccggctggaactcaatccaagatgccttcgacttcccacgaataccatggtggtaaccagttcaatctaaagtacagccaacagcaatggcccaaccccaatggaggcccgcctgggactcaatccaagatgccttcgacttcccaggaacactatagtggtaaccagttcaatccgatgtacaaccaacagcagtggcccaatcccaatggaggtccggctggtactcaaaccaagaagccttcgacttcccaggaacagtatatgggtaaccagttcaatccgatgtacagccaacagaagtggccctatcacaatggaagcccggctggtactcaatccaagaagccttcgacttcccaggaacactatagtggtaaccagttcaatccgatgtacagccaacagcagtggccctatcccgactacaatgcagctttattcagcaaggagcaggcaggtcccagtggcatttatatgagacctcctcctccggcacaaccaacaccaccaccgcacccgctacacatgtatccaatacggcaagagaagcccatgggaccgatcctgttcgaggtgggtggcaataccggccacagcgccggcccgcccatgatgcagaacgtcaacagtggcagcgggtacggtcatggtcgtggtcgtggatacggtcctagtccgaatcaaggcacccatagccagaatccttacggacatatgacccatccggtaccttcgccacattcgccacatccgccacatccgacacaccagactcatacatcccactacggaatgtcctttaacggcaatatggctccgaatatgaaccacatgaaccaggtcagtcacatgggcaggggcatgggagtcggattgcttccgttgcctttgcagatgctcagtccaagtcggatggagcagcctggctccatgggtatgcccatgaacatgtcaccacttaaccttgtgagtcctcgacgcaatgtcaatacctatcaccagagtggaagcaacccggacacgaacaagattccgccatatggcggacctgtaggagtgaacatgagcagtgggagcgccgagatgcaacagcaaataaacagacctcccgatccacgacagactttcgaacacaatgttggtatgtcgcgtgacaacacgcaaagtattcgcatcttgggtatttcctcgccacgatccgttccccaaagtggagcacgtgtccaagatgatggcgcacccaacaacaacaacaacaacatccaaagcaaggatcagagcaacagccaggacaacattcaaagcaaggatcagagcaacaaccagatcaacatccaaagcaagaatgagaacaacaaccagggcaacatcgaaagcaatgatcagaacaacaaccagaacaacatccaaagcaagaatgagaacaaccagaacaacatccaaagaaagaatgagaacaacaaccagaacaacatccaaagccagaatgagaacaacatccaaagcatgaatgagaacagcaaccacaataacaacgagaacaacatccaaagcaagaatgagaacaaccaaaataacatccaaagccagaatgagaacaacaaccaaaataacatccaaagcaagaatcagaacaacaaccagaacaacatccaaagtatgaatgagaacagcaaccacaacaacaacgagaacaacatccaaagcaagagtcaaaacaacatcgaaagcaagaatcagaacaaccagaacaacatccaaagcaagaatgaaagcaacaaccagaacaacatccaaagcaagaatcagaacaacaaccagaacaacatccaaagcaagaaagaaagcaacaaccagaacaacatccaaagcaagagtcaaaacaacaaccagaacatccaaagcaagaatgagaacaacgagaacaacttccaaagcaagaatcagaacaacatccaaagcaagaatcaggacaaccagtacaacatccaaagcaagaatcagaacaacacccagaacagcatccaaagcaaaaatcagaacaacaaccagaacaccatccaaagcagaaatcagaacatgcaaagcagaaatcaaaacaacaaccagattaacatccaaagcaagaatcagaacaacaaccagaataacatccaaagcaagaatcagaacaacaaccagaataacatccaaagcaagaatcagaacaacaaccagaataacatccaaagcaagaatcagaacaacaaccagaacaacatccaaagcaagagtcagaacaaccaaagcaagaatcagaacaacaaccagaacaacatccaaagcaagaatcagaacaacatccaaagcaagaatcagaacaaccagaacaacatccaaagcaagaatcagaacaaccagaacaacatgcaaagcaagaatcagaacaaaaaccagaacatccaaagcaagaatcagaacaacaaccagaacaaagacaatgagcagaagaagaaaacccaaccttcctacgcctccttcctgaagtaa

SEQ ID NO: 37056 - protein, 1895 aa, DROSOPHILA
MTEPAVPGEELCSTDLVSPIPNAEMSNTSSMSLASTALALIHNGFPLIERRSEEGDHGLEVEPVLEADPLRQSRPEPLVEHPAQLPADPPTEQPADIPADLPTYPQADPTAASPADPPADPSADPPADSSADPSADSSADSPADSPADSPADSPADSPADSPADSPADSSADSLANNQADIPPDPPADEPLELQRDLQPDLQLNLQPNLQPDLQAELQLDLQPDSPPDSHISPPKDQPTELPTNHPKEPIDEQANQAHSLLQKPSSKQDRPIKVKMSADAPVFYPMGTRLSTILSNEEETPPSSARNSAPRNSFEFGLANGTGPYIGPGGGDIPRSYYFVDPTTGKRINNNNTGTKTEVHRIELIPNRRDIPQSKARESWIANLNKKPTTPPSPPAPQPSPPQQSPPQQAPPQPPTEENATQKATGRASIPRPNNSRHFLQDPTKLKISPEFPSFESFAGQLDDMGVKRDEFMATLRNLLIRANDLMLPLLQGPFKYMTTLQMAEYTSAILETPPLHPSIFLPANTPRPWTNLTGLNRPFDIHPNSLTPEDLAIVQKLPKHVEATTQTEYLCICMFFNQERSASAGVPTPSPVPPPAPVPAPAPPAPPAHGPPPTPGPPPPSCSATAFYTGSPINAPRMHRAPGGGPGGPRIPPPYPTGASQSGPPTQQPFGFLSRPMPINMQHRMPRPPHPKAFPHPNSPAHHHSPTPHPHPHLHPHPHTYAHSHPHPHPHPGMQAGNPMASKNSPQPHRLGGAVRFQDGGYRGYRIQGPHSPRNLPNQCRYGPIGSAYTGDNSDGNSNNFSNTNYNNNNGGNPLYASTQSGSDKMASDLTQPRVRFVYPMEFEQLRLNVDPPSCEYMGKTNMQVESSTSSSDSSSTETSGLLQFAQMEDREHVKNNKPCKDNIDEVDADDDDDDEDDEHKNKNAKVPDPKHSGGKVQQRPYRFGEFVNYITSGSTTPSCSQGTPNVIPTYITGHRLPIDQSDQELLPPLPQMPPMPPIPPMPKKVGVACNGNGGPAGSQSKMPSTSHEHYSGNQFNPKYSQQQWPNPNGGPAGTQSKMPSTSHEYHGGNQFNLKYSQQQWPNPNGGPPGTQSKMPSTSQEHYSGNQFNPMYNQQQWPNPNGGPAGTQTKKPSTSQEQYMGNQFNPMYSQQKWPYHNGSPAGTQSKKPSTSQEHYSGNQFNPMYSQQQWPYPDYNAALFSKEQAGPSGIYMRPPPPAQPTPPPHPLHMYPIRQEKPMGPILFEVGGNTGHSAGPPMMQNVNSGSGYGHGRGRGYGPSPNQGTHSQNPYGHMTHPVPSPHSPHPPHPTHQTHTSHYGMSFNGNMAPNMNHMNQVSHMGRGMGVGLLPLPLQMLSPSRMEQPGSMGMPMNMSPLNLVSPRRNVNTYHQSGSNPDTNKIPPYGGPVGVNMSSGSAEMQQQINRPPDPRQTFEHNVGMSRDNTQSIRILGISSPRSVPQSGARVQDDGAPNNNNNNIQSKDQSNSQDNIQSKDQSNNQINIQSKNENNNQGNIESNDQNNNQNNIQSKNENNQNNIQRKNENNNQNNIQSQNENNIQSMNENSNHNNNENNIQSKNENNQNNIQSQNENNNQNNIQSKNQNNNQNNIQSMNENSNHNNNENNIQSKSQNNIESKNQNNQNNIQSKNESNNQNNIQSKNQNNNQNNIQSKKESNNQNNIQSKSQNNNQNIQSKNENNENNFQSKNQNNIQSKNQDNQYNIQSKNQNNTQNSIQSKNQNNNQNTIQSRNQNMQSRNQNNNQINIQSKNQNNNQNNIQSKNQNNNQNNIQSKNQNNNQNNIQSKNQNNNQNNIQSKSQNNQSKNQNNNQNNIQSKNQNNIQSKNQNNQNNIQSKNQNNQNNMQSKNQNKNQNIQSKNQNNNQNKDNEQKKKTQPSYASFLK

SEQ ID NO: 37057 - DNA, 2295 bp, DROSOPHILA
taccctccgcctggcatgtgtgtacatatgtacatatatatggcgtccaacgtggaacccccctatgcgatgggcaaatcaaaggatgtgagtcttgcgtattgttgcggttagggttgagtgagcggtcccagtgaatggagttgggtgcgtgtacgcctgattatacataacggctcattgcctgccacgtcgatggggcaggggcaggggttgcaaggactccgtctaatcactgtcacatgcaggcgtcgcttgcgcattcaaagcgagacgaggcgaggcgagccgaaacaaaggccagaagctggcggggaagggtccgccttgctggacaatgcagcgcaggatggcaaggagatggaggctggggcactggcctgctgttaattcgattaattacaacaatcagcggcatgtttcatgtggcagcgacagttcgctgctcggaggcgtggcagaaggcgcaggagcttaacaaattgccccatgctaatgacacgtccctgccccatgttcctgctcctgttcgccaacaatcgaagcataatgacaatgatagatttcccaatatctgtcatgtttatgggcaaaacaaaagaagcgggatggccggcgttaaggaggctgaaacaacagggcataattggatataacatttatacgcaatcatcgacagattgcaaaacgattaagccaaccctcggagaaagtcttggcctgtgcctgaagaaaggcgattcccatggcatagttccatctctatatatatagtacgtatgtccctgcttccctgatgagcctgtcattcccccggccagccgacgaaagtaaatccaatcgggcaaggagctggccaatattcgaccctgaaaaccaaatgcgggctggcccacgagtccaagttcatttggcgttcgttgaacgcttttcgggcaaacagaaacaatcaacttaatttggcgcccgctgaaagccctgtggcagataaattaagtcattagttcgagctgcaagttggtggtgctgatggtggtgctgctgatggtggtggtggtggcggtggcggcggtggactgatgggcacgagaagaaagttcccggctaaagtggaaaataaattggcaaacgtttgttttgagattaaccgcgattagaacgtggaactgcgagcggctgggagtggaggtctgcttggggaatcgcagcaaatgttgccattatttgataagctcaaacatagacacagtaccaccctcctcctcctcctcctcctccttctcctcctccaccatgtgtttgtgtaaacaaatggcaaatgcgagaataatcgtaggagattaaaaagtttcctgcgcccgcacaaagcaaaaggggcagctcgagccccaggagcaggagctggagaaggatttggagcaggagctggagatggaggagtggacctgctctgacgcgagacaaatgagtggcgcacgtgaagcgtctggccttgtctgtatatccctgggcctaactaatttatggcgcctgcatacaaattggcctggcttgccgccacatcccacagcccaaactccacactccctccatccacaaacagtcccattttctccggcattcggaggcaaagttacggcaggacttagtcctagccaagaactccaactatctccagccaccgggagccgggaatcgagaattgagtgagcagccagctggcaattaagatcccaaacacacggccggataatccctggatgcacatattcatcattttgagatcattaactagccatttatgtgggctgtgtgaggaattgagctagtgatgaatgtatctcagaacttttcattgcttgcaatcaggactaagccaagaaaacgaacaataaactttaggcatgctatcacatcctggaaatcagacaccatctcagaatctgagttgagaaacacgagttcttacaaaggcttacatcttatcttatcttaatttatttttaaattctaaaattgttagacatgatatactgggagttttaaaaaatattggaataaatagcgatcgatatgcgacacgttttaccttataaaacttgaattcttaattgggtttaaggtggtttaaggtggtttaaggtgtttcgtcctgcttctttctcggctaaaaaagaaaggtaagattcttttacttttcaaattcagaggaaaagtgatagcagtcataagctgaatccattgctatgtaaagaagttttttagcaattcttattttacagctcagttaaagat

SEQ ID NO: 37058 - DNA, 147 bp, DROSOPHILA
atggtggaggaggagaaggaggaggaggaggaggaggagggtgccgggaactttcttctcgtgcccatcagtccaccgccgccaccgccaccaccaccaccatcagcagcaccaccatcagcaccaccaacttgcagctcgaactaa

SEQ ID NO: 37059 - protein, 48 aa, DROSOPHILA
MVEEEKEEEEEEEGAGNFLLVPISPPPPPPPPPPSAAPPSAPPTCSSN

SEQ ID NO: 37060 - DNA, 3311 bp, DROSOPHILA
tagtatctggtttccctttcagttgctaggcgaagagtcatcggcagatgaggatgactgctcctggctggtttcaagctcctgctcctccggctgctcgttctcggactcatccacttcctcggacagtagcagttccatggcctgcacactgctgccgttcaccaactcggcgagcgtctgtgcgatcctctgatcgcgcatcatctcgatgatggcttcatccgtggcaagtggattccccatgagggagctgcgcagttgccttaatcgcttgcgattgccacgccttttgcgcgtctcgccgtcatccattccctccaccaagatctgcaccgcccgctgcacgttgttgttactctgggccagcgccaagcgagcctcgccctccggatagcccatgtccatgaccaccttcaccatgagctccgtttcgttggcatcggctgccacggccaccgaagcggctgcttgaggagatcctgctcctgctgcagccgtttctggcggagatttcagatgcaattgctcaacttgcgacatttccgcagctcaactttggcgtcactatcgatatctagccaaaatcagctgatcccctctttaacccctctcatttggtttcgaacccagaaagctaatttaactgttgtgtggccgaattttaggtaaatccttaagtacggtcctacttttcagtacagtgcggaacaaggacacatgctgattgctaataaaagtaaagcttactaaactgacacttatttgtagtgccattgcataatcagcaacatgaatcatttacgtacaattaagtatatggtgaaatctaacaatttttattcacttcacaaaataaagtacatttagttccaaacaagaattttgatattatttgagatattttgataagaagtgctaccctgatactgtcttccattttgacaaggcaatatgtagtttaaattattccctgaaattataagcacatctgtataaaatggaaggaggcactttcaatctgatgaaaacagaatccattcccagctgcctgcttcagcccatccgggcggtccccaagtgcgtcaactcaaaggagatcctaagcagtttggcgcggaatccgcgaaagagccgcctatatcctccccatggcggtcacatgcggtccgttgtgggaaccttctacaagatcacggaccaaatcggtgaaattgcgataggcaccaagttaaccggcaccgtgctgctcgagagcctgccggtcttctacgtgaccatcaatggaccgggctccaagcttttgaaatgtctagccatggggcaggtgcaactgcaggaactggagcagctgcccgactatggcgaaatctttgcattctacgacaaggccgagaatcgcatctctcgcatcgccattaatgcccccgttcaccccatgggctactgtgcctatatgatcgacgctgccaaatataccaacatgtccggcatggagcgcatcttcgcgctgccggatgatctcaagaagctgccggcgctaacgatcaaatgccgcctggtcaatgtggcccagatgcatatatttattacccaaaatgttagactgcgcgtcctcggcagtaatggccttgaactgttggtggccctgatcaggaataggaccaacattcggaagattccatccgcacaactaccaccaatttcgggcgatgagtacggaaatatggatgcaaacgatcgggaagtggccaaatcttttgcacgatatagacccaagcgtcgcgaacgtggtagcattgtacgcgtccatgtcaccaggatcgttagccatgccgaattctacgcccgattcgctgatggaccaacagtgcccacgtggagcaagagtgttatgaaaaggggcacaggtgattttcgcgtctgggacatcgttctggccccatatcaggggcgatatcatcgcgccaaaatcgttgacatatttcgctgccgttaccgtgtctactttctggacttcggcatcaccgagtatacaagcaagaaaaatctaacattttgctatgagctggagaaagcccagcacaatctggcctttagatttgaaatattgggaacacgccgtcagtgtcccataccttacataaacatcctagagggcataaagcatctggagcacacagtactacgaagcgatatcaatgttcgcatccataacattttgaaagacggtggatatgtgattcgtttaatgaaacatattcacgagtgccatatgattcacttgtttgacgattattattcgaattgatgtatttgaaaacaataagaatgtatttcataagacattccatttgaaatgcattaaagacgaacatttctgagaaacagccaaatgtatttcatagttatattatactattcgatcgccagctgattttgaccatgtcgatggaacatggaactgggccgagtgtgtgtgtatccctgcggtacaaattccgagcaaaaggcaataagccaaaaacacaattacaagagcataaacagaagatttcggttcgggtcccacatctgccgcctcctgccaacttggacttctatttatgcgttgcacaattttaaataatcaccccgttgggaaattcggggcgaaataccctttcgtgacgcccccttttccatggactttctgttacttgtgtgtgttatttaccctgatttattgccattttctttcggtcgctgttgcgcctttttggtcactctttttgtttaaagatgggggcgctgcttccaaaaaggggtagcgttgggcggtcaggaacaagtggcccgtaaaaaacattgccaaaccctcatctatcacaattttcttacatttttgggtttaaaaacgcattatttggctcttttggtaattgaagtttttagttttcattagccgctctccggacaggggccacaaaaataggaaaaacaatgggaaaatccggggtggtggcgacatgggatgacattttccagagtcgagataaatagcacctttaaattaacccattaacgagtgggacacaaatagcgatatggatgagcagggtttttcaacaagaaactgtgagtattataatgaattttttaatttttatagatatataataatatattttagcaggtaatacttggaattagagttcctagtttgattattatggccataaattggatggattctggagcatgcttaaatgtttaaaataatataagttcaattctaccagcaactttaaaacattcccatgttaatagta

SEQ ID NO: 37061 - DNA, 1203 bp, DROSOPHILA
atggaaggaggcactttcaatctgatgaaaacagaatccattcccagctgcctgcttcagcccatccgggcggtccccaagtgcgtcaactcaaaggagatcctaagcagtttggcgcggaatccgcgaaagagccgcctatatcctccccatggcggtcacatgcggtccgttgtgggaaccttctacaagatcacggaccaaatcgccatggggcaggtgcaactgcaggaactggagcagctgcccgactatggcgaaatctttgcattctacgacaaggccgagaatcgcatctctcgcatcgccattaatgcccccgttcaccccatgggctactgtgcctatatgatcgacgctgccaaatataccaacatgtccggcatggagcgcatcttcgcgctgccggatgatctcaagaagctgccggcgctaacgatcaaatgccgcctggtcaatgtggcccagatgcatatatttattacccaaaatgttagactgcgcgtcctcggcagtaatggccttgaactgttggtggccctgatcaggaataggaccaacattcggaagattccatccgcacaactaccaccaatttcgggcgatgagtacggaaatatggatgcaaacgatcgggaagtggccaaatcttttgcacgatatagacccaagcgtcgcgaacgtggtagcattgtacgcgtccatgtcaccaggatcgttagccatgccgaattctacgcccgattcgctgatggaccaacagtgcccacgtggagcaagagtgttatgaaaaggggcacaggtgattttcgcgtctgggacatcgttctggccccatatcaggggcgatatcatcgcgccaaaatcgttgacatatttcgctgccgttaccgtgtctactttctggacttcggcatcaccgagtatacaagcaagaaaaatctaacattttgctatgagctggagaaagcccagcacaatctggcctttagatttgaaatattgggaacacgccgtcagtgtcccataccttacataaacatcctagagggcataaagcatctggagcacacagtactacgaagcgatatcaatgttcgcatccataacattttgaaagacggtggatatgtgattcgtttaatgaaacatattcacgagtgccatatgattcacttgtttgacgattattattcgaattga

SEQ ID NO: 37062 - protein, 400 aa, DROSOPHILA
MEGGTFNLMKTESIPSCLLQPIRAVPKCVNSKEILSSLARNPRKSRLYPPHGGHMRSVVGTFYKITDQIAMGQVQLQELEQLPDYGEIFAFYDKAENRISRIAINAPVHPMGYCAYMIDAAKYTNMSGMERIFALPDDLKKLPALTIKCRLVNVAQMHIFITQNVRLRVLGSNGLELLVALIRNRTNIRKIPSAQLPPISGDEYGNMDANDREVAKSFARYRPKRRERGSIVRVHVTRIVSHAEFYARFADGPTVPTWSKSVMKRGTGDFRVWDIVLAPYQGRYHRAKIVDIFRCRYRVYFLDFGITEYTSKKNLTFCYELEKAQHNLAFRFEILGTRRQCPIPYINILEGIKHLEHTVLRSDINVRIHNILKDGGYVIRLMKHIHECHMIHLFDDYYSN

SEQ ID NO: 37063 - DNA, 2565 bp, DROSOPHILA
aaacctaagtgcacagaacaagttcgcatttttcgaaagtttttaaaatttcttttaattttatattcttttgacgtaggtgcaccattaatgccccgccaattctttaagtgtacgcatagaatggcgagtaaatccaattttaagcagatgattcataacttattgttaaatcaaatctacaattatcgatggccgcgttgattgggagtggtgatgatgggtcgattcgtctcgaaggtactcgacgtcccacttccagggaagtccacgggcgataagattccgggaagttctttcctccatcgcgggtagggaagtctaaaagcgcgaggaagggggagggaagtccaacagggggacgccagcaggtgtcaatcctggggcaatagattgcgcctagagttagtttttggctaatcagggcctgaggaaaaaaaaaagattgtttgtttaccgtcggataggaaaggtcgtactcccaaagtgggagtcgtggtcttatcttccgcccattggtacaccatcgcagctgccggcggggcgaaagggggatgattggatccgagcgcaataacaccgaaattgttcaatttaattgagtgaagtgggaagcttccttatcagcattattatggttacacttccgtggggtcgctgcactgtaaggtgctagatataaaaaaaagcccaataactcatttatttatcctctaagctctaattcaatacaagagtttcatttctgaacgagaagtagagcagttccagcgtcggtgtgactctttttccggtattggattagacattgtcacttgccacttgaaattggcaatgggcctgataagggggtacctaatatgattcaaagaaaaacagtgggcggtataaataggtggtttccagaccttggccatcattccgtgacttcaacgtgccgtgactggagacccttagtccacacacttcgtttacctcgaatttcaattcaacgcccaagatgtccaagtttagcctcatcctgttgtccgccctgctgggctgtcttgtgtccggtggagcggctggaacaatacgtgtggataccaccggcatccaagtggtggataatatccatgtctttgccgcccaatacccgggtctgcagatccagcagatggagaaggaaattgtgccggccaaggcccgcgtcggaagccagaccgtgcgctacaacatgggagcccgcattccgggtaagttacccaaagcataccctacgtttgaccgaccaccaatcactgatcccgcaatctggcatactttcaggcgacgaactggtggcccagacagccaacacttacgaattcccacgggcgcaagatgtgagcctgcagcttacctatccggagaacggcaagggtgccactgtatcctacgtggagctgctctgcacccaggacaccaacgagggcaccgcctacgtggtcgccggaggcatcggccagagcttgatctccatcgtgctggaggccaagaacaccaagaacttctcataccaggctctctactacggagtcaactaggaggcatttgcattagttcctcgctagctttatatatatatatatttttttttttttttaaatgtgactccaattttaaatacatatgtataatggcagactaaaatgattgcagcacctgcaattatctagatttacgtaattaatttcatttcattgatgggataaagtttatatgctgtcatatgtttaatcgtaaatatgcaattagatcatatatgtttgtactatcagtcactctgttaattgagttatatgataaatcaaattcggacctgttcctctaattaaaaaatttcatttttaacgaagaatgtgtagatccaaagatatacatgtacgtctttcactgtgtacgatcgaatgtcgaatgtattgcaaagctgaaaagtcggtaatggtagagatcatatatcaccatccccagggtattcggtaatcttgatcaatttcaaatggttcgttgctcacgcgccttccactcgaaaccgatgatagccattgccataaatctgggacagccactcacctgaatccgctgtggattccgattgcggctccgtttggcatggaaggtgaaaccaaggcggcaaatcatccagggatttgtctgcgaaagagtgagacgcatgaagtttttgttctactgacgttattgaactttccccctatctggctggatttttagaaggaattcccaaccgaatgaatcacgttttggatgagaacgaacaatggccaaactcccaagactttgcgattcaattgggtatttatcatatagctgggcatctgagtatctgagtatctgtcttcattcaactattggggggactttctctggtggtaagtacgtcagtccagaatcgatgtggtatatatagatatgtatgaatatagtatctatgaccatgttgcgtagacagtcaattgactttgtagatacggttatttgtttattagattgtttgccattgtgcgccattatgcatatcaaggc

SEQ ID NO: 37064 - DNA, 492 bp, DROSOPHILA
atgtccaagtttagcctcatcctgttgtccgccctgctgggctgtcttgtgtccggtggagcggctggaacaatacgtgtggataccaccggcatccaagtggtggataatatccatgtctttgccgcccaatacccgggtctgcagatccagcagatggagaaggaaattgtgccggccaaggcccgcgtcggaagccagaccgtgcgctacaacatgggagcccgcattccgggcgacgaactggtggcccagacagccaacacttacgaattcccacgggcgcaagatgtgagcctgcagcttacctatccggagaacggcaagggtgccactgtatcctacgtggagctgctctgcacccaggacaccaacgagggcaccgcctacgtggtcgccggaggcatcggccagagcttgatctccatcgtgctggaggccaagaacaccaagaacttctcataccaggctctctactacggagtcaactag

SEQ ID NO: 37065 - protein, 163 aa, DROSOPHILA
MSKFSLILLSALLGCLVSGGAAGTIRVDTTGIQVVDNIHVFAAQYPGLQIQQMEKEIVPAKARVGSQTVRYNMGARIPGDELVAQTANTYEFPRAQDVSLQLTYPENGKGATVSYVELLCTQDTNEGTAYVVAGGIGQSLISIVLEAKNTKNFSYQALYYGVN

SEQ ID NO: 37066 - DNA, 2471 bp, DROSOPHILA
ttgttctactgacgttattgaactttccccctatctggctggatttttagaaggaattcccaaccgaatgaatcacgttttggatgagaacgaacaatggccaaactcccaagactttgcgattcaattgggtatttatcatatagctgggcatctgagtatctgagtatctgtcttcattcaactattggggggactttctctggtggtaagtacgtcagtccagaatcgatgtggtatatatagatatgtatgaatatagtatctatgaccatgttgcgtagacagtcaattgactttgtagatacggttatttgtttattagattgtttgccattgtgcgccattatgcatatcaaggctaagattgtcgtggaacaaataaacaaacaaacacgcgccatcacagatcgtcattcaacggcggaggaaacatttcctttatccagtaaggtggtgcttcctatcactggttttattattgggtgggttgtcataaaaaaaataaaaataaaaatcaacaacatactatctagccgcttactaatagattgaactacgatagcacattaagttaatgcttcttgtacgcagtccgtccaatcgtccaatcaaataacaagtgttcccatcatatcccatcatatgcccatccaatccaatccatttcccagcggtgtaagctcgagtgtcctatttataggaactgatcgcagcattatggccaattagtcgatgtggttttataaaggcgtttgccgaaattgccacagccaattcccccgggggcttatcgttcagttgtgtcgggccgtcttatcgacgtagtgaccgccgataaggaagcatgtataaaagccggaggcggtcgccagtaccagccaaaattcaaaaagcgttcgaatagtgcatcagaaaaggagtctacacaccccttattcttccgattattttgtttcgttcccattttttttctggtgatctggtgatgttaacaaagatgttcctagtgctctgcctggtgctgggcatcatggcatcggtatccggacagccacacgcccgtgccagcgatctctactatacggacataacgcccgtgaccgacgaaacacgctacaccaccctcaatccggacgcacagctgaacgagatgaacaaggtgaagcactcgaagggcaacgtggtcttcaccgcgggaaagcgggcatcgggtgaccgactcattgtgaaccactacgatgacgacagctttcccagtgccaaggatgtggaggtgctcatgagctatccggccggagccagcacaggggtcacgctgacgagcatcgaggtgtatgtggacatgacggcggacgatgccggtggctatctgaccaagggtggcatcggtcagaccaacgtggagattctgctgacctccaatcagacgcgcagcttcgtctacgagacgttcatctatgggtactaggactgctcgcccagaactttcagctacaataaacgattcgcttggaacccaactgtgatcatgaactccagaccctgcccctgtccctgcccttcctgccgagagtattattagtcatagacgtacatacattaaagaatcaaatttcaaacggactactgtgcacatccttttacttatccgtaccattgcagaaataaagtgttccttgttgcttggcgcccaaacgaaagcgattcttttcagctccaatcctatgaagccactgaaaaggtggtttctctacctatgtatattgttttgatatgagtatatataagataatttataaatgtatgaaaggtgagcttaactcccagcggttagccggtttttaaagtttgctacttgccaaaggaggaaaatattcaatcttaaattttgggttctgtgtcctcgattgttgctcagggatttcagagtactgatccggagaagcttagataggaggatgcggatagggccagagataaaacaaagcggagttccgaagttgagaatcagtttggtgcgaactctgggagaagctgcaccatgatgtgaagattcctgattctgttcacggcacttggcggaattcgaacatgggctgccaagctgaagttttccctaaacggtgggtgtgtattgcagtcaccattcaagcgatctaacttgatggtcatgtgatctcagagaggggaatgcctgtcccgaaatgcccaactaaccggagagtagctgcaacaggaactgctctgcgatgatcgagagccacgttctccggaaactacaggcatttactcactccggcttattgcgccggtttggaagacgtcatcctgatgccaaatcgtgtccgcctgggtcttgtggctcccttcaagaaggagcttgttatcaacgtaggttctattacgagtagttcatagccggatcagttaccagactccacttccagagaagctttaactataaaagc

SEQ ID NO: 37067 - DNA, 471 bp, DROSOPHILA
atgttcctagtgctctgcctggtgctgggcatcatggcatcggtatccggacagccacacgcccgtgccagcgatctctactatacggacataacgcccgtgaccgacgaaacacgctacaccaccctcaatccggacgcacagctgaacgagatgaacaaggtgaagcactcgaagggcaacgtggtcttcaccgcgggaaagcgggcatcgggtgaccgactcattgtgaaccactacgatgacgacagctttcccagtgccaaggatgtggaggtgctcatgagctatccggccggagccagcacaggggtcacgctgacgagcatcgaggtgtatgtggacatgacggcggacgatgccggtggctatctgaccaagggtggcatcggtcagaccaacgtggagattctgctgacctccaatcagacgcgcagcttcgtctacgagacgttcatctatgggtactag

SEQ ID NO: 37068 - protein, 156 aa, DROSOPHILA
MFLVLCLVLGIMASVSGQPHARASDLYYTDITPVTDETRYTTLNPDAQLNEMNKVKHSKGNVVFTAGKRASGDRLIVNHYDDDSFPSAKDVEVLMSYPAGASTGVTLTSIEVYVDMTADDAGGYLTKGGIGQTNVEILLTSNQTRSFVYETFIYGY

SEQ ID NO: 37069 - DNA, 2219 bp, DROSOPHILA
gcacatccttttacttatccgtaccattgcagaaataaagtgttccttgttgcttggcgcccaaacgaaagcgattcttttcagctccaatcctatgaagccactgaaaaggtggtttctctacctatgtatattgttttgatatgagtatatataagataatttataaatgtatgaaaggtgagcttaactcccagcggttagccggtttttaaagtttgctacttgccaaaggaggaaaatattcaatcttaaattttgggttctgtgtcctcgattgttgctcagggatttcagagtactgatccggagaagcttagataggaggatgcggatagggccagagataaaacaaagcggagttccgaagttgagaatcagtttggtgcgaactctgggagaagctgcaccatgatgtgaagattcctgattctgttcacggcacttggcggaattcgaacatgggctgccaagctgaagttttccctaaacggtgggtgtgtattgcagtcaccattcaagcgatctaacttgatggtcatgtgatctcagagaggggaatgcctgtcccgaaatgcccaactaaccggagagtagctgcaacaggaactgctctgcgatgatcgagagccacgttctccggaaactacaggcatttactcactccggcttattgcgccggtttggaagacgtcatcctgatgccaaatcgtgtccgcctgggtcttgtggctcccttcaagaaggagcttgttatcaacgtaggttctattacgagtagttcatagccggatcagttaccagactccacttccagagaagctttaactataaaagcgatcttgtcctgtttcggctaacccacaattacagcagtgaatggccatcaggatttggccagcttgcccaaaggaatgatgcaggtgtcaactgtgagtggttcgaacaggagctctcctagagaccctttagcacatgcaatataaccgtttggtcagggatgcggagcgtggaaagccggacccacttttgcgtctaccccatccacatgccggccacaacgagatcgggatcctgtttctgttgcctgcgtgctggagccagtgtccttcatgctgtccaggccgatggcaagtgctataagtccagaaacgcagatctgtactacaccagtctggtcaacggaaacgtgctggacttcatcaatgacagtcattaaataaatgggcatgctcgataacggggcgtttctcggggggatggagccgtctatgccaaataggtggttctttaaaggtagtgattaggttagtcactgacactttaggtaacacttgcatcatcgacattcggtgcaccccctagtccctgcggtcttttcttcccagggggatgctattctcttggggggtttctcccatccacacggcctgtgaatcaatcatgttgggtcaacctcgctccgctcccatcttactcactcattcatttctcgcgctctgcgagcgcaccgtgattttcgccgatcgttgaaccagtcgcagggagaaccatctcgccaccacagctcacattgctattgctccgagagtcaagcttgctccagctgccagttgatcgccagccgcttcgtcgatcggtcagtctctgcagccagtttgttgtttgtagcagccagttgaggagcagaagcgacgatagttggcttccaataataataacaaccaacattagcatcgaaagcaatcgagagtcgagcaatgttacgtcgagggccaacgggcttcatatccgccctgatcttcgcgagcctctgtctgggcttctgtcggggctacttcagtctggagggtgcgtaagctatcgcctgatcgatccacttaacttttttaccagaccaaatattaacatctcctggcgcgctccatgagttgaagtcaatttacatgtttatttaacaatgtacactttataatttgtacacgtagtctttcataattggatgctcagtattcgcaactcattattatttgatcgttatttggtgattattattgattattgattacgaatgattgttccctggttgcagtgggtgatccctgtcccacggtcaattaccgcagtcgctgccaagcgctggaggattgtgagactctggcgtcgcatcttaaaacgggacgactcacattgagggcggtgatgaactgtggcttcac

SEQ ID NO: 37070 - DNA, 219 bp, DROSOPHILA
atgcggagcgtggaaagccggacccacttttgcgtctaccccatccacatgccggccacaacgagatcgggatcctgtttctgttgcctgcgtgctggagccagtgtccttcatgctgtccaggccgatggcaagtgctataagtccagaaacgcagatctgtactacaccagtctggtcaacggaaacgtgctggacttcatcaatgacagtcattaa

SEQ ID NO: 37071 - protein, 72 aa, DROSOPHILA
MRSVESRTHFCVYPIHMPATTRSGSCFCCLRAGASVLHAVQADGKCYKSRNADLYYTSLVNGNVLDFINDSH

SEQ ID NO: 37072 - DNA, 3839 bp, DROSOPHILA
cgtaggttctattacgagtagttcatagccggatcagttaccagactccacttccagagaagctttaactataaaagcgatcttgtcctgtttcggctaacccacaattacagcagtgaatggccatcaggatttggccagcttgcccaaaggaatgatgcaggtgtcaactgtgagtggttcgaacaggagctctcctagagaccctttagcacatgcaatataaccgtttggtcagggatgcggagcgtggaaagccggacccacttttgcgtctaccccatccacatgccggccacaacgagatcgggatcctgtttctgttgcctgcgtgctggagccagtgtccttcatgctgtccaggccgatggcaagtgctataagtccagaaacgcagatctgtactacaccagtctggtcaacggaaacgtgctggacttcatcaatgacagtcattaaataaatgggcatgctcgataacggggcgtttctcggggggatggagccgtctatgccaaataggtggttctttaaaggtagtgattaggttagtcactgacactttaggtaacacttgcatcatcgacattcggtgcaccccctagtccctgcggtcttttcttcccagggggatgctattctcttggggggtttctcccatccacacggcctgtgaatcaatcatgttgggtcaacctcgctccgctcccatcttactcactcattcatttctcgcgctctgcgagcgcaccgtgattttcgccgatcgttgaaccagtcgcagggagaaccatctcgccaccacagctcacattgctattgctccgagagtcaagcttgctccagctgccagttgatcgccagccgcttcgtcgatcggtcagtctctgcagccagtttgttgtttgtagcagccagttgaggagcagaagcgacgatagttggcttccaataataataacaaccaacattagcatcgaaagcaatcgagagtcgagcaatgttacgtcgagggccaacgggcttcatatccgccctgatcttcgcgagcctctgtctgggcttctgtcggggctacttcagtctggagggtgcgtaagctatcgcctgatcgatccacttaacttttttaccagaccaaatattaacatctcctggcgcgctccatgagttgaagtcaatttacatgtttatttaacaatgtacactttataatttgtacacgtagtctttcataattggatgctcagtattcgcaactcattattatttgatcgttatttggtgattattattgattattgattacgaatgattgttccctggttgcagtgggtgatccctgtcccacggtcaattaccgcagtcgctgccaagcgctggaggattgtgagactctggcgtcgcatcttaaaacgggacgactcacattgagggcggtgatgaactgtggcttcaccacgcgcagcgagaagatctgctgtcccgtcgaggatgcccagagcgaggtgcggttagatcccacggcggccaccaccagtacaactacaactactactactaccagcacaacatctactactacttccaccacaaccaccactactaccacaactccagcgccagaaccttggctgagcatattcaagacggatcgcgattacgtccagcaatccattgggtccacgcaccggccaacgagggagagcatcaccttcagagacacctccgatggcgccgactgcacggctcccctgtacgagggccagtgtcgtgccgtatccgcctgccccagtgtggagccactcctgtcgcagggtcgtctcagggacgaggatttcacaacgtgccgcgagggaacgcacgaggagatcatctgctgtccgctcaatctgccgctgcagccacgcgtccacaccggcttgcggctgggtgtccagggtgattcgtcggagggcaaagctgccgaggatccgctagagctggccgccattgcacgggcggataggctactgccacactaccgccatctggcttcgctggcacatccgaatgccgccttcgatggccacctgcatcactgtgccgccctggtactgacgccccagctcctggtcagcgccgctggctgcgagcgaccaagtcatgctgttttcggagtggctgatctgcgggacgttgacgccgacgaggactatctggcggatatagtggtgagtccatcagtccttgcccatgtacatcaaatctaaaatgtcgaatattttagcgcctggttcaatttcaaaaggatctatcacttatacgattgcaggacccactgcgtctgggcagtcagacctccgcgaatgtgagcgtggctcccatttgcacccagttcgagctgaccaggctgcagcgtagcggcagcctagtggccgtgggttggggcaagggtgaaggtgagctatagcatactcatccaaggagttccaactaaacgaataaagctctttcagacactgactgtccgctgttcgagatgcccatgcgactgcgtcccacatgggcctgcggggatctacccaattacggcggagttcaggatctgggcagctcacatctttgcgtggagccgatggacggcgaaagggagctgcagcggttctccaacagcagcacctgcgccgcctgtccggcttccgtgggcagtgtactccatctggtgcgaccgggcggaggtcgctgcgtcattggggttgccacgcccacgggggctgagtgcgaggcacggaccatgtacttcacgggtctgctgagtccgccgttcaggcggtttgtggagcaggagcagaagtagtcatccaggttaagttagaacaatctatgcaaataatgtataaattggatgagaagaacgcagaagtgaaattgatttcgcaagcatcagcttgtgaaataattggagcagcatggtcacactgaacacgatctgactgtacttttatgcctaagaatataccagttaacatctacccaaaacctcattgtagtaagtaaattaatataagaaacattataaataaattttatatatttattacaattctctctgttcattcaaaagttaatagagtaaacagcgccttcaagttacgtttagttattgcataaatttgcaaatatttgcacacatgatgactttattcgctatttgttcgcataaatcaagcacttggaattgttgaaggtctcgtttcgaaacagttacatcttaagtactgctcttagttctttgatatacaaattcaaagggaggagactgtgtcattacagtttggactatgcagcataagaaactcattgctaattccgctgaaaaacgatctcctcttatatttatttatgtttaattattcataaaagcattgctcgggttttccgattatttcggatcggttgtggctctggattcaagaatctttcagagatgaaaaccggttggagagcaatctattgccgcctagtgtgtagattggactagtcacagattgggattcagttgcactggagatgctttactgagcggtcagaaccgtcgtcccagcctgaccgtttcaatccgccgcgtctgtgaccatatcggtcagattctctccgccatagccaccggttttaaagctccattgagtttacgtcgtgtgcagttttgtttttgctggtttcctcgtgttttgcttgatttattgtattgtattccttgtgtttttgtgctgtgcttccgattgccatactcggagtgatcggtgcactcgaagaacatcgaaacagcgacgtattcccttatcaaagtctggcaa

SEQ ID NO: 37073 - DNA, 1485 bp, DROSOPHILA
atgttacgtcgagggccaacgggcttcatatccgccctgatcttcgcgagcctctgtctgggcttctgtcggggctacttcagtctggaggtgggtgatccctgtcccacggtcaattaccgcagtcgctgccaagcgctggaggattgtgagactctggcgtcgcatcttaaaacgggacgactcacattgagggcggtgatgaactgtggcttcaccacgcgcagcgagaagatctgctgtcccgtcgaggatgcccagagcgaggtgcggttagatcccacggcggccaccaccagtacaactacaactactactactaccagcacaacatctactactacttccaccacaaccaccactactaccacaactccagcgccagaaccttggctgagcatattcaagacggatcgcgattacgtccagcaatccattgggtccacgcaccggccaacgagggagagcatcaccttcagagacacctccgatggcgccgactgcacggctcccctgtacgagggccagtgtcgtgccgtatccgcctgccccagtgtggagccactcctgtcgcagggtcgtctcagggacgaggatttcacaacgtgccgcgagggaacgcacgaggagatcatctgctgtccgctcaatctgccgctgcagccacgcgtccacaccggcttgcggctgggtgtccagggtgattcgtcggagggcaaagctgccgaggatccgctagagctggccgccattgcacgggcggataggctactgccacactaccgccatctggcttcgctggcacatccgaatgccgccttcgatggccacctgcatcactgtgccgccctggtactgacgccccagctcctggtcagcgccgctggctgcgagcgaccaagtcatgctgttttcggagtggctgatctgcgggacgttgacgccgacgaggactatctggcggatatagtgcgcctggttcaatttcaaaaggatctatcacttatacgattgcaggacccactgcgtctgggcagtcagacctccgcgaatgtgagcgtggctcccatttgcacccagttcgagctgaccaggctgcagcgtagcggcagcctagtggccgtgggttggggcaagggtgaagacactgactgtccgctgttcgagatgcccatgcgactgcgtcccacatgggcctgcggggatctacccaattacggcggagttcaggatctgggcagctcacatctttgcgtggagccgatggacggcgaaagggagctgcagcggttctccaacagcagcacctgcgccgcctgtccggcttccgtgggcagtgtactccatctggtgcgaccgggcggaggtcgctgcgtcattggggttgccacgcccacgggggctgagtgcgaggcacggaccatgtacttcacgggtctgctgagtccgccgttcaggcggtttgtggagcaggagcagaagtag

SEQ ID NO: 37074 - protein, 494 aa, DROSOPHILA
MLRRGPTGFISALIFASLCLGFCRGYFSLEVGDPCPTVNYRSRCQALEDCETLASHLKTGRLTLRAVMNCGFTTRSEKICCPVEDAQSEVRLDPTAATTSTTTTTTTTSTTSTTTSTTTTTTTTTPAPEPWLSIFKTDRDYVQQSIGSTHRPTRESITFRDTSDGADCTAPLYEGQCRAVSACPSVEPLLSQGRLRDEDFTTCREGTHEEIICCPLNLPLQPRVHTGLRLGVQGDSSEGKAAEDPLELAAIARADRLLPHYRHLASLAHPNAAFDGHLHHCAALVLTPQLLVSAAGCERPSHAVFGVADLRDVDADEDYLADIVRLVQFQKDLSLIRLQDPLRLGSQTSANVSVAPICTQFELTRLQRSGSLVAVGWGKGEDTDCPLFEMPMRLRPTWACGDLPNYGGVQDLGSSHLCVEPMDGERELQRFSNSSTCAACPASVGSVLHLVRPGGGRCVIGVATPTGAECEARTMYFTGLLSPPFRRFVEQEQK

SEQ ID NO: 37075 - DNA, 2525 bp, DROSOPHILA
gggtgggttacgtggctgcggctgacagtgtcaacggttgcaagtcaaaattaattagaatttttcaactgcgaaatacccccctctaccccttgcccaaggcaatccaagggatgcactatatgtactccaatctacgccaaagaactggtgagcaaaggcggtaaattgaaatcagtacaaaacgctggagtagaaaaaataaaagagcgatcattaatcatcgggccgaaaagggttgacaagctgcgcattgctattgccacagggttgctgttgctgttgctttcagttccggcttcttccgctccttgaccggagtcatatccgccaaaacaacaacaaagtgctcgggggaaaattggcctgggtggccctaatgcatttaatgtctcccgatggctggggttgaacccaaacattttagggaccagcacatcaggtaacatcctcgtcctcgaactgccctgattccccatatactgctcttaattgacaataataatgttacaaaaataatggtacttatttctaactgttaggttctttaaaaaattctatagtttgcctatttattatggaaaaaattagattaggagttccaaaaagaagttttccaaaagtaacaacgacgattcatcttcactaacagcttagcaatatatttaatgcaaatattcacgaaattccacaattgaaaataaactaaaatataagtatacttttaaattgatgacactttttagatatgaaaacaaaattaacaaaattaacatggaaatcttcgttagacttcatggtggattaatatcaacattaattactctgatatacacttactataaagttaagggcattttttaaacataatagcaaactaaaaacgtaactatgaagaacttgttttaacttaacagtagacttgaaaactaaacttctcatatatctataccttaacttataagatgtaagcagtactaactagtatctggtttccctttcagttgctaggcgaagagtcatcggcagatgaggatgactgctcctggctggtttcaagctcctgctcctccggctgctcgttctcggactcatccacttcctcggacagtagcagttccatggcctgcacactgctgccgttcaccaactcggcgagcgtctgtgcgatcctctgatcgcgcatcatctcgatgatggcttcatccgtggcaagtggattccccatgagggagctgcgcagttgccttaatcgcttgcgattgccacgccttttgcgcgtctcgccgtcatccattccctccaccaagatctgcaccgcccgctgcacgttgttgttactctgggccagcgccaagcgagcctcgccctccggatagcccatgtccatgaccaccttcaccatgagctccgtttcgttggcatcggctgccacggccaccgaagcggctgcttgaggagatcctgctcctgctgcagccgtttctggcggagatttcagatgcaattgctcaacttgcgacatttccgcagctcaactttggcgtcactatcgatatctagccaaaatcagctgatcccctctttaacccctctcatttggtttcgaacccagaaagctaatttaactgttgtgtggccgaattttaggtaaatccttaagtacggtcctacttttcagtacagtgcggaacaaggacacatgctgattgctaataaaagtaaagcttactaaactgacacttatttgtagtgccattgcataatcagcaacatgaatcatttacgtacaattaagtatatggtgaaatctaacaatttttattcacttcacaaaataaagtacatttagttccaaacaagaattttgatattatttgagatattttgataagaagtgctaccctgatactgtcttccattttgacaaggcaatatgtagtttaaattattccctgaaattataagcacatctgtataaaatggaaggaggcactttcaatctgatgaaaacagaatccattcccagctgcctgcttcagcccatccgggcggtccccaagtgcgtcaactcaaaggagatcctaagcagtttggcgcggaatccgcgaaagagccgcctatatcctccccatggcggtcacatgcggtccgttgtgggaaccttctacaagatcacggaccaaatcggtgaaattgcgataggcaccaagttaaccggcaccgtgctgctcgagagcctgccggtcttctacgtgaccatcaatggaccgggctccaagcttttgaaatgtctagccatggggcaggtgcaactgcaggaactggagcagctgcccgactatggcgaaatctttgcattctacgacaaggccgagaatcgcatctctcgcatcgccattaatgcccccgttcaccccatgggctactgtgcctatatgatcgacgctgccaaatataccaacatgtccggcatggagcgcatcttcgcgctgccggatgatctcaagaagctgccggcgcta

SEQ ID NO: 37076 - DNA, 525 bp, DROSOPHILA
atgtcgcaagttgagcaattgcatctgaaatctccgccagaaacggctgcagcaggagcaggatctcctcaagcagccgcttcggtggccgtggcagccgatgccaacgaaacggagctcatggtgaaggtggtcatggacatgggctatccggagggcgaggctcgcttggcgctggcccagagtaacaacaacgtgcagcgggcggtgcagatcttggtggagggaatggatgacggcgagacgcgcaaaaggcgtggcaatcgcaagcgattaaggcaactgcgcagctccctcatggggaatccacttgccacggatgaagccatcatcgagatgatgcgcgatcagaggatcgcacagacgctcgccgagttggtgaacggcagcagtgtgcaggccatggaactgctactgtccgaggaagtggatgagtccgagaacgagcagccggaggagcaggagcttgaaaccagccaggagcagtcatcctcatctgccgatgactcttcgcctagcaactga

SEQ ID NO: 37077 - protein, 174 aa, DROSOPHILA
MSQVEQLHLKSPPETAAAGAGSPQAAASVAVAADANETELMVKVVMDMGYPEGEARLALAQSNNNVQRAVQILVEGMDDGETRKRRGNRKRLRQLRSSLMGNPLATDEAIIEMMRDQRIAQTLAELVNGSSVQAMELLLSEEVDESENEQPEEQELETSQEQSSSSADDSSPSN

SEQ ID NO: 37078 - DNA, 2742 bp, DROSOPHILA
cgttctgtatgcctcctccgatccttgcaaggaacttcatccccggaccgtgaagaggagtttacggaatctgtttgcaacgaatgcgacgccgcatgaatgcgtcgtgagaatccgtgaggaaaagttcttgtatccgaagctggattgcctcaagatgacggcgaagccgttgggcttgaagagtgctatcgaaaatatgttgaaatcggaggaaagattcctcaggatgggcacaaattccgaatcctcaacgagtatcatcaatctggatgaacgggcaaggggcggcctcaacgcctcctatgatcccaatatgttaattggggagagtagtagtaacataaaagttctccatcataaccccactttctttagccattcctgcaccttcgggacagaaaatcgtctcagaagttgcatggattctctccatgcacagatacttaagaagtttgaggagaagcaagtggatgttgatgagccaagctccgcgatgaaccagatgtcgatgcaggaggcgagttccgaggttagctcagaggagaacgatattccggaacagctgatccatctgatcaattccttgaataatcgatggaatgagatccgccgacatgaggaaccgagcgaaatctacgttaacgtttttgaattattatggaatgccttgagctactgcatgcaaatcgttcgtcgattctttttcaacaggagggaggagccaggacaagggtcaattcgatcctatatggaccgggcacactatgcttcctttattctgggaccagccactgatgagtgcatagcgatcctagcggatcgcatcgttaccataatcaagtgggcaatgaataaggagctgcaaccttctgagattgcagacgagccgcagtagatgctattttcgcggtggctgtgcggcagtggaatttcccctccccaaaacctgcgagccgaagacggaaacggagcagcagctggggaatgcatcaaacatttactgcccctccaccagtcgctctttaaaacgtttgagtacctccgggatatcgtgttgctctcgactctctgtacccgataaccccgagaaggagccatcagtgttaattcgatgtgcgttcaatccttgtagccaaaattttaagtaaaggaatataatatagcttctgggttttttaatcgacgactgactaaccttgaaacccactggttccatggcgggcgtgacgagggcggcgggattaagctcgatgttgatgttgttgggctccatgatgagccccaggctctgaagattgcacacctccggcagctgtagggtgggcgtgggcaccttgagcaccgccacggtgcagtcgatgctcgacgccgtcaccgtcgcagtggcgggcagcgtctccggcatgctggccaccgcttcagacggcaccgacctctgctcctcggcgctgctcctccgcctcccgatccctatgctgacaccgatcttgactgggttggtgctccgcgtcgcaaatctgcaagatagttgacattcattagattttaagacttgtagactgcatttcactttcattcggaacggaatgctaattggatcaaaacttattacgcaaaagcctaaaagtatagaaaaaaaaagtggcatgtgttggtgggtattatgggattatggagcatactttcaggcaacgaaacaatgcccacatatcaaacttgcatgataaagtcgtgcacatattgaacaaatattgaaccgaaacccgagaaaaacaattggttccggcttaaatgcgagtcgcttctgcgtttatttgtttctttttagtgttcattttggtataagttgtccgcacttattcctatggttacactgtagacctaagcatagtagcacgcggcgcctccggccaggacaccaagaatacaaaacgtacaaataggaaaaaaaaattcatatacttcgatgctggatggttcataaattaggagcgggagcgtttaagtgtcgctaatatcagtgtcgtgaaaagagcctaggcggaggcttgctgccgtcgccggatctcggcggccagatcctcaagctttacgttggtctcctcgcgcgtggtcacctcacgcagtttgaccaatccctgcgccagctctgcgtcgccgaggacaaccaccagaggaatctggtgctcctcgcagtgctgcagctgtactaacagcttagggttcagcttgtaagagtgctccgcctgcgaggattttaagattattatgcagtctcctggattcaactcaaacataccttcacgcccgcatcccacagcaggttcagaaccttcagacgctgctcgtggagacccttgtgggcggaggccacgtaaacctccacgtcgctggttcgcaacttcagaccgcttgcagccgcccgcgcctccagaaccgagaaaatgcgctccacgccaatagacacgcccacgcagggcacagccttgccgcgcggatcgaacatgcccaccaggttgtcgtagcgaccgcctccagccacggatcccacggtggccggctcgttcgcctgctctccgttctgctgtgatgtcttcgccggagatgccacggtggcggactctcccttgagcacaccttcgtagataacaccggtgtagtagtccaggccacgggccagactcaaatcgaagctaactcgcttatccagaccgaatatggaacagtacttaaggagct

SEQ ID NO: 37079 - DNA, 429 bp, DROSOPHILA
atgtgcacgactttatcatgcaagtttgatatatttgcgacgcggagcaccaacccagtcaagatcggtgtcagcatagggatcgggaggcggaggagcagcgccgaggagcagaggtcggtgccgtctgaagcggtggccagcatgccggagacgctgcccgccactgcgacggtgacggcgtcgagcatcgactgcaccgtggcggtgctcaaggtgcccacgcccaccctacagctgccggaggtgtgcaatcttcagagcctggggctcatcatggagcccaacaacatcaacatcgagcttaatcccgccgccctcgtcacgcccgccatggaaccagtgggtttcaaggttaagagtcgagagcaacacgatatcccggaggtactcaaacgttttaaagagcgactggtggaggggcagtaa

SEQ ID NO: 37080 - protein, 142 aa, DROSOPHILA
MCTTLSCKFDIFATRSTNPVKIGVSIGIGRRRSSAEEQRSVPSEAVASMPETLPATATVTASSIDCTVAVLKVPTPTLQLPEVCNLQSLGLIMEPNNINIELNPAALVTPAMEPVGFKVKSREQHDIPEVLKRFKERLVEGQ

SEQ ID NO: 37081 - DNA, 2808 bp, DROSOPHILA
ataccctattagtggtagccctaaaaaaaaagctgcattgcagtctggcaacacctagcaaatgttcacacattcaaattgtcgtataaacaattagttattttttaaggtatttagtacatatttatgtatgcttccaatgaaaggtaacattaagttttatttgccttttattcattacttatgccaattgaaagcaatacatattagaggtctttaaggagcagatttaacgcaacttgtcggttatgcagcagctcagtgcgcatcctgctcaatcccagccacccatcaatcattccatttggcggatcggaaggaggagcaggcaggaagaggaccagaaacaggagcaggaacaggaactggaacaggattaggaacaggagttcacccacatgtgtacgcacacgcgactatatgcagtgatagatgtgtgtttgtgtgcgcctgctatttgtcgccctttgtgatagcaatcaaatcgaatcatatcccgttccgtctatcgacttcccacacccacaccgaatcccaatcccacacccattccctggccgttttgccccgtaatagaatctcctgctgcagcgtcaaggttgtaaatgtaatcatttgtctgctccacggactttggtcctaatcgaattgccagacggcttggctccccaaaagtaagcatcctcatagccatctttggccaggactactcacgcttctggtcgcatttgttttcgccacacaaaagcgaaaccaagtgacagacggaggcgaatcaaatcgaatgaaagtatacgtttctatttgcttgtgatttctgactccacctaaggcccatcctcctcctccgcctcctgggtatgtgtcaatcacacggtggctttcataatgaggtggagcagtcccagccagtcgaagattttgcggcctggcatggggatgttgtgcaaagggacaccaccccaagcattgctcaatcgactgcgaccggatgccatcctcagtcctcagccctcagccaaatgggataaatatagctctgagctgtagttaactctgattgcaatgggataccactaaatctggctggggctgaatccaatgacttgacaatgaaagtgcccaaaaaaacgtggccacatttaaggcactgtggtacagtggttcatagaaagacagctctttcgctaatcatcaaatataatggtaagttgcttactttgtaatgtaaatgctttataagtaacgttgcgattttcactcacctgcagcatgggcagaaagaagcacagaaactggccaaagatccagttctggatgagcatgaccatcagcgagacgggcaggacgagggcgcactggacaaaatggcatagggccagattgatgatgaacgcatgggtcacatccttgtaaagtcgatggtacattatgtacaccacgatgatcacattgagcaccacgcccagtagggcgagagctgcgtactggatgagaaacagccaatagaccgacttgatgctggactttaggatgggaccactaagtcgctccatgtcaaccgtgccattggaatgccagtcgaggaagtgcgagagtgccgtcacatatttgtcgggcacatccttcattttctcgccactgccgccggcatctcctccggatccaccgcctccatatcctcccagtcctccgccgccgccgccgccgcctcctcctcctcctcctcctcctgctcctccactgcttgccgccaactggtaggcatccgatactccgaccaagcgaagttgctcagctggcgacatcctcaccacctgcaatggaaaatcaagaagagattgttccgtaaattaggcgcactgtattcggtatctataataggaaatctttcagtgattgcagtctataagaaaacaatagctaaactaattgattgtttatgggtaaaccaatctgtgtacgcctaacaaaaaacacatatctcaaactgattgtctgatggtctgtgatttgacgatctgaagttggaaaacctttgcgctaccagatggaaaactgcagacatgagaacatacaatgcgtatacttaacaatttggcttaaatcaacaccttttaccttttacatatgtaagtttggggcatcccatcgagaccttgggctctttgtcagatttcaattggtaagtgacattcatgccgcctgcgagtcggtcactcaattcattcactcattcattcgttgtagttacgtttagttttcccgctccgttgttatgttttgcgtttcctttgtttcagcatttgcaacggaaattgccgatgggaaggggaaaagccaggggaaacgcagtggtgaaagccatggaaaagcaactgctgctgcctgcgtacggatgggcaaaacgatatggaaattgaaaatctgtatgcaacgcctgtcccgatttcgtccttcagcctgcggttgcagcttaactaccccgcaaccacacgttctcacaggtggaaaaatcaacaacaagagcgactacggattactctcagtgcgaatggttgtatctttctactcggtagccactaaaatgtatctgagagttatctttgtttatttttaatcggtttcggttcgatgagatcctgcaaaactgttttttttttctttgccaatggctttagtgttaatacctcttacaaaataaggcttttggcacttaggcacttagaactatccatgcttgtgcaccattttgttcgatgagatcctgcaaaactgttttttttttctttgccaatggctttagtg

SEQ ID NO: 37082 - DNA, 645 bp, DROSOPHILA
atgtcgccagctgagcaacttcgcttggtcggagtatcggatgcctaccagttggcggcaagcagtggaggagcaggaggaggaggaggaggaggaggcggcggcggcggcggcggaggactgggaggatatggaggcggtggatccggaggagatgccggcggcagtggcgagaaaatgaaggatgtgcccgacaaatatgtgacggcactctcgcacttcctcgactggcattccaatggcacggttgacatggagcgacttagtggtcccatcctaaagtccagcatcaagtcggtctattggctgtttctcatccagtacgcagctctcgccctactgggcgtggtgctcaatgtgatcatcgtggtgtacataatgtaccatcgactttacaaggatgtgacccatgcgttcatcatcaatctggccctatgccattttgtccagtgcgccctcgtcctgcccgtctcgctgatggtcatgctcatccagaactggatctttggccagtttctgtgcttctttctgcccatgctgcaggtgagtgaaaatcgcaacgttacttataaagcatttacattacaaaagttaactacagctcagagctatatttatcccatttggctgagggctgaggactga

SEQ ID NO: 37083 - protein, 214 aa, DROSOPHILA
MSPAEQLRLVGVSDAYQLAASSGGAGGGGGGGGGGGGGGGLGGYGGGGSGGDAGGSGEKMKDVPDKYVTALSHFLDWHSNGTVDMERLSGPILKSSIKSVYWLFLIQYAALALLGVVLNVIIVVYIMYHRLYKDVTHAFIINLALCHFVQCALVLPVSLMVMLIQNWIFGQFLCFFLPMLQVSENRNVTYKAFTLQKLTTAQSYIYPIWLRAED

SEQ ID NO: 37084 - DNA, 3486 bp, DROSOPHILA
aaattgccaccaaaaaaaaaaaaaggttcaatcaacttggcaatgtgtgccgcatcctggaggccaatggtggctttagtggcaagttaccatttggagaaacgatccgcctaatggaacggattcacaccaataaataagcaccataatattaattcatgacgcacaagaataatggtaatccctggcacagttcagcttttatgagtcgtaagtccatataaaatcacaagtattttcatcatttacaattgcttcaaagcaccacgaacccatagatgtcaacaaattgacattaaattacaccaagttacagcaatttgcacttggctttaaggacgttaagtaaacacgcaaattgccagcttaattcaattgcagtctaaagtccaaagtgtgtaccccgaagaacgaaactatcagaaaacaggaatttgatgcctgattttagatgttggcattccttggctcacttttggaaaattcagctcacaaaatatgcggactaaagggtctgaaaagtgggaaaatgagcatacatacatataaatatgtatatatatatatgcagtgatgatttgaaacagtgccagcccagaggagctggtggagcccacagatcctcccatggaccaatgaaccaatgataccccacccacaccaacgacatgttgggggagtgtatcagaaagttgctacactttatgggccataaatatttatgtctcttgttgctgttgtggctgaacttggtcggcactgaaagtcgatgtagccaaatttgttggcaacaaaatgcaggcacgaagtccgttgacaggcgatgttaacggactcgaattggtatccacttttcggccagcagatgccctggcaaactgcccagaaccagccagtcaggtgagtcctcgattcccgggaatctgtcacttgatgctcggctagcggttcatgttgctcacggaatggcatgcggaggatgccaggacgcttttccggtctagtgcgcttcgctttgatcagccctggcaaccaggagcactgcttgctgatttttaataatgtaacaagtgctcgatggtaggagcgtgctcatactcacccctagctccacgtagatggtgtagatggggtagggcagggcaataaccattccggttagccaggtggcgcagcagcagacgaatcctggcaggcgccccttcagcggatcgttcagccagcgcatccggtcccaggcgatcaggatgtgggagatcatggccacgtgcagcggtatgtcctggaaaagtggttatgaagatacatgagatacatacatacatcaaagcattgcgtatctaaaaacgatacatgtttccattaatacttaaaaaatcttatgtgaaggaaaaagttctcatatttattcaagtgctttaaaatacaatgaatgaacctatacaaatgatgtaaatgagatttgtttgcaaggtttcactgtagctccaagtcatagatgcttaaggcatcaaatagataggattattaattattttagtctctatttcctcttcctcttcctcgcccatttcctagtccacttccacgatctcatcgtcgatctccgcctggatctccttctcgatctcctccttgatctccttcttgatctccttcttgaccacctcctcgatctcctttttgacctcctgcttgaccacctcctcgatctcctttttgacctcctgcttgaccacctcctcgatctcctttttgacctccaccttgaccagctcatccaccatcttcttggtctctattatcttcttgcaatcctgctcgataatatccttgactatcttctcgaacgttggaaagggacatgcctcatgcaaggacaccacaccaatatatttattcttctctcctgaggacgtcagcaaatggggctccttattgtcttgctgctccgttggcgtctgcgtgtccaactgcagtttcagataatcgaagataccatccgtgtctatatcattcatcaaggttgccatttcatccctcttgactatgtatcccgaagtgttttcattattctgtccgccaatactgggcggtgtattctgaaaggcggtgttttctaaaggatgctgcggagcttctggtttaacatcttgtaggtttccatttgctttagcttttgactcattgtccagcatgtcgaattcttcattgaaggtgccttgatatataagtccattcgtgatttttggagaaggctcagggtcttcttctttcgggactatgcccggattggcctccattcgttcgtcctgggtggcaaccggatcgcaatagttctccacgccacgaatgtttccatatgaacgtcgttctcgagtggcatatggatgatctgagaggatgatcaccttctcatgcgtgttgggaccgtcgatgacccattgttcccgggaaacgtggtcgctccctgctgaaatttccatatcctgaagctgggaaaatgacggtattttgggaatgttccaaagctgtcgctgtttaaggtttgatcgttgttttttcgtgctatagatgtgcacagggtcgccgatctccaaaatcttcgactgtaaaatatcaacgaaatataagaaaaaccaatgggtttcactttaattgcttaccatttttacagtcgcttctttaaaattccggtaacgagtattctaaaattattttctaaaaaaaaaaaaccgataagcatgcgcacgtgcctaacaagaagatggcgaaaaggagtgcgaaaaaaatcaaaaatggcttcaaatcagagtggccaaaaatccatcaaagcatggtcacactcgcgccttaaacttcttttataacactgcacttatctgtttacattttccaacttgaagaaatgagataagtaagttaattgattttaggtactggttatgtatattttgtatttatttctgtttatttatcaagctgtaggctttacagcttgataaataaatatcataacctggaataccctattagtggtagccctaaaaaaaaagctgcattgcagtctggcaacacctagcaaatgttcacacattcaaattgtcgtataaacaattagttattttttaaggtatttagtacatatttatgtatgcttccaatgaaaggtaacattaagttttatttgccttttattcattacttatgccaattgaaagcaatacatattagaggtctttaaggagcagatttaacgcaacttgtcggttatgcagcagctcagtgcgcatcctgctcaatcccagccacccatcaatcattccatttggcggatcggaaggaggagcaggcaggaagaggaccagaaacaggagcaggaacaggaactggaacaggattaggaacaggagttcacccacatgtgtacgcacacgcgactatatgcagtgatagatgtgtgtttgtgtgcgcctgctatttgtc

SEQ ID NO: 37085 - DNA, 1185 bp, DROSOPHILA
atggaaatttcagcagggagcgaccacgtttcccgggaacaatgggtcatcgacggtcccaacacgcatgagaaggtgatcatcctctcagatcatccatatgccactcgagaacgacgttcatatggaaacattcgtggcgtggagaactattgcgatccggttgccacccaggacgaacgaatggaggccaatccgggcatagtcccgaaagaagaagaccctgagccttctccaaaaatcacgaatggacttatatatcaaggcaccttcaatgaagaattcgacatgctggacaatgagtcaaaagctaaagcaaatggaaacctacaagatgttaaaccagaagctccgcagcatcctttagaaaacaccgcctttcagaatacaccgcccagtattggcggacagaataatgaaaacacttcgggatacatagtcaagagggatgaaatggcaaccttgatgaatgatatagacacggatggtatcttcgattatctgaaactgcagttggacacgcagacgccaacggagcagcaagacaataaggagccccatttgctgacgtcctcaggagagaagaataaatatattggtgtggtgtccttgcatgaggcatgtccctttccaacgttcgagaagatagtcaaggatattatcgagcaggattgcaagaagataatagagaccaagaagatggtggatgagctggtcaaggtggaggtcaaaaaggagatcgaggaggtggtcaagcaggaggtcaaaaaggagatcgaggaggtggtcaagcaggaggtcaaaaaggagatcgaggaggtggtcaagaaggagatcaagaaggagatcaaggaggagatcgagaaggagatccaggcggagatcgacgatgagatcgtggaagacataccgctgcacgtggccatgatctcccacatcctgatcgcctgggaccggatgcgctggctgaacgatccgctgaaggggcgcctgccaggattcgtctgctgctgcgccacctggctaaccggaatggttattgccctgccctaccccatctacaccatctacgtggagctaggggtgagtatgagcacgctcctaccatcgagcacttgttacattattaaaaatcagcaagcagtgctcctggttgccagggctgatcaaagcgaagcgcactag

SEQ ID NO: 37086 - protein, 394 aa, DROSOPHILA
MEISAGSDHVSREQWVIDGPNTHEKVIILSDHPYATRERRSYGNIRGVENYCDPVATQDERMEANPGIVPKEEDPEPSPKITNGLIYQGTFNEEFDMLDNESKAKANGNLQDVKPEAPQHPLENTAFQNTPPSIGGQNNENTSGYIVKRDEMATLMNDIDTDGIFDYLKLQLDTQTPTEQQDNKEPHLLTSSGEKNKYIGVVSLHEACPFPTFEKIVKDIIEQDCKKIIETKKMVDELVKVEVKKEIEEVVKQEVKKEIEEVVKQEVKKEIEEVVKKEIKKEIKEEIEKEIQAEIDDEIVEDIPLHVAMISHILIAWDRMRWLNDPLKGRLPGFVCCCATWLTGMVIALPYPIYTIYVELGVSMSTLLPSSTCYIIKNQQAVLLVARADQSEAH

SEQ ID NO: 37087 - DNA, 4564 bp, DROSOPHILA
atatatatatatatatatgtacgttttgtgggagtgcttcccatttccgtttcttggcacagttttctcctattccctattccctattccctttccccttccttccttccttccttctcaccaatctctctgatctctaaactgcgatccgtgatctgtgatcctaatcccgccgatcgcagaaatcaacaaacattattagtcaacaaccagttgggcgaagtattccaataactcgatctatatatttagtttatcttatgcatttaggtgtaaatgtatctgtatctccgtatgtatccacccacaaaattgtgtgttctccacgctgagcaactgcgtctgctaagaaaaaaaaagttagctcatcaacacacataccataccctacacaaaaaataattatagcttctgcaaattctactacttaaacacgtagctcccgtagctgcacaactcctggcaaatccgtaaccgtaaagcttttcgtttccctctcgcttctgctccctaaaatctctgcccactgccatcttacagctccgcaaagatgttctccctgaaatcgagctccggatgcgccgagtgcgaggaggagccgtgcccgtagtcatagtcccgcgacgaggacttcatcgagctgcgtccggacaccccggatccggagctaaagctggcgttgcgcggactgctgcgtcgcatccggccctcgatcacggccatcttgttcagcggttgcgtgggatccagctcgcagaaggcgccggcaatcagatccgtgccgtttagcgaattgaagctgtcccgcttggagccgcgtcctccggccacgcctccaacgcccccgccgccatgctggccatgatgatgaccgtgatgatggtggcccgaactggagccggaactcttgcggctcagccgattgcgactgtactggtactgataggcgggaactgcagcagtggccaccggcacagcgccaccggcattgggtggcaggttctgggtgccgcctggcgtatagctgtcatagaaatccggcggcaccacctcctcctccacctcctccaggtggtgcggcagcacctcgtcgtggccaacggacacaccagcgccgctggtctccaaggtggagcacaggctgtactccgtggagatcgagcgggattgcgagagactgctcagcggatcactgccgggcatgaccagcgccagtcccgctccggttccggctccggctccagctgcctcgccgcgctttcccttcggcgaacgctgcgcgtatagcttctcgatgtccggcagctggcgacgcaccttttcccgctcccgttcgcgctgcagcatctcttggatgtccatgctccgctcccgctccagctggtccataatctctaggtcgcgctccagagtgctcgacgaaaaggtgctgctgcactcgctaaatgaaacgtccttgtggcgcagcacaccgccgcccgatcctggccagcgttgcggcggcaccatcatgctgctgaccacggagctctcctcgccgtcgccatagttgcttgtgctgctgtcgtctgggataagtacgccgctcgggccatttccgtttccggttgcgccggcagttacgcttccgctgccgttgcagaacgtcgaggcggtcacgttggacagacagtcggcggttagcttgctgccaccatgccgctggccgggattggtgcgacttcgactgctgttgttgttgttattgttgttgccgcccgtctgtttgcgatgggcgggatgagcggcatgggagtgactggtggcgccatgaccgacgccatctgagatgatgttgatcttgacgtcgtgcttcttgccgcgcacatctttgcccagattgttgaccacgccggcatctccggcaccgcgaccacccgccctctgccgttcccgctccctctctctatccctatcgcgctccctatccctgtccctttccctttccctttccctgtccttgccctggcgatatggtgctcctgtgtagcgatcaccgccagccgacgagccgtgtcctggcagacgcacctcacgctcgtgccgcaactttgacgaatgcttgtgcggttcagcggcgtggtgaacactggtcgtgttcgaggcctcgtccttctcgatggaatcctcgcgggaactgccccccacaccggatcctccgccagcatcgctgcgacgttgggacttctgcttgcgcttcgaggataaacgaaaatagcccctcaaacgctcctgttcatctctgcgggatgtatgaaaagagcaaacaatgatgaagatgatgaagaaaatgaagccgtctccaagtgtttgcattatgcgtaaggtgttcagctcatcatctggctcacctgggcaatatctgcgaggcgtagatgcagggaaagatgaccgtgggcagaaaggccacccacacgaacatcaggtaggtgaagtcgaaatgcttggcattctcgtaggtctcctccagcgagagcctggcgaagcgcagtatcatcagtgggcacatgcacaccacctgggtggcggccatgctgccaaagttgcgctgcttccgcttctcgcgatgcacgtccaattcggcgctgtacaagtcgtaggatcgggcggagttgccgcctccattgctcaatcctgccacacccccgccgctcaggtggcgcggctccaccgaggatgtggaggagttcctacagagggataatcagtaatgcgattattatagcagtcaatgatgcaattggatcatttatggatccatgtgttcgttaattataattttcataaaaaaaaaatgttgttagctagtagtgccagtttctgctcggaaatcctattacatacatatatatacacgtgcactagaaaaagaagccagtaaattatggcacttatagcaagtcctttggctcgccaattaatgtaatgaatggaggagccaggagacggctccatcttcaacccctttaagtgtacaataatagcaatgggttgagcagaaaaagtagctcaagaaattggaacttgttggggaagagtcgtcaggaggacgatgatgatggcgccggcgctggcaatcgctcattagcgctggccaagggattggcacacgggctgagtgattgcgaatcgggttactcggacaggcggcacactgattggtaaatcaccgaattaatcagcccaattagcaggcagatagctggcctaatatttcagcttaatcacgacgactcgcggcgagtgctcacctctggcgcatccgcagatccgcgcgatgctcgtacatcatgacggcgaagggtccgtcgggcggacgcagctcctgggaggtgcggatgtacaggtaggacagcaggatggccggaccgcagtacctgtaaatcgagacggggatcagaggtagctcctacgcgaggcactccacattggcactcacatcagcaggaagagtccgcgcgtgtactcctgcatgtcgtccatcagattgaccacgcacaggccgatccccgacagctgcggcatgtagtcctgcaaggggggaatatgcaatatgtatatcattgaaattgttatggtcttggaaatataatcacggaatgtaagctctaaatggaatatttagcatggataacctgccacttgcaggtcctgatttccagtttgatttccaggtcctgatttatcatcgaagcaccgaaatcagtagcataataatgccatttcactccacttcaagtagcttgtaaataatagattgttttgactttccgtctttgaagtggccgtttatccatcgtttcacatttccaaatcgggtcattgactgacatttagaaacgatttgaagtaggccacgtggacaaactattttcattgattttataattaaaaagtcgttttttcagtgggttggcggggggagggggaggtgttcgtaatggcggaaagttctttgatgtctgggttctctactatcgattgccatgcgaaaatctttaattgaatcaacttgtctgccaatttagcgccgcagtgtatctgaagtacggtgcggtgtgtgtaacacggttgactttcgcgacctcgacctcgaccgtgaccctgaccgacccgaccaggtgggtccaccaccccatcgagcccgacttccccatggagaatgccattccttccgcgaaagacctgagattacatcgtaattgtaattacatatgaattggcgcgtagcgagaaactttttcggatggcgaaggaaattaaacaaagggcggaaatgaatttatggcctcatccaagttattttctcattaaactgctccgcaggatggcagctgcgtatctgaggtgtataaggaggattgcggtaatggaggcgctaagacatccccgcctgagtgggcttaaatccagagccaacgaacggaaatcgccgttttagtgggcgaagcccagtggcttcatcaatcatgcgaaatcatcggtcaggtcaactggccaggtgcgatgatctaaagagtcttct

SEQ ID NO: 37088 - DNA, 2298 bp, DROSOPHILA
atgccgcagctgtcggggatcggcctgtgcgtggtcaatctgatggacgacatgcaggagtacacgcgcggactcttcctgctgatgtactgcggtccggccatcctgctgtcctacctgtacatccgcacctcccaggagctgcgtccgcccgacggacccttcgccgtcatgatgtacgagcatcgcgcggatctgcggatgcgccagaggaactcctccacatcctcggtggagccgcgccacctgagcggcgggggtgtggcaggattgagcaatggaggcggcaactccgcccgatcctacgacttgtacagcgccgaattggacgtgcatcgcgagaagcggaagcagcgcaactttggcagcatggccgccacccaggtggtgtgcatgtgcccactgatgatactgcgcttcgccaggctctcgctggaggagacctacgagaatgccaagcatttcgacttcacctacctgatgttcgtgtgggtggcctttctgcccacggtcatctttccctgcatctacgcctcgcagatattgcccagagatgaacaggagcgtttgaggggctattttcgtttatcctcgaagcgcaagcagaagtcccaacgtcgcagcgatgctggcggaggatccggtgtggggggcagttcccgcgaggattccatcgagaaggacgaggcctcgaacacgaccagtgttcaccacgccgctgaaccgcacaagcattcgtcaaagttgcggcacgagcgtgaggtgcgtctgccaggacacggctcgtcggctggcggtgatcgctacacaggagcaccatatcgccagggcaaggacagggaaagggaaagggaaagggacagggatagggagcgcgatagggatagagagagggagcgggaacggcagagggcgggtggtcgcggtgccggagatgccggcgtggtcaacaatctgggcaaagatgtgcgcggcaagaagcacgacgtcaagatcaacatcatctcagatggcgtcggtcatggcgccaccagtcactcccatgccgctcatcccgcccatcgcaaacagacgggcggcaacaacaataacaacaacaacagcagtcgaagtcgcaccaatcccggccagcggcatggtggcagcaagctaaccgccgactgtctgtccaacgtgaccgcctcgacgttctgcaacggcagcggaagcgtaactgccggcgcaaccggaaacggaaatggcccgagcggcgtacttatcccagacgacagcagcacaagcaactatggcgacggcgaggagagctccgtggtcagcagcatgatggtgccgccgcaacgctggccaggatcgggcggcggtgtgctgcgccacaaggacgtttcatttagcgagtgcagcagcaccttttcgtcgagcactctggagcgcgacctagagattatggaccagctggagcgggagcggagcatggacatccaagagatgctgcagcgcgaacgggagcgggaaaaggtgcgtcgccagctgccggacatcgagaagctatacgcgcagcgttcgccgaagggaaagcgcggcgaggcagctggagccggagccggaaccggagcgggactggcgctggtcatgcccggcagtgatccgctgagcagtctctcgcaatcccgctcgatctccacggagtacagcctgtgctccaccttggagaccagcggcgctggtgtgtccgttggccacgacgaggtgctgccgcaccacctggaggaggtggaggaggaggtggtgccgccggatttctatgacagctatacgccaggcggcacccagaacctgccacccaatgccggtggcgctgtgccggtggccactgctgcagttcccgcctatcagtaccagtacagtcgcaatcggctgagccgcaagagttccggctccagttcgggccaccatcatcacggtcatcatcatggccagcatggcggcgggggcgttggaggcgtggccggaggacgcggctccaagcgggacagcttcaattcgctaaacggcacggatctgattgccggcgccttctgcgagctggatcccacgcaaccgctgaacaagatggccgtgatcgagggccggatgcgacgcagcagtccgcgcaacgccagctttagctccggatccggggtgtccggacgcagctcgatgaagtcctcgtcgcgggactatgactacgggcacggctcctcctcgcactcggcgcatccggagctcgatttcagggagaacatctttgcggagctgtaa

SEQ ID NO: 37089 - protein, 765 aa, DROSOPHILA
MPQLSGIGLCVVNLMDDMQEYTRGLFLLMYCGPAILLSYLYIRTSQELRPPDGPFAVMMYEHRADLRMRQRNSSTSSVEPRHLSGGGVAGLSNGGGNSARSYDLYSAELDVHREKRKQRNFGSMAATQVVCMCPLMILRFARLSLEETYENAKHFDFTYLMFVWVAFLPTVIFPCIYASQILPRDEQERLRGYFRLSSKRKQKSQRRSDAGGGSGVGGSSREDSIEKDEASNTTSVHHAAEPHKHSSKLRHEREVRLPGHGSSAGGDRYTGAPYRQGKDRERERERDRDRERDRDRERERERQRAGGRGAGDAGVVNNLGKDVRGKKHDVKINIISDGVGHGATSHSHAAHPAHRKQTGGNNNNNNNSSRSRTNPGQRHGGSKLTADCLSNVTASTFCNGSGSVTAGATGNGNGPSGVLIPDDSSTSNYGDGEESSVVSSMMVPPQRWPGSGGGVLRHKDVSFSECSSTFSSSTLERDLEIMDQLERERSMDIQEMLQREREREKVRRQLPDIEKLYAQRSPKGKRGEAAGAGAGTGAGLALVMPGSDPLSSLSQSRSISTEYSLCSTLETSGAGVSVGHDEVLPHHLEEVEEEVVPPDFYDSYTPGGTQNLPPNAGGAVPVATAAVPAYQYQYSRNRLSRKSSGSSSGHHHHGHHHGQHGGGGVGGVAGGRGSKRDSFNSLNGTDLIAGAFCELDPTQPLNKMAVIEGRMRRSSPRNASFSSGSGVSGRSSMKSSSRDYDYGHGSSSHSAHPELDFRENIFAEL

SEQ ID NO: 37090 - DNA, 2243 bp, DROSOPHILA
accacggatctcgattcacccaatgaagtattttctaaccgctgaaatgggcgttttactttcgtttcgagcaaataaagcgtagcaaagaatttaaaacattcatttgatttgggaaatatcatccgttgaaagccaacttgattgcttttgatttaggtacatttccaagcgggtatttataattattttttgaatactacaaaatgacaatactaagtaatatggtatacatctgcggatgataaccaattaggcactgaatgattcggcttaaaatgcttttccaaccaacaaaaatgagattttttcatctctggtttaattagatctgtaagccactaagctaattgccaataacaacctcgcatgctaactaaaccagatgctagatgttgcatctagattatgtaaacatgaaaacatatctgtttttcgcgtaattaagcagaataactagaaagtgacaggttaaatagctggctttcttcttggcaatcaattattgggaagtgaagccatcacaggatgacatcgcctattttaatcctgagtctaggtctgctccattggagcatttcgcccgtctggtcacaggtaagatacttcgtactcgtatcgtatatccttgatacccaaattccctgcagaatatgcccactgatgtgatggacgccgtcgatcaaatgcaggagatcttcgaaaacaatatgcagggcccacaaagttcggagtatggtgacgggacattcaatggaacgccctttctacccgaacaagcatcgaacatccaaaactttggcggttaatttcaattcgaattccaattcatagtactactctaaagcaacgccatgtggctaaatattaaattaaattgaagagtgtgtccgcaactttttccctcgtataattgttatccagtgttttcttaagcaattttaaaattcaagtttaactttatgtgcttttcccagagtttcaatagtagattcacccctcaccattgccgtgatgtacttaccaactgctcctgctcctgcggctgctgcagctgcggctgctccacctgctggttcttggccgctcctccgtagtaccgggtgaaggtctgctgcactccgggcgtcttcaggctgtaggagttcgagttggcgtccgtgtggatggagacctgtgcgcggcacacctcctgctggccggcaagcaccaaggccgccaccgtcaaggccaatgcgaacatgatttacgtggtgaggctaatggatggttgatggctggatggctggatggcctggtattggaactcgacttcgtctcccgttgatttggcagtatgtccgagcaaccgtgcaatcggactatggatcgttatcagctaagcggacgcgactcgcgaacgtcgatggttgactgtgcagcgcccgccgactgtccaccgattttataccgccttcgattggggaatgtccacgcttggctctctgcctctgccacttcagtttttggccccaaaaacagcgtacatgcatacatattttggccataaagtttggcccaaaaaatgttgtactctttacgtcttaaatgtgtgaataaagtgaagtaaataatagttgaaccaaatttgaagataataatagtctcaattttcggtttatgaagcacctgaaaaatcatattttaataacacttatagaataatgacttcagtttatcattagagcgaaatatttcacgaagttaacttctcaataataggttcaatctaatcatccattagattattttttaaaaggtgtcatttgattttctctgtgcagttggaaagtattatagcttctattcgaaatcgttgcctgaaatccaagatatctaatgtaatccaattgaactgctgtgccttcaagtttttttctttttttttgacaaagctgccctaccctgtcgcgtttaatataattttccataatttcaatttcgatatatattttattttaattttcacccgcattgttttgtttcacattttgcgtggataactttctttaaactttggtgtctgcctgcggaatatggaataagcaataacaacggcggggaggagtgtgcagtggagggtgtagatgtagatggcaattccaattccaattcaaattgaatatgctctttggcacttacataacaatccgcccccgctgggcgaacggcaaactaaacataaacaccggcataaaacgttg

SEQ ID NO: 37091 - DNA, 243 bp, DROSOPHILA
atgttcgcattggccttgacggtggcggccttggtgcttgccggccagcaggaggtgtgccgcgcacaggtctccatccacacggacgccaactcgaactcctacagcctgaagacgcccggagtgcagcagaccttcacccggtactacggaggagcggccaagaaccagcaggtggagcagccgcagctgcagcagccgcaggagcaggagcagttggtaagtacatcacggcaatggtga

SEQ ID NO: 37092 - protein, 80 aa, DROSOPHILA
MFALALTVAALVLAGQQEVCRAQVSIHTDANSNSYSLKTPGVQQTFTRYYGGAAKNQQVEQPQLQQPQEQEQLVSTSRQW

SEQ ID NO: 37093 - DNA, 5516 bp, DROSOPHILA
ttagaatacacatggcgctaagctttttgtctgagcttagctttatttttagtcagtagacaagaagacctcgatctgtacacatcattgaataaaccctcaatttgttaagcgaaacctttcgttttgttttaacccctctttaatcgacaaagaagtcgatgggtgcttaactgaggagttcaatccttcaacctacagacgacaacgaagtcgtttctggaggcaacgatcttttggacacaacggtctctgctcggaaggccctatcaaccttccacataactggcgacgaggatcaacacagaaaaaataaggaaaccagccatacgtcaagaaattcattcggaaccacagtaagctgttcttatgtaatttaagtccggaaatcttcaatacgttaaccaatgcacgtggccgagtataaagaggaacataaaacataactggaaagctttggaacacctgcatgtacggagtgacgaaacccaacctggagaagaagaacttaagctgataaaattttttttttcttcgacaaagctctttatactagctaagataagaaactaaaagctaactattaatacttgcgaacctcgagagaaaacaaagaaatctaaaatgaacgaaaatagcttagccgcatttaactcaacaatgaactgcatcaagttaatacaaaattttgatggtactgatacaaatcaattgccagatttaattacacaaatagaaaatatccttccttcttttgatgttttcgacacgaatacaaaaaatattttgtttggctttataaaaaataaatttgtgggattatgcaggccagtgattcataggcatggaaatatgacagagtgggaaagttttaaacgtgtaattctgaaaaatttcggggaaaaagaaacaagcgatgtcttaatggatatgttaaaattgtgtcgagtggaatcaactatagaagaatattataacaaaattaatgaatttcgaatagggtacacaaccggatactgatccatgacgacaaaacatacaccacattagaagtgaaccgaattgcactccgcgtttttagagacaacttgcctgaacctacaaaaacgttaatattcgcgagaaacccaaattccgtagaggatgcctataaaatcattgaagatgctcggcatcaaagctacacattatacggaccaattcgaagaaataataggtacaataaacccaacttcagaaccaatttcagtaatgataatagaaatgtaaacgaacagtcgttacagaaagaagccttgatgaagccaataggtttcaacaaaataatgttgaacaacaagaaaattcaagaactgaaggtacgcctagggtaaataatagaaggcagggatatcaatatcaatcgaataatagctcaacttctaattctgctcgagtctcaacaaatagtcgaaatgtgcaaagctctgagcaaagcaggcgtagtttcgagccaatggatattaatcaatcagtgtaaattttcagatagaggatcaagacgaataccatatatagaagttcaaggtaaaaagaggccattattatttattattgacactggagcagaattcagtgtaataaatgataatttgtgtcacccgaagtggaaaacagacattgacatagaagtaaaagcaatgggaaacaaaaattaaaatagaaaattatgcaggtttccatgttttcaagaatttgaagctgaaggttatatttgtgaatttctagagtataattttcacaactatttcgatgggctaattggctgtaacatacttaatgacttgcatgcagtcatcgattactcaaacaaaaagattcaactcaataatgtttatttagatcttttagttcaggaaaaccacttggatcttggcatacataacttaattccaatgaacttaatttgtccacaggccagatcctcaataaatgagcttatacaaaaattcgaacatattttttacaaagaaggccaagacctaagtttcacaagtgaaatcaaacacaggattattacaaagaatgatcttcccatttattcgaaaacatacaaatacccagaaattcacaaagacgaagttaaccggcaaatagcagaaatgttagatcaaggaattataagacactctaaaagcccatataatagtcctttgtgggttgttcagaaaaaaatggaccagtccaataagcaaaagtggcggctcgtcgtagactaccgtaaacttaataaggaaaccattgaagatcgattcccgatcccaaatatagacgagattttcgacaaattgggcgactgtaaaattttttcaactttagaccttgcaaaaggtttctatcagatagaaatggacaacaaagatgtgcacaaaacagccttttcaacaaccagtggccattacgagttccttcgtatgcctttcggactacggaacgcaccttcaacatttcaaaggctaatgaataatatccttagcccctataccggacaattttgcattgtttacatggatgacatccttatattttctaagaatataggggaacacgtcaatcatttaagctgtatcttcagctgtctatctaaggcaaatttaaaactccaatcagacaaatgcgagtttgccagagaggagattgaatttctcggacataccattaattcagaaggtctaaagccaagtcagaagaaaattgacgcaatttgtaagataaatttaccgacaaaccagaaacaaattaaaagttttctaggcatcacaggttatttgaggcgctacataaaagactactccaaaattgcccagcccttaataaaatacttaaagaaaaattctaaaataaacacacatgatcaagaatacgtagaagcttttcaaaaactaaaaatcctaataacaagcgatccgatagtcgtttacccagattttaacaaacaattcacgatagttacagacgcaagtaactatgcattaggcgccgtgctcatgcaagataataaagtaatttcttatgctagtcgttctcttaaaaatcatgaacttaattacagtacaatagaaaaagagcttcttgcaatctattggtcaacaaaattctttaaatattatatttatggaagaaagtttataattaaaaccgaccatagacccctagtttggcttaataatctaaaggaacccaacctaaagttacaacgttggaaagtgcaattaaacgagtttgattttgacataacatttataaaaggtaaagaaaacgctttagcagacgggacttagcagaattgtcaaagcatcaacagaagagtatgataaaaatgcccaaacaaatatagaaattaataacttagatatatttatgctagagaacactaacacattaccggaagttacgcctaagacaaaaattataaatgaagatttctcgaaagatctaattcatatatttgccaacgatattgacgatttggaaactattcacagtgcggactcagacgatcttaattttattagtattacaactaattgtctaaacgtttttaaaatccaaatacaaataatagaagcggaaagcgatttaagtaccttcaaaattttgcataacaagaaaatacgacatatctttaaatcaagcggaaatcaggaaaatatgcttaagttcatgcaagagaaactgccagaaaaaggcttagttgtaatattttgtgaaaatttaagtttatttgtaaaatttcaagaaatttataggcagtatttttcaagtaataaaaatttaagaattctaaagtcaggtacattgttagaagacataaatgataaagaaaaactcctgaagattatcgaaaacgaacacataaagaataatcccagaggcattaacgaaatttttatatctataagagaaaaatactattatccaaaaatgcaaaagtttattcaaaattatattaacaattgtaaaatttgtaatttagcccaaatatggatagccaacctataaaatataatttttaatattacagaaacgccagataaaataaacgatataattcacatagacatctggtatcctaaaagaaacattatgtacgttacatcaattgacaaaatgtctaaatatgccactgctcaacatattaaagacagatcttggatttctttgcttaacgcaatcaaattaagaattcaatacttaggaaagccgaaaaagattgtaactgataacgaattcgatattgtcgtaattaagcaatttctcctcgaaaataacatagatatacacctttacaactccttataagaaaactggaaactctgatgtggaaagattgcacttaaccctaaatgaacatatgcgattgtataatgctgatccaaacaattttgacactattcaagaaaatgtttataaagcaattgtttgctataataacacaattcattcaaccacaaatattagaccgatagatttatttaataatatactttgtcacgaagacatctctaaactatccgaaaagctagtaagaaacaaacaaactttaaatgcaaaacaggataacataaacgagtcaaacttctcaaatatatttgtaaaaaataatcaagtaggaaaatcaaatccaaaatataaagaaataagtaattacactcaatacggtaactacttgattaataataaagacaataaacgaaaaatctataaggatcaggtgaaacggaaatataaatatcaaaatgaagattgtgaaacctaacatttctgtactcctattatttacatatgtattacttaatgaaataatttcaaccacatacttgaaacttacgctgggggagtcatgtatacccttacataccctcttattagattaagttatgttagaatacacatggcgctaagctttttgtctgagcttagctttatttttagtcagtagacaagaagacctcgatctgtacacatcattgaataaaccctcaatttgttaagcgaaacctttcgttttgttttaacccctctttaatcgacaaagaagtcgatgggtgcttaactgaggagttcaatccttcaacctacagacgacaacgaagtcgtttctggaggcaacgatcttttggacacaacggtctctgctcggaaggccctatcaaccttccacataactatatatgtatgaaatctttgaaacttggacttaaaataactaacaggtctaaccttcagtttgccaattaaatttggttatttttagttactcatatatagtagatgtattcaattaagttaatccacggcttctcgcagtgcagatatggatattgaaatggatgcacacgtggccactcaaaggattcggggctcatcatgtatgtttggactgcgcttcgctgtggccagttgagtccaacccccaccacccatccagtgacctcgttcccatcagcatcatcctcgtcccaattagccgccgg

SEQ ID NO: 37094 - DNA, 2819 bp, DROSOPHILA
ggtacacaaccggatactgatccatgacgacaaaacatacaccacattagaagtgaaccgaattgcactccgcgtttttagagacaacttgcctgaacctacaaaaacgttaatattcgcgagaaacccaaattccgtagaggatgcctataaaatcattgaagatgctcggcatcaaagctacacattatacggaccaattcgaagaaataataggtacaataaacccaacttcagaaccaatttcagtaatgataatagaaatgtaaacgaacagtcgttacagaaagaagccttgatgaagccaataggtttcaacaaaataatgttgaacaacaagaaaattcaagaactgaagataaatgagcttatacaaaaattcgaacatattttttacaaagaaggccaagacctaagtttcacaagtgaaatcaaacacaggattattacaaagaatgatcttcccatttattcgaaaacatacaaatacccagaaattcacaaagacgaagttaaccggcaaatagcagaaatgttagatcaaggaattataagacactctaaaagcccatataatagtcctttgtgggttgttcagaaaaaaatggaccagtccaataagcaaaagtggcggctcgtcgtagactaccgtaaacttaataaggaaaccattgaagatcgattcccgatcccaaatatagacgagattttcgacaaattgggcgactgtaaaattttttcaactttagaccttgcaaaaggtttctatcagatagaaatggacaacaaagatgtgcacaaaacagccttttcaacaaccagtggccattacgagttccttcgtatgcctttcggactacggaacgcaccttcaacatttcaaaggctaatgaataatatccttagcccctataccggacaattttgcattgtttacatggatgacatccttatattttctaagaatataggggaacacgtcaatcatttaagctgtatcttcagctgtctatctaaggcaaatttaaaactccaatcagacaaatgcgagtttgccagagaggagattgaatttctcggacataccattaattcagaaggtctaaagccaagtcagaagaaaattgacgcaatttgtaagataaatttaccgacaaaccagaaacaaattaaaagttttctaggcatcacaggttatttgaggcgctacataaaagactactccaaaattgcccagcccttaataaaatacttaaagaaaaattctaaaataaacacacatgatcaagaatacgtagaagcttttcaaaaactaaaaatcctaataacaagcgatccgatagtcgtttacccagattttaacaaacaattcacgatagttacagacgcaagtaactatgcattaggcgccgtgctcatgcaagataataaagtaatttcttatgctagtcgttctcttaaaaatcatgaacttaattacagtacaatagaaaaagagcttcttgcaatctattggtcaacaaaattctttaaatattatatttatggaagaaagtttataattaaaaccgaccatagacccctagtttggcttaataatctaaaggaacccaacctaaagttacaacgttggaaagtgcaattaaacgagtttgattttgacataacatttataaaagaaattaataacttagatatatttatgctagagaacactaacacattaccggaagttacgcctaagacaaaaattataaatgaagatttctcgaaagatctaattcatatatttgccaacgatattgacgatttggaaactattcacagtgcggactcagacgatcttaattttattagtattacaactaattgtctaaacgtttttaaaatccaaatacaaataatagaagcggaaagcgatttaagtaccttcaaaattttgcataacaagaaaatacgacatatctttaaatcaagcggaaatcaggaaaatatgcttaagttcatgcaagagaaactgccagaaaaaggcttagttgtaatattttgtgaaaatttaagtttatttgtaaaatttcaagaaatttataggcagtatttttcaagtaataaaaatttaagaattctaaagtcaggtacattgttagaagacataaatgataaagaaaaactcctgaagattatcgaaaacgaacacataaagaataatcccagaggcattaacgaaatttttatatctataagagaaaaatactattatccaaaaatgcaaaagtttattcaaaattatattaacaattgtaaaatttgtaatttagcccaaatatggatagccaacctataaaatataatttttaatattacagaaacgccagataaaataaacgatataattcacatagacatctggtatcctaaaagaaacattatgtacgttacatcaattgacaaaatgtctaaatatgccactgctcaacatattaaagacagatcttggatttctttgcttaacgcaatcaaattaagaattcaatacttaggaaagccgaaaaagattgtaactgataacgaattcgatattgtcgtaattaagcaatttctcctcgaaaataacatagatatacacctttacaactccttataagaaaactggaaactctgatgtggaaagattgcacttaaccctaaatgaacatatgcgattgtataatgctgatccaaacaattttgacactattcaagaaaatgtttataaagcaattgtttgctataataacacaattcattcaaccacaaatattagaccgatagatttattt

SEQ ID NO: 37095 - protein, 681 aa, DROSOPHILA
MKPIGFNKIMLNNKKIQELKINELIQKFEHIFYKEGQDLSFTSEIKHRIITKNDLPIYSKTYKYPEIHKDEVNRQIAEMLDQGIIRHSKSPYNSPLWVVQKKMDQSNKQKWRLVVDYRKLNKETIEDRFPIPNIDEIFDKLGDCKIFSTLDLAKGFYQIEMDNKDVHKTAFSTTSGHYEFLRMPFGLRNAPSTFQRLMNNILSPYTGQFCIVYMDDILIFSKNIGEHVNHLSCIFSCLSKANLKLQSDKCEFAREEIEFLGHTINSEGLKPSQKKIDAICKINLPTNQKQIKSFLGITGYLRRYIKDYSKIAQPLIKYLKKNSKINTHDQEYVEAFQKLKILITSDPIVVYPDFNKQFTIVTDASNYALGAVLMQDNKVISYASRSLKNHELNYSTIEKELLAIYWSTKFFKYYIYGRKFIIKTDHRPLVWLNNLKEPNLKLQRWKVQLNEFDFDITFIKEINNLDIFMLENTNTLPEVTPKTKIINEDFSKDLIHIFANDIDDLETIHSADSDDLNFISITTNCLNVFKIQIQIIEAESDLSTFKILHNKKIRHIFKSSGNQENMLKFMQEKLPEKGLVVIFCENLSLFVKFQEIYRQYFSSNKNLRILKSGTLLEDINDKEKLLKIIENEHIKNNPRGINEIFISIREKYYYPKMQKFIQNYINNCKICNLAQIWIANL

SEQ ID NO: 37096 - DNA, 3573 bp, DROSOPHILA
aaaaactcaaaaaaaagaaaatgaaaatgaaaatgaaaatggagtgggtgaatccagtgggttcaccttgtccgctggcatttccttttgccgcattcggacaagtgcggacaaatttccaattaaacaatcgatgcgattaacacgaaaggcgatctctgccgccaaaaagaaggcgtggccgatggggggcggcggtggtggcggcattattgcgtagagcggcgcgcctgcgctctgcctgctttgccaactgatgaaaacccgttctcatggctgttgccacttttttgcttttttccactgattttcctcaactttgtttttttttttaatttatttattttttttttgcaccatattttgagagcagaccggcggcagctgcgagctgcaaactgcaaactgcgtataaataggcccaaagaactgcgaaccgagacagttaccaatcgcaatccaatcgaactgagtcgaatttttttcaagtgaatcactttaacaatggcattcaaggtgcgtgaaaagttgttgcacatcgcaggcaaaccgattgacatggaaaaggagccggtggcacggggatgcgagttgcctgcacttgttatcctttcactcatcgctcgacagccaaccacaaagggggggcacatcctttttccagtctgctttgttgcttctcagctggcaggataactagctggcatgataacgggctggcaggataactgtctgcctatctctggctggctctggctggtggctcctggccaggccacagctctcgacctcatatggtcaatagaaagtggatttcaatctcggcccgctcgcaattgaaaatcaatgttgaaggcaatgaaaaacgagagcaagaccaacacgcatgctaattgtgcgagtgccgagtggcagctgattatgaggcctcgatctgggtcagttttggccaggaatggttcagcaagcaaaatgggccaggaaatatgagaacggctgaatggggcacttggtgaaaaatggctcgtgcaaaaacgagatataaagcaccactcgcacaacaaataattacaatttcgagtgtcagtaacaaattgattttgtatcttgattttgtagtccttttttttatatcagcatttcctggctctttgtcagagcaatcaattgatgggcaccagttctgcattcagatgcacaagttgaaaataactttctatgcttattgtctatttacgaaaatagttgctttccagctaacgatttatttaacctggcttgtattggacagctctgtgtgtctttcgattaagcgatagaaatcgcagcagcaccctttcaaggccatattccaccatggcagcacaccccaactattccaactttatcaacttaattaaaagttttctcgccagcaatttcctgcagacggtcgaactgtgacagagccaaacgacactgatttatacaattgcgcatattatatgtaaatatctcaaatctaacgcattttcaggttatcctctccgttgtcctggtggcgctgatcgcctgcgtccaggcgaagcccggcggtccggcggcctattcgattagtgcgcccagcgttgaccacgcctccgtgggcagcactcaggagcatacggtgaagggtcactacggccagtcctcccagtcggactatgccagccaggtccagaccgctcactcgcagtcccatgtccagcggtccagcatcagcaatgacgccggactggcgcccgtcgccgcccatggctacgcaggtgagtcccggtcgcaggatctccgatccaagccaagccacccatccaatccactcaatccaccgatacttccaacgccaaatgtacaccattgcaccacccagcacactactcacacgcaccactttgtgtcccctttgcacgtagtcgcagtgatggctcaggtttttataactcttccatttatctggaacacatcttgatatttgcgtacaagaaacttttcaaagactacatgtttgaaacactttaaattgctcacaaactaaatattatactttaaacatctaatacgcgaattatacgagtagatgagaaaagtacctcaatcattcaaagtttgttgaatcatttgtgaactgatagatacacgcagctcaaacagatacaaaccggccattactgcttagttgattgttaacacttttaacccgaaaatgaaaatgcaaaacccaagctgctccggcccatgccatcgctgcgccggcctactccttgggctacgccgggcacacggctcccgcccagattcagggcgtcgcctatggcggacactatgcggccagcgctccggctgtgcagatctccggactggggcactcgctgggactgggacactcgctgggacttggtcaatcgctgggactgggcggatacggtggctacggatacggaggctatggctcctatagtgccgctccggtcatctcgcacggatatctggcccatgccccagtcgccgccgctccagttgtgaaatacgccgctgctccatcgtacggtaggtgaccaggataaccgaggatatcgaagatatcgaggatattgagttccggcatccaggactaactaacgctaaccccatctcccagcattaacttcacttttccgcactttcgcacgctttcgaatccccgaaaatctgattcctcaacgatttcgcaacgggttttttttcccagtctgaaagcagaaaaggaactttattgtgttttcgccccgttggccaagtgcacttggcaaaaacaaactttggcccgggtggtggagtgcacagcgcaagtttcgctccatcaggcacggaggacttttctgatatatgggtggttagtctgggctccagagttagtacgcaaccaggtgggaaagcaggggagtctcacatctgggagatcgttttgatgcagcaagctaaaaggaaaactttagggaaaattgtttaaagttggaccgtgaaaattgcggcaggttgccagcaagacatcacagagatcacagcgataagacacaaatgattgcggcttgaaacaaagagtccagctgaggttaaagccctcaaagatcattgctgtttgtttgcacgcttcaaaggattgccaatgcctagcggagtcctagcgagcaatcgatacatctcggccatctggccgagcaaacaaagcagccaacaaaagggataatcggttttgggtccggccgcaatcgatttgtcttgctaaaaaacagatacaaatgtaccggtggatgggggtgtggaaattcggcggtgaggtaaccatcaggtcaggcatgtaatcaatcattcgccgcctatctatttcgaaggctttaaagctccgctctggcaatagtcggcacagcaaggtggtgcaaaaactgcatcccaatggctcctgggggattcagctggccatgtcgaagtccaagtcagcgagtcaccaaaatcacccaatcaccgaattgcccagtcacccagtcacccattcaccgttcccgttcgattcggtgt

SEQ ID NO: 37097 - DNA, 612 bp, DROSOPHILA
atggggcacttggttatcctctccgttgtcctggtggcgctgatcgcctgcgtccaggcgaagcccggcggtccggcggcctattcgattagtgcgcccagcgttgaccacgcctccgtgggcagcactcaggagcatacggtgaagggtcactacggccagtcctcccagtcggactatgccagccaggtccagaccgctcactcgcagtcccatgtccagcggtccagcatcagcaatgacgccggactggcgcccgtcgccgcccatggctacgcagctgctccggcccatgccatcgctgcgccggcctactccttgggctacgccgggcacacggctcccgcccagattcagggcgtcgcctatggcggacactatgcggccagcgctccggctgtgcagatctccggactggggcactcgctgggactgggacactcgctgggacttggtcaatcgctgggactgggcggatacggtggctacggatacggaggctatggctcctatagtgccgctccggtcatctcgcacggatatctggcccatgccccagtcgccgccgctccagttgtgaaatacgccgctgctccatcgtacggtaggtga

SEQ ID NO: 37098 - protein, 203 aa, DROSOPHILA
MGHLVILSVVLVALIACVQAKPGGPAAYSISAPSVDHASVGSTQEHTVKGHYGQSSQSDYASQVQTAHSQSHVQRSSISNDAGLAPVAAHGYAAAPAHAIAAPAYSLGYAGHTAPAQIQGVAYGGHYAASAPAVQISGLGHSLGLGHSLGLGQSLGLGGYGGYGYGGYGSYSAAPVISHGYLAHAPVAAAPVVKYAAAPSYGR

SEQ ID NO: 37099 - DNA, 3092 bp, DROSOPHILA
aaaaaaactagccaactcttaacatgccaatcgaatataatagcatagactttcttgcgtctagctacatacattggaattgcgtttacgcagcgttgcttaagcgagtgcataattgcagcacttagatgcaatttgcggtggttatacccattactcgtagagtacaagggtatactaggttcgttgaaaagtatgtaacaggcagaaggaagcgtttccgaccatacaaagaatatcaatatatatacatgtatatattctcgatccggataaatagggataaaaaagcttaaaggctgagattagcatacagattgacccacccctccttacacctaccaaacaaccaaaacgttcgaggcgtgaacttttaaaaaatttgaaaacatttcttctcgttttattccccacaatatctatcgatattccagaaaaccgttgaaatttcgcgaacgcacttccactagctgagtaacacggtcgcaagtcgcgactatagcattctatctggtttttaattgctagcggtttcctaaatcgatgtcagccgctagaaaatgttttagtgccaggtccccagggcagaaaatacaatatccctggtaatatacaatatatattgtctaatttatcgttataataaaaatataccaaaatatacaagagttgaagttttacaaacgggcgacaactctatcattttcagtcaagtcattcagtgcgaagtaagcatttcataaaatctgaacctttattcagttcttcccatttctacagaaataatattcaagaatccataatctataatccaaaacaatgaacttcatctcgttcaggtaaataaaacgccgtaaatctgtagctttcaccgagcatttcacaaacacatttttcattatcatttgtcagcgtaattagccgctttgactttttttggttggacgtgcttaagcaattggatctgaagtctcgcattagctttgcagccagttgcgatatgtttgagaacatctatgttaggagttctcctctacgcctgagccgcgtagttaatttggaggaaatgattgagttctcattgcttgaaaccaaactatttgtggaactttcgggttctgacattgagattatacgcggaggtccacataccccaatgttttcacatttcgaggatttcatacgcctgatgtcgatccggctaacgaaggtgaatgagattgctctcgagggattccaactcacgcaatacaagtggttcaacgctcccgaaaccagcttcagcaacttgacctatgttagcttgcgtcgttgtcagctcaatgatgagaaccttgtgggctgggagttcttgactcatctggagacattggatctgagatacaacgatcgattgactgggagctgtttgatgagtcttccaacttcgttgttgtccctttatataaccggctgccggaatttgtgcccgaatcaactaatattcctgaaccgtataccacgactacgcgagctgcgtgcctcggacctgatgcccggcgggcactggcatatctatcgtgacctggtgctggcttgtcccttgctggtgatggtcgagatatcaatttgctccctaaaccgggatgagtataggctgggtgagctgcgctatctgcagtcgttggtcattaaagctcactccacagacacaattcgctgtaaggtcagcgactggatgctgatttccctattggatgtgccctttctgcgaaacctgatgttttcagatgcaccgagtggctttgttagcgcaaatgccctgtcgattatatcgagatttcggcagctgcgtgttctgaaaatgccgaatcagccataccggcccaatgacctcttaagattgaggaatctaacttttcttgagacgctggacctcagcaattcaccctatatcactaatgaggttgtcatcgaactggtcataggaattcccaaccttagtgtgttaatagtccaaggatgtcctctgctcacaaatcgtgtataccttgatgcagaattggccagtaagaaaaggagcaatgggaacatggtcaaggtgcagctatagactgactcgaaagaacgtccaaatgcgtaattcagcaacaacataacaaaatcggcatccatattaaaacaaattgtacttatcattgtaataataaatgacttatcataataataaatgactcctagagtttatagccgaattctgttggaaaaaatttgttaaaggtagcaggtcttgattcacttggccattccttaagtaatctcgttagccgacaatgagtgaaatcaaatatgaaacaatgtgaaaatcaagttaaacgcaagaatgtgccattattgttttttattttttgttttgtttttgtttttgtttttttttttgtatttcttgtttggccccatttcgtttagctgctttgaatattctcattactgcgatgtaataatattgtagcagtgagggaaagcctgaaaataataaatgcgcagattgcacaacaaattaacgcggggggcacgtgggcgtggcatgtcgggggcaccgcccacttgtcaagcgttttcaatatcgcagctctggcatcgaagcaaaaaaataaaaaaataataataaaaaaaaggtaaaaaaaagaacacaacaaaatggggagaaaaaatgaaaaaaataattctctgaaaatatgaaaaaatagatgaagacagcaagacaacaaaggcgcacgaacccagtgcacaaaggcggctcgaatctggccaaaaagatctggccacatggaggtgtggccggccggccgcctttttgcctattgatttcgtaattgaaggttaaattttaatgctctcgactaagcaactgtgtgtgcgttgcacgtacacacacacaagtgttggcagttaatagcgcgtggtatcaggacattgttccagtttcggttcgctgctgccacgccctcgttggaatggcgtgcaccatctggcggacttctggacgcaccaggtgggtggcgggcactacgaggttggtgcgataagatagccattaagatgtagcacca

SEQ ID NO: 37100 - DNA, 1092 bp, DROSOPHILA
atgtttgagaacatctatgttaggagttctcctctacgcctgagccgcgtagttaatttggaggaaatgattgagttctcattgcttgaaaccaaactatttgtggaactttcgggttctgacattgagattatacgcggaggtccacataccccaatgttttcacatttcgaggatttcatacgcctgatgtcgatccggctaacgaaggtgaatgagattgctctcgagggattccaactcacgcaatacaagtggttcaacgctcccgaaaccagcttcagcaacttgacctatgttagcttgcgtcgttgtcagctcaatgatgagaaccttgtgggctgggagttcttgactcatctggagacattggatctgagatacaacgatcgattgactgggagctgtttgatgagtcttccaacttcgttgttgtccctttatataaccggctgccggaatttgtgcccgaatcaactaatattcctgaaccgtataccacgactacgcgagctgcgtgcctcggacctgatgcccggcgggcactggcatatctatcgtgacctggtgctggcttgtcccttgctggtgatggtcgagatatcaatttgctccctaaaccgggatgagtataggctgggtgagctgcgctatctgcagtcgttggtcattaaagctcactccacagacacaattcgctgtaaggtcagcgactggatgctgatttccctattggatgtgccctttctgcgaaacctgatgttttcagatgcaccgagtggctttgttagcgcaaatgccctgtcgattatatcgagatttcggcagctgcgtgttctgaaaatgccgaatcagccataccggcccaatgacctcttaagattgaggaatctaacttttcttgagacgctggacctcagcaattcaccctatatcactaatgaggttgtcatcgaactggtcataggaattcccaaccttagtgtgttaatagtccaaggatgtcctctgctcacaaatcgtgtataccttgatgcagaattggccagtaagaaaaggagcaatgggaacatggtcaaggtgcagctatag

SEQ ID NO: 37101 - protein, 363 aa, DROSOPHILA
MFENIYVRSSPLRLSRVVNLEEMIEFSLLETKLFVELSGSDIEIIRGGPHTPMFSHFEDFIRLMSIRLTKVNEIALEGFQLTQYKWFNAPETSFSNLTYVSLRRCQLNDENLVGWEFLTHLETLDLRYNDRLTGSCLMSLPTSLLSLYITGCRNLCPNQLIFLNRIPRLRELRASDLMPGGHWHIYRDLVLACPLLVMVEISICSLNRDEYRLGELRYLQSLVIKAHSTDTIRCKVSDWMLISLLDVPFLRNLMFSDAPSGFVSANALSIISRFRQLRVLKMPNQPYRPNDLLRLRNLTFLETLDLSNSPYITNEVVIELVIGIPNLSVLIVQGCPLLTNRVYLDAELASKKRSNGNMVKVQL

SEQ ID NO: 37102 - DNA, 2261 bp, DROSOPHILA
acaatagttcattgatagtcgctacacgagcaccacgtggcgtatgagcaatttgcaattgcagattaatagctggccgtattgatacttcctgcgcagagatggggctgggcaaaggggggccaggggcatcgcggggcctttaatgcccgccaatttggggggataccacacggcggttttcatctttgccgacccaacgaaatttaaaagtttcacacataacaaagtgcgaaggatgcagtcaaaagagcccaaaaagagccaaacttaattagcgcccattgcaaaaatatttacggcaaaacaaaataacacccattaaggcagacccggcgggggcagaggcttcccagggggggcgggcggttggccaagcgggcacagggggcggagtggcagagggggggcgcaaatgcgtgatgatcaccgggtaacgcccctcgacaaagccccaaaaacggagccacagcagcagcagcagccacaccaccaccaggagcattggccgaggggagggtggcggagatatggaagatggatgcatatggagcgaccatcaaaggcacagtgcactgcgagaaatggcgcgctacacaacatttacttatgaataatataatatgaatttatagcctttcaaatagctagtaacttataatatttaactaaatatatttattattgtgagcccatcttttcatcaaagtatttatttaataatttatcgtacctaacacacgatttaatacaatatatatatatataaatccataatttgttttaacctatgctattaaaagcagtcccccgttttctcgccgtgctgcggccaaggaagcgggaaccggcgactcacactcatccatgggaggtgcaaacgcctcaacgcagcgcgatttgatcccagccgatccatggcagcccagcccatccgtgctcacgttcttggccatggcccgtcattatgagccgtcaccttgttgtgtagacattggccatggccaccgcacagacgcagacaaagatggagccggtcggcggctggtggatggtggatggtggatactggatgctggatgctggatgctcggtgccgaatgccggtgccgagtgctggatactggatggtggatactggtgctggatggtggtcgacgatcggcggtcagaggggatgcaactgctaatccggttcgactgcggcggcggcggcaatcgctggagtgaaatcaactcgttaactcgttaccaaaactgatcccatttagcggcggcgcatcgcgaaccggcgccagtcgcacagccccgcggaatgccctacaccgatggggagtctagaagattggggattagctgcatggcttggtatgggttttacctcaagatttattttatatgaatatgtcagctttgcttgtggttaactacaataacatatttaaacagattataccaccaaatatttataaatatttttgatatataacattgaagattaacttattttatgaaagggtatttatttcatattgcatattcatactgttaatgaaacccataaggaataccaagtagcagggtattcgatgtacctttaagactggccaaaagtagcgaacaatgcggtccagggggcgtggtgagcggcgggggctcgggggcaaaaggtggagccttaactttgactttagctttggctcaggcgcattcgcgtcatcagcatcatcatcgccaacaccttcatcattatcggcggtgtcggcgtctaacccatatgcccatgcttaacccatacccatgcttaactccgcatacccagatccatgcccatatcgcccaaggcggtggctgctgctgtggcagtggcggcgttgctctctcatcgtcgtccgccaattgccagatcccgaagtcaaagggagcgaaggatcctcagtgccgttgccagtccctccagatcccgtccgtaggtggctgtgatgatatactttgcctgcctgtttggcttagctgttgaaaatggggagctgctccagcggcttccgctgcaaactggcaatattgttgcattgttattcttattgttattccttggccccaaaaacagaggaatagcggtgtggggcagtggctgaaaggatattggagcctcttcggcggcggcagcggcgacggcggcatcggcatccatgttattaacttattttcaaccaataaaacggcaatgaagcgaagggcgttgaggaggggtagcgggg

SEQ ID NO: 37103 - DNA, 261 bp, DROSOPHILA
atggccaccgcacagacgcagacaaagatggagccggtcggcggctggtggatggtggatggtggatactggatgctggatgctggatgctcggtgccgaatgccggtgccgagtgctggatactggatggtggatactggtgctggatggtggtcgacgatcggcggtcagaggggatgcaactgctaatccggttcgactgcggcggcggcggcaatcgctggagtgaaatcaactcgttaactcgttaccaaaactga

SEQ ID NO: 37104 - protein, 86 aa, DROSOPHILA
MATAQTQTKMEPVGGWWMVDGGYWMLDAGCSVPNAGAECWILDGGYWCWMVVDDRRSEGMQLLIRFDCGGGGNRWSEINSLTRYQN

SEQ ID NO: 37105 - DNA, 2204 bp, DROSOPHILA
cccgcgatgaatgcgaggatgagctcgcaacgtatgtgggtacaaatgccaaattgcaactgcaactgtcgacttcttttgagccgggtagtgcggagtgctgaagtggggaagtgggtagtgggtgatggtgatggccagtgggtctgccgattggattgcgaactgcgaacttgggactgcgagtgcagcttcttggcggcaaagtcgtgacttaccctcgccgcgatccgataaccgcagctgggaaaaggagaagagaaaaatttacccaccagcaggatatatttaagaccacaaaagaccacaaatgtgttggccaaaagcagcagcagcagcaacagcagcaccagtatcagacgaagacgaagacgcaggcggcgatcgtcgtcggactgcgaagatgatgatgatgaggcacaaaatccaaaaagccaaaaccaaaaccaaagccaaaacctctgggccaggctgaatctgaatctgaatgctggagcgctggaaaaaaaagctgagtttccgaggccttgcagttgattaagcggcggcaacaaatttgcatatttcattgagcagttcaatcaaatggaggacagcccaaagagcctggctggctgaaacgaaacgtggccgggtctctgagctgttggggacaccagcttgtatctttttctgctcttttacttatttttttttcttctgtttttggtggagtcttggcagttgtggccggggatccaatccgtaggttggggagtcacagtcacagtcggcggcgacagattcagattcgcagacgaggcgaaggcatttttgtcgttggtcgagatgcaaacggagcgattaggtccgaaataactcattcatacgcagagacggccagaggaatggaatggaaaatcggaggctattgcccaggatgtggcatgtggcatgtatgtaggtatgctcgctctcccgctccctctctgcttcgctctcgctcgctctaatctggggaatgccatcgcaggagccacagaacaatggctcagcggatcaggatctccgaagggaggagcaggagcaggagcagaaggtggcggtgctgatggaggtggtggtgcagtgctgcagtgacggcgaccaagatggcgagagatcagccatcggcctgccaagatggcgatgtctccgtctccccacggcggtcgcatttgcataacagccggtcgcactatctgcatctccgtcccacagcctctagccgcatctctttcttaattcacttgccctctctttcgcgccctgctccctgctccagccgtctcgctctgtctgcggctcgtcggagcgtgcttaatgcgggcggacactaagccacgtgtgaaattcaatcaccaactcagccagccggccggtcagccaggatcagcttgtctcactctcactcggcagcagaaccgcgaaccaccgcgaaccaccgagcaccaccgaaccatcgaacatccgaaccatcgaaccacagaggcagtggctcgaatatcgccatcgtcatcgttattgtcgtcgtcatcgcctggacacctcgttaggggctcagcaaaaggagcacaaggagccaaacggggcaggaggaggagcagggccaagcggcgtggggtccatgattccagagtcccagaacctgagcccagaacccaagacggggctcgcttcactgcggtttcggtttcttccgcggcagcggcagcggcagcggtggtgtcggtttcggttttcatattttgaggttcaccgatgtgttaacaggcggcggctgtcgcatattaggctgcccgtcccccccaaaccgttcgctcttaccactcaacacttaccgctgaccgcttaccacttaccacttaccacacttaccacactaaccagccaatgccgatatgctatatgctataatatgcatactcataccagccaagaaccaccatcgccaatgccaggggcccttggcaagtgtcacgtcgagcacataaattaaatacacaacaagtaaaagcgatgggcagtgcgctttttcgactaggagataccttgatgcctggcagaacttttattaaattgttggcaaatgatattaaatggttttgagctacagatttgctcagctctatgccaccagcaaacgccctatgattatcagtttggattaaaacaaacttcgtggt

SEQ ID NO: 37106 - DNA, 204 bp, DROSOPHILA
atgccatcgcaggagccacagaacaatggctcagcggatcaggatctccgaagggaggagcaggagcaggagcagaaggtggcggtgctgatggaggtggtggtgcagtgctgcagtgacggcgaccaagatggcgagagatcagccatcggcctgccaagatggcgatgtctccgtctccccacggcggtcgcatttgcataa

SEQ ID NO: 37107 - protein, 67 aa, DROSOPHILA
MPSQEPQNNGSADQDLRREEQEQEQKVAVLMEVVVQCCSDGDQDGERSAIGLPRWRCLRLPTAVAFA

SEQ ID NO: 37108 - DNA, 2507 bp, DROSOPHILA
taatgtctaaatctttgaggctgattcctgatgtgtcataccgcccaagtcttgacctgctgctgcgttgctcgcccaatgtcctgatcttcgatctctgatccttttgggccctttgttcgctgctaactgtttcgggccgggcccatccctttcagcctctctacctctccctcacgctaacctcgcactcgcactcgcattcgcacgctctctttctggcactttgtgtgccgtgtaaatattttcccagcatcctgcaaacgttttgacagtttttattagatcaaaaaaccggctacaagtggcgtgtgataaattgcggccaaaacgcagctaagcagagatgggccagcccagatagacgagtacgagtacacacacataggtaggtgataggcactggaatatgggaatgggaaatgggtataagggtctaggaatagaggaaagatcaagtgtcgctcacttggcttcccttttattgtctgatgataagtcgtgactttagcacacacacgcatttctccccgttgagtgccagcaattagggcatcccagagtcctgttctctcgagcatctcaaatccgtttaccggcattgtgttcgaaatttaagcactcgaattattaagacaataagattttattactgccacagcaatcagcgtaatgaacccttctgcccagcagatcaaccctacatcatgcacacatatcgccgacttgtcctgtttctttcttgagagcgctttctgtgcagatcataactcatcatcgacattgtggcgacggtgcgtttgattgatgaactgacataatactcggcacactcacagctcaaatatgctggagctccatcataagccaaccccaatcccccatccaatcagggaggccgtgctgagaacgtttgaaaagagcccttgcgagccccacaactattgtgatttttttttttttttttaagacaacacattccccatctcgttgcaatagaatgccaaattcgtcagtaatcagcagggtgaacgcgggattggctcgctgtttgagccaccatcggcgattgtgtcgcggcattgccgagctggaccggctcatccacaacgatgagttcttgaaggatcccaggacgcagtggctgctccatcagcggcgtcaaaccgaggaggagcaggcaaatgcagatgctaggatcagtccgttgggcagaatgggttgtgaaatgggtcgtctgctgggtaggtccaagataaatctgtccccgcaatcccgaaaggtgagtagcagtactgcaatccaactgactggacgaccgctgaatgagctatctcccccacagaacaatctcgtcgtgacccggaccttttgccaaatcctccaagttgaaaactccacacccagaaagcagtcgggaccaatgcctgctccaactccactgccatcgccagaaagaaggcagagtctcatcttcagcgctagcctgtctcgtcctgagccgtaaggatcctgctccaagatcagtcaaagtagttaggcatgatatcctgtagagatacactaccaagcctggcagagatctacgatatgtatagatagatcagtgcaaggcttggtagggttctctttgagatgtctctgtggaaatagcccagaaacgactgaatttatatcccacacaactgaaggggcagcaggaggatgtggactaccaggaggaagaggaggaggtgttgccccgtccgtcgttcagtatccgtgctgctctcgttattgttatgaataagttaataacatggcggaaggcttcttttgtcgtggcccaaacaagcaacaacctggcaggcagcgcttattaaatgattgaagcctttggtggggcgaggtggtgctggaacttcgacttggacttgctcttgctcttggtcgtccagttggactcaagctgggggcccccataaaaaaggtggaaacctggttctcgtttcttgatcttttttttttttttgctccccccgttgctgttgttgttgcccactcttttgagcgctgtggttttttccctttgcgtccagcgaccaccatcaataacagagcccgggccatatttatgatttgttaagcaacgccgaacgtgcgaaaggataatcacaagcgcctgctggcacgccccccttctgccttctgccccttttttatttcggcggtggagtgcggcttatgttcgctttcgtcgtgtgtgaggcatttccaaaattgagtcaatgacttttatttttacgactcgccctgagagtccaagtgtccaagatggatggatggacggatggatatccaaagctggtcgtctgttctggcctggcctggccttttggcttttatgggactgcgaattgagctattagactggcgcagattgggtgatcgtagtagttatggccagttataacaggtgccctgctccagatccactcgaactttgaccaccagcgttggtggttggt

SEQ ID NO: 37109 - DNA, 507 bp, DROSOPHILA
atgccaaattcgtcagtaatcagcagggtgaacgcgggattggctcgctgtttgagccaccatcggcgattgtgtcgcggcattgccgagctggaccggctcatccacaacgatgagttcttgaaggatcccaggacgcagtggctgctccatcagcggcgtcaaaccgaggaggagcaggcaaatgcagatgctaggatcagtccgttgggcagaatgggttgtgaaatgggtcgtctgctgggtaggtccaagataaatctgtccccgcaatcccgaaaggtgagtagcagtactgcaatccaactgactggacgaccgctgaatgagctatctcccccacagaacaatctcgtcgtgacccggaccttttgccaaatcctccaagttgaaaactccacacccagaaagcagtcgggaccaatgcctgctccaactccactgccatcgccagaaagaaggcagagtctcatcttcagcgctagcctgtctcgtcctgagccgtaa

SEQ ID NO: 37110 - protein, 168 aa, DROSOPHILA
MPNSSVISRVNAGLARCLSHHRRLCRGIAELDRLIHNDEFLKDPRTQWLLHQRRQTEEEQANADARISPLGRMGCEMGRLLGRSKINLSPQSRKVSSSTAIQLTGRPLNELSPPQNNLVVTRTFCQILQVENSTPRKQSGPMPAPTPLPSPERRQSLIFSASLSRPEP

SEQ ID NO: 37111 - DNA, 2995 bp, DROSOPHILA
agagacatacacttaaggcggctcactggggcgaaaaggatgtggcaggatggcggatgaaggggtcctgagtgacagagatgacaatcaacaaaaggaccctcacacacacacacactcgtgcacatacaacacatgcacacacacacacacatggaaaaaatgacaggaagcagcgacgctagcgctgactgcaaccgaaatcaaaatcaaaatgagaatcgcaaaatgcaaaatgtaaaacgccgcaaattgcttgtaggcaacacggacaacaacaacaacaacgacatcgctggcgacggatggcaaaatggaaatagaagatgaacggaaaagctgagcggtaccacgatgaaaagcggttaccctagacaaaccgagcactactacttgaacaaagggcacgagacacaaaatccactttatttaatacatgttttaatacagtttcataaaaatcataacgattataaataaataaataaataaatataaataaatgagggatatcttcaacttttggtacagtaagtacttacattaaatatttccatactttgttaaataaataaataactttaaattagaaaacaatgtgtttttgaaaaagataccaacccgaactactctaaaatcgctttcaaccaagtgagtgaatttttgctcttcttttgttggcggaaaggatggggaaggggaaaaggaaggggaaactgcagcgaggtggcgaccacatacacacacacacacacaggcacactcacacacacagtgacagtggagaaaacagggtgaaggacaatgcgtgcataacgcttattgaaatagttctcaagtgagttcgacgctggcgtcgacgtcgtcctcatcgtcaacgtgggcttgccaaatgggccgaaaagggtggcccaacgacggacgggaatgaggctgggttggcccttaaggaggcggccacattgggggtggtctgtgctaactaggaggctgccatttaatgcccagaaccgagaggcgagtggcaagaggcgagaggcaagaggcaagaggcaagaggcgagaaccaaaaccaaaaccagaaccggttgagacagctgatatttgcaggctgtgcccgcctgcaactgtctgggtattacacgactgtctcccgcacatttccactaccaataccaataccaataccaacaccaacaccaacaccaacaccaagaccactaccactagcagtacctctatcactgccactacttccactttctactttccacttgcgccagccgcctttcgctatatatctgttatatatctgggaactggtatctggtatctggctgccattgccgtgattgtcaatacgcaatccgtaatccggcgaaggcttaggaaaccgaaagaagataagcagcagcttaccagcagggctgctactgccgccttcagctgccaacttttctgggtggcggccaaagtgggtggttatggttctgattctcgttctgattctaaatgtgattctgcagctgcggccaacgccatctcgttgtggtatttatatttgttttgattttatgcgctgctggctgagggctggctgagcaacctggctcagattgtttgccttcgcccccattccctggcttacatcgccaacaaaaaaaatcaaacaaaacaaaaaaaaataaaataataacagcattcacagcaagaaaaaacaacaaggaacagcaaacaagcagctgctgcagccatcctgttgatcaacctccttgcactttaaagctgggaaatttttagccccaaaatgttccctctattcgattgaaagccaacgaatttccccgctttcaatcggcgcgttcaactcgctttcaatatctataaaaggagctgcgccaggcagttccaactcagttgctcgtgggcagtcgaaacggcatggatgtgtcgcagcagcaacagcagcatcagcaacagcagcagaagcagtagttcttgaactggccaacagtccgccaaccagcagcaacagatcacactgccaaagtcttctgttttttttttcgattttttttttattttttttttcctggttgctggagggcttacaaaaaagaattagaaattcaaagtgtgcttaaagtttgagtggagctgcaataattgcatagtaccgaacttgttagtggtataaaaaagtatcaaaaaaaaaaaaatagaaggattttttctaaaaaagagtgacgaacagtgcgtgagtttcagtttcattgccgacgagaacgtggggattgaaaggcgaagaaactttttggcgcacaagagtaggcaacagaaacgccaactttccttgctgggtgagtctgtgtgtgtgttgatttgcgttggtgtgtgtgcgtggcaatgccttaagccctttgccaaactgcaacctctgaacgcatttaagtgcagatttatgttttacctctctcacacagatcctccacttcgtgtaccaccaccatcaaagtcacccaccgagcaacactgccaattaaagttgccacagcagctgccatacacacacacacacacagtcactgccaaaaacgaaaaaaaaaaaacaactaagaaggagactaaagcagctaacgaagacggaagaagaaggaaagactttggccagcagctgagttatattcactagtagcgcataagttttcgaagagccactgccacagtaacaactatagaccagctttagctacagcaacactaccagcaacgacagcaacaacgacaacgacaacaacgacagcgacaacaaaaaacagagctagagaaacagcaacaacaacgtgttgctgccacaaaacgcagcagccgcaacgagagcgtcatctctgcccttcgcacgcctctgcgggtaagttgacatttcattttcattttgagtgcattttcccgccaacgacgacaatcctccttcaccgttatccccatgccacgc

SEQ ID NO: 37112 - DNA, 579 bp, DROSOPHILA
atgcccagaaccgagaggcgagtggcaagaggcgagaggcaagaggcaagaggcaagaggcgagaaccaaaaccaaaaccagaaccggttgagacagctgatatttgcaggctgtgcccgcctgcaactgtctgggtattacacgactgtctcccgcacatttccactaccaataccaataccaataccaacaccaacaccaacaccaacaccaagaccactaccactagcagtacctctatcactgccactacttccactttctactttccacttgcgccagccgcctttcgctatatatctgttatatatctgggaactggtatctggtatctggctgccattgccgtgattgtcaatacgcaatccgtaatccggcgaaggcttaggaaaccgaaagaagataagcagcagcttaccagcagggctgctactgccgccttcagctgccaacttttctgggtggcggccaaagagctgcgccaggcagttccaactcagttgctcgtgggcagtcgaaacggcatggatgtgtcgcagcagcaacagcagcatcagcaacagcagcagaagcagtag

SEQ ID NO: 37113 - protein, 192 aa, DROSOPHILA
MPRTERRVARGERQEARGKRREPKPKPEPVETADICRLCPPATVWVLHDCLPHISTTNTNTNTNTNTNTNTKTTTTSSTSITATTSTFYFPLAPAAFRYISVIYLGTGIWYLAAIAVIVNTQSVIRRRLRKPKEDKQQLTSRAATAAFSCQLFWVAAKELRQAVPTQLLVGSRNGMDVSQQQQQHQQQQQKQ

SEQ ID NO: 37114 - DNA, 3000 bp, DROSOPHILA
tggccagcacagcccaggcattgcccaagttccgatgaggcgccccccccatcacatcacatctgatttcatctcatttcatctcatctcagctccagacaccgcagccgcaacgccagcgaaaccaccaaccaccaccagctccactcgagtcgcacatttaatttttcggagaaaaacgccggagtttctcgcaattttatgataaattcattgaatttttttcgtgcgccgaaaaagtaaaaaccggcaaaggccagaaaacccaggtagcgaatgtggaaataccctgcgaaaatgtatttacaatacatgtagctacttttcgatttcaatgatcttaaagatattgtatctatatctaacgaataaatagtttggtgttgcaaaactccgatattaggcgatatactctaactttcacagagtatccgaattgggccgcaaataaactggcttgcggtagtgccgctgagcaacaacaatgagctgtggaagttgttgccttggttattgactcagtgatatgacaacaaaaagcgcgactccagcataataataataacaatatagctaagtttaaccaaaacggtgacgacacacgcatgccccaaaggaactgcgacagtttgctcgtatcacttgtgtgatacttgtttgttgccaatactggcaaaccatagtacattttggtctgtcttatcagtgacgtcagagggcgctggctgagctggcaagaaatcgcgagcagcgagtccataaacaaggtgaacggaaaacgagctataaataaacgcgaaattgatgttggcgtaagatgcttaacattttcattgactcaagacggggaacttcttgctggagccagtggaccgtagtggaagctggatgatggaaggccccgggactcatcctcatcctcatcctcatactcatcctcataccatgcccatccttaggcccatcccaagtccaagtccaagtccggtgtcagagtctgtcatccccgttgatttgtgtcgaggaagcaagtgctcgagtcgccagccaaagagggagctgcttgggagctgatcttcacgatcatgctcatcccgaggggagtacactgcgcgaaaatcgtttgcagttaggccatctgagttgggaacacttgtacttagtttccgacactataacttgtctaaatattacgtaaatcatgaaatattataccataaattctaaagctctgaaaaactaagcaccaagatctttaagctggccaaaaattgaacaagaaaaaagtatatatatcaaagaaccagataagctaagatatttcatgccacctagaatttaaagatgataaaacctcattgataataaatatcctttaaaatgactcttactgacgttattaaagttataatcacaatcgataatcaatgtggccagcttaagtactcagccctaatgggatcatattttggccaaatcaaatctattgaaagtggagagtatctcgatttcttgccgtgcagctgaacgatcatgacgaactgcctcgaactggcgcgcttagatggatagccccggagatttatcatcaagacaaagtagtcgcaaggatctgaaacagtcagccactcaaggggcacaattaaagccgctctctctcgctcttgttctgttttttcttctttttgttttttggttattttttttttttttttagtccgggagtgttgaaaagtaaggaagctttaacaaattaccgcccagtggccgccgcatcgctggacaacggggctgtttataaaagcgctgtaaaaatttgccaaaccaacaccagagccccaaacccgagaccaaactgcagccaaaaccgaacccggacccaagcccttgaccatctttagcatcagctccagacgctccagccgcagctccatcttcatcttcatcttcagcaccatcgccttagcctttgcgtttgcctttgccatctccatctccatcttcagcagcaactcgatgtccgttctttgccagcggcaaacttgggcgcacaccccggaacggtggaaccaagaaggaagtggggcaaccaggaggcattaaaggagagatctgtggcgcgcggaccttatagagcgagcatcgccggggcagagtcactcatgtcatgacagcaaacgagcgagcggcagacttatgactgagtaattgctggtgatatttatgcgaggaagcgtccgacttttgcggtgctacccagtcttcacccttccgctgcccctgccggctgcttattatttgcttgccccacaacgcgttcgctgcggcatattgattagcaggaaaacgcggcgataagaggcgtccacacgctttcagttgtgacgtattccacgtggcgacgagtgagtaatcgcaagtagttcgcaatcgaatgcgaaacgtcaccgagctgaatgttattgtttatttataatttctatactccaactcattcacagtagaaacgcagtgatgcaaattgcattcttctatgtttgttattcactctattcacaaatatccgaagctatttctgtggggttcgtagttgatggggcttatcaactcgtaatgcctatttatatatatagtcactcctgagggatcaaagttaagcagtagtggatcgatgattgggtgcctatattgctcccatttgtatattgtagtttgcagatattgtagttccataatttccgatctgcatgtcgcagttcgatgactggccatttgccgcggctttgattcattcacttaactaatgaactctggactttattcttgataattttgattgtttcgcttcttattatttcagctataaatttcttaataatccttatcaacattgccacgggtatatacatggaaaaaactctagtttcatcctttctccatgtgcatataaattttaaagattttagaaattcgttgtaatattgattactaatattacca

SEQ ID NO: 37115 - DNA, 351 bp, DROSOPHILA
atggagatggagatggcaaaggcaaacgcaaaggctaaggcgatggtgctgaagatgaagatgaagatggagctgcggctggagcgtctggagctgatgctaaagatggtcaagggcttgggtccgggttcggttttggctgcagtttggtctcgggtttggggctctggtgttggtttggcaaatttttacagcgcttttataaacagccccgttgtccagcgatgcggcggccactgggcgtgtactcccctcgggatgagcatgatcgtgaagatcagctcccaagcagctccctctttggctggcgactcgagcacttgcttcctcgacacaaatcaacggggatga

SEQ ID NO: 37116 - protein, 116 aa, DROSOPHILA
MEMEMAKANAKAKAMVLKMKMKMELRLERLELMLKMVKGLGPGSVLAAVWSRVWGSGVGLANFYSAFINSPVVQRCGGHWACTPLGMSMIVKISSQAAPSLAGDSSTCFLDTNQRG

SEQ ID NO: 37117 - DNA, 2603 bp, DROSOPHILA
ccccgacaatttggcattactaaacggttccactctattaacatcaaactgtccgcaactcgagggtctcgaaattgaaaagctccataattttcctctcgccataattcagatgtccgtggcgaatccaattcgaaatttgattagcttctgtttgttgttgtttacttgtcaaaagtgtaaataaaatgtgccgcttgattttattttgtttattcaacaaattatccacttcagatacgaattgagattcggattgaacttcgttttcagattcagatacagcttcagcttcagcttcagcctcaattcggatcgatccaatctacggattggccataaaacgtgatcgctggatcaaggccggtttgggggggatcgcgatggatctatataaacaataatcgaaaaaaaaagcgcgcgcgccgtcaatttgctcttaatcttaatgtggttatggcatcgattgctaatgttttccctcgtgctgttgttgtttgctaccaatgcaaatcgacggttaatggggcgtcccgaaatgccggctaatgctgacaaaacgaacgaggtgcgatcgaaaagttggcggcacttaagtgctcaatgcaagttgctgttggaagtgttgtcaaaacaactccatcatcaagctagcacatatgaactatatacatatctcaatctttatttccttagtttccttcatacccctctatatagattgataaattcccttaatcacgcaaacaaactatggcaacaactctcgcggctggcggcacgattccctcggattcggactcatatgaccgctccactcgccattagcttgtgacggcctgtttgcacctacgcaggtgaacggggcgaacgcctcacgtgaccctcttttttatcacctcaagctccctggcaacagaagaaccccccgcgagtgtttgatgtttgtaaatgatccagtagttcttcacatgacgatatatgcatacatatattatgcttatggcatatggacgacactcacctgtttgctagtgagattcagacggggcaggaatctgtagtttcccttatagaatcgccacttgttcttctcgacaatgtccagagtcttggtgctcactgtggccagcttgtccgcattggtggtgatcctggccttgtcctcggcctggatgccccgcagctcgcggcccgtttggttctgtagattctgcaggatctgaaatagatacaaatacatatatacatatagataatagtgtgtgaattagttgtgccaatttatttatcagctaagagccaactttcgcttgaaacttaccctttggcgtttcttgcagcgtttcgccttgctgtgcgtttcgttcagacccgtgggcttcagattgcaggtgttctcccagtccagatgcgtactgctggcattcaatttctgctggaaggtcagccggaagttggccgctctggaacgcttctgtaggtgcttcaggggattggtgggattgatgggactggaggggctgtcagtgggcggggtggccaggtgactgggcgccgctgagacgccacaaccgccgccggagagggcaaactgggacatggccaaggcgagtaagatcagtgaccagttcctgttcaggcgtcgtcgtcgatccacgaacggcggttgcggctgcggttccactggattcctggttctggccgttttgttaccgctccggctaccgcttccgctgctcctgctgacgtcgagcgggcggtcagctgtcgtctgtggatggaaaaagttccgaaataagctaaacaaaatttatacaaacacgcaaagccctcaagataacacagtttcatttttttcccacccataatggctcgagtttcactacgacttcttgacgtcacatcttcgtcagacgtcgtcggtgtttagcatgagaaaagtctagcaacaggttatactattattagttaccaaaaaaaaaaaaaaaaaaaaaaaatcaaatacgtatgttcgattttcagttatttacatactcaaactttggccgaaaagagggttcggttggccaaatgtattccccctgccgagggaccaattaccataagtcaagactaacggacgctgcgcggacaactgaactgaaccgactggttatatattatcttggccaacttttgccaaatataaaccaaaattcgcgcacgtgatggtacggatgtgtgattgtggtgcgattgttttgtgttattttgtgtgtgttagtgcctgagtgggcgaattatgatgattgttggctgcttggggattcccgctggacgcacttatgcgcaaacccatacgcacacatataaatataatcgcaattgtttggggggcccgaagcatgcgcgatttgttattattatcgtttgcgctttagctacagctacggccattgctagtgccgtctttatctggctgaaataattatttcaaattaaaaataaatttctttatttagccaaattatcatgaatcatcgtgtgtcgggtggaggtcgacttgcaaaggtagtggtgatagtggtgccaccgcactggcggtggcggtgctatctcat

SEQ ID NO: 37118 - DNA, 501 bp, DROSOPHILA
atgtcccagtttgccctctccggcggcggttgtggcgtctcagcggcgcccagtcacctggccaccccgcccactgacagcccctccagtcccatcaatcccaccaatcccctgaagcacctacagaagcgttccagagcggccaacttccggctgaccttccagcagaaattgaatgccagcagtacgcatctggactgggagaacacctgcaatctgaagcccacgggtctgaacgaaacgcacagcaaggcgaaacgctgcaagaaacgccaaaggatcctgcagaatctacagaaccaaacgggccgcgagctgcggggcatccaggccgaggacaaggccaggatcaccaccaatgcggacaagctggccacagtgagcaccaagactctggacattgtcgagaagaacaagtggcgattctataagggaaactacagattcctgccccgtctgaatctcactagcaaacaggtgagtgtcgtccatatgccataa

SEQ ID NO: 37119 - protein, 166 aa, DROSOPHILA
MSQFALSGGGCGVSAAPSHLATPPTDSPSSPINPTNPLKHLQKRSRAANFRLTFQQKLNASSTHLDWENTCNLKPTGLNETHSKAKRCKKRQRILQNLQNQTGRELRGIQAEDKARITTNADKLATVSTKTLDIVEKNKWRFYKGNYRFLPRLNLTSKQVSVVHMP

SEQ ID NO: 37120 - DNA, 2201 bp, DROSOPHILA
gcacttggagggaccggagacccaaaaaacccaagaggcgactccccaggcacagtggttgaaaatttggttgaaatgccttggtcacgtagttgaataatcatcagtttaatggcaagcattccatagggataaatcaggattcaaactgaacttattgtacttaagacctaaagtgttgtgaataaggtaacatacatttaatcgcagactaatccttttaaatttatttatatcagcaataagattttgttattaaagctaaaggtgttatattgtaatatttgtatcagtaacttacctagtttatacacctttccatattcccagagtaaagcgctgaataccctgtgtcaaaataacatatattatttacttctatctaatgcttacagatgaaacgctactacttgccccactgtgcctttaaacttggcctgcctggctgtacaatttgatttcggtgttgtttgcctggcgatttgttgtgtttgatttgctgcctcgccgtcctgttccatcctgttgagtccccagccgctccaccctcgcatccgcacatcctcgcttcctcgcatccacgcaccactgaaccaccgcaccaccgaacgcagctctgtcgcattccagcggtgccgcagcgcttacattgttcgctttttcggttcattcaaatcctttcggtaaaattcttttgtttggtgtcaagtttaacaaatatttgcggcctcttgtcttgtttgtcccatgttcctcgcgtgttactgccgcccgtcattgttcggcatctcagttggacagcgtggaagtggctgcggtacattttgtatgtgcggcatgggggcgtatgagtaatcagtgccgcccgcaattagttcgccttagacaactggcgagctgaaaaaaatccgcaccgagccccaaggagtgagagtgagttgcagttggagcttcgtcctttgctaggcaacaacgatttgcttcccatgattggccaaagttattgctgttgcagttgcagtgccattgttgcaactctcttatcggtggctttttcgagcctttgtgcgaaatttttgactccctgctgtgtgagtcgcacaaaatgccacaagaactgctgttgctgctgctgctgctgctgctgctgctgttgctgttgctgcaacaatctgcggagcagtgccccctggtggggcattcgggggcggggcaggcccaagtggcactgctagccaatatggagacttgcaactgctgcaataccagggccaggcagcaacttccactgccgggctgcaactgcaacaaaatgaaaccgtaattgtttgtttattatggctctgagcagttgttgttgcagctatcgcatgttattgttgctgctgccgttgtattgttaaatgttaaagtgctacacaatatttatattggcattgtctgcaagagttggccatcgtcggttgcagctgagatcgcactgcaaatgccctgacttttaaatatttagttggatttttagaagggtcaaataaatataaatatatatagaaaaatatatattttagtaaggtatttcaaggtttaagtgcactagggttaaaatttagatttagcacccaagatggagccatattccaactttgataaaattgatattgaatatagctgataagcaaacaagctcattttcagtttttacattcagaagataatgatttaaagttttgctttaacataccccacatggccagtggacccgtgtgcatctgcagtgtagcgtggagtagagcaggccgagattaccatcggagacaccctcgccgacgcacagaggggaacccagcgatgtgtggcactgctgacacttcaatggagcccctcttctggcggtggacgagggcgtgtggacaagggggcgaggaagtggcactccgaggttgcctcatgctgtggcgctatgctgcgattatggccacggattaacttcctcttgtggccatcatcattgtggttattgttgctcctgccactgccactgccgctgctgctgctgctgttgttgatttccgattgccgcgcctgcctgcactcgcacctaattatatctaattcgagcgaacctgaactgaaacggaatccgattccgattccgacaccgagtcccgcgatgcgaacccttgccgcctcttaggcgctga

SEQ ID NO: 37121 - DNA, 201 bp, DROSOPHILA
atgccccaccagggggcactgctccgcagattgttgcagcaacagcaacagcagcagcagcagcagcagcagcagcaacagcagttcttgtggcattttgtgcgactcacacagcagggagtcaaaaatttcgcacaaaggctcgaaaaagccaccgataagagagttgcaacaatggcactgcaactgcaacagcaataa

SEQ ID NO: 37122 - protein, 66 aa, DROSOPHILA
MPHQGALLRRLLQQQQQQQQQQQQQQQQFLWHFVRLTQQGVKNFAQRLEKATDKRVATMALQLQQQ

SEQ ID NO: 37123 - DNA, 2974 bp, DROSOPHILA
agcgacttcagtgaatatatccggaaataaattctaaacaacagcagtcgagaactcctttaaatttcaaataacatgtgtaccaattccttgaatttcctcgaggtatttgacaaatattccgaaagattgtaaaattatttgcaaaagatgtatccaaaagttaataacttcaaattcttcaagtactagtttaatgtgtgagtaaatcaatattttccgatctacatcctagtcgttacaaaagctaacaattaacatacttgcttggatattgacgaatatccttgcatgtggcagctactcaaaggtgaatcatcacaatgaatgaacgtagatccttttgttttcgttttccagagctcagctcaaagccaagaaagaaattaatgtttaggaaattagaagattgaattgaaaaaaaaatgaagaaaattatatatgaaatatgaaatgtgaaacgtcaggcaacttgaggcatttaggacaccaaaaacccggaaatcagaacaggcatcacgaaggcgaactaagaatatccataaatagagtcagaacagtgtgaacgaaggcagatggagtttaacgaataaaccattcaatgcaatgcataactaaccataaacagcattcaaatacccgatacgaataaacaattttaattggtgtcaaagttcattgaataaaaatctttagaaacgcatctgcagactttcatttcgaattgctgagggtaaatggaaaacagaagtggtggtattattttcaaaaaaaatctttattacttaactatttattaacaggaaaaaaaataaagtcggtttgcagaggcgtgggaaaatggaagagcagcgcgatcatcacacagcagcaggaataataccgaatgcgtccttaaagctaacccttagactagtctcagttcccggatttctctctctctctctttctaactttctagctatctccctctttttctccttgttttgggggaatccggctaccaaggtcgccacaccaccattcgctgctgcaccagctccgccaactggcgctgcctctgccgctttctctcgaagatctggtggcgaatcttcagcaggatgctatcacgtggcgcctgcccagttgctccgtgggatttggcgggcgaggattgctgcagctgctctatgaactcgaggtccatctcgtgcggcggcgctgcaaagtgctccttctccggcatctgctcctgatcgttatcctgatcgatggccagattgcattggtactgcagcttgaaacgctgacgctgatggcgaaattttggaaaaaatattcaattagataataagtttttcttacttatgctaattaacatgattttctatcaaaataattttaactatgcttttgtttaacttttgaatgaaaatgcttttcaagtgaagtctaagttctacagtcttaaattgaaattgtgatttgcttaaatgtgtaatatagtttaatgtttttgttctttggtttaaaaggtttaataaattgaatcctcttcaatcgaagtgaaaaatataatgaaagatggaaaagaacataactcgcaaagctttaaacaagcctgtatactatacagctgttatttgttatataattttttttttttaatcatatccacaaattagttgttggatttgccgcactcaccttttttcgcgccgcattctcggctagaaatctgcacagctgctgtaattgctgctcggccagctcctccttatccttgtcgatgtgattctggacctggttctgatcctgatccggctgctggtcccgctcccgatcccgatcccgctcctccaccatgtgatcctcaaggcggcgctgctgctggcgctgcttgatggccgcctgcaccttgcacctggtggccgagctcaggctgagatccatgctgcgttgctgcttcagtatcttgtagatgacgcccatcgaggttggtggctctgcggctctgctctgctgtgggtcctgcgatatctccgatctatatattcccgatatgcgagcgcgtcgagctgcggcggaagactgtttcgaaccactcgtccaccgagtctctttatatgtgctctctgcgggtttgttttggagatcgactctttgtgggattaaaaataaaacataactcgtgggcccatgtgttactggctgtgttttttttttttttttttcttttgttcgtttgctggtgcggcacattgcgcgccaaactcgaaactcccgctttatgggacattgctcaagtggagtcaattctattttctgctctcattacaatgccttttagcagcccaacacagaacacatgtggcagcaccagcgccgcacaatcgccccaaaaatagaccctctcatacagctgcaacactttcgctgctgcaccgaccgctgccacatgcaacatccagcggcatcgccagcggcgcatgtggccgtcgcgcagtcaaagtcccatttccatcttcatttccatatccattccgaaatccgaaatccgggtcctgctccttctgctccgtcatacatccattcccaaatctcgaaccgaatttttcccgtggcagtctgctgcgagaaaccgcatgtttcggcgcctgttttgcggattgacagggtagcaggggtatactatactcattagaaagcatggcatgatgttagatatttagaatggggatctttttataatatctcttgaatatcaattttgaaaattaatattttcgagtatatacttaaaaatgttctacattttttggaacttaaatattggtatcatatcataagtttctatggttaagtatttttgtaatataaattataaaatgggcttttatttctttagtgctataaaaatatttaatataatggaatattatacggttacaattttctacttaataatactgcatctaaaaactactcgagt

SEQ ID NO: 37124 - DNA, 579 bp, DROSOPHILA
atgggcgtcatctacaagatactgaagcagcaacgcagcatggatctcagcctgagctcggccaccaggtgcaaggtgcaggcggccatcaagcagcgccagcagcagcgccgccttgaggatcacatggtggaggagcgggatcgggatcgggagcgggaccagcagccggatcaggatcagaaccaggtccagaatcacatcgacaaggataaggaggagctggccgagcagcaattacagcagctgtgcagatttctagccgagaatgcggcgcgaaaaaagcgtcagcgtttcaagctgcagtaccaatgcaatctggccatcgatcaggataacgatcaggagcagatgccggagaaggagcactttgcagcgccgccgcacgagatggacctcgagttcatagagcagctgcagcaatcctcgcccgccaaatcccacggagcaactgggcaggcgccacgtgatagcatcctgctgaagattcgccaccagatcttcgagagaaagcggcagaggcagcgccagttggcggagctggtgcagcagcgaatggtggtgtggcgaccttggtag

SEQ ID NO: 37125 - protein, 192 aa, DROSOPHILA
MGVIYKILKQQRSMDLSLSSATRCKVQAAIKQRQQQRRLEDHMVEERDRDRERDQQPDQDQNQVQNHIDKDKEELAEQQLQQLCRFLAENAARKKRQRFKLQYQCNLAIDQDNDQEQMPEKEHFAAPPHEMDLEFIEQLQQSSPAKSHGATGQAPRDSILLKIRHQIFERKRQRQRQLAELVQQRMVVWRPW

SEQ ID NO: 37126 - DNA, 2726 bp, DROSOPHILA
gtgaccagggggcgacgtcgtccatgggggcaactagctaaacaacaattttaattgcgaccaggcagagtcaacgtctgggactcgggccaaaggcaaatgagcgagcgctccaagaaatatgaacgaggtcaatgattgtttacactaccctcgaatgctgtttacttcggcccgacgacagagggggtgagggggtagaacggggggcattggttgtgtgtgtgggtgtgtgtggcaggtggcagttggcagttggggtggtggcacgatggggttagttctagttgccagacaccttggaggcagcgcctgcagcgaatgtcagtttgtggaaaaaaacaagaaaatgcagtaattagaaaaatacctagatataattatttttcttatcttcgtttgagtgcatgcaaagaaatttaattcaatggggggtctttagttcaccacttggcacttctaagaagattagctataaaaaactgagtaagacttaaaaaacttcgtaaggtgtctaaaagtatgcagcactaaatttctgcatagaataaaataatcatatgtgtaagcaaagtttcgttaatatttttgaatgggaaattaaagtatccagtccactgtggcgactattaggcctcgggcacatgtgtgtgtgtgtgtgtgttagaaagtgtgtacaagtatggaatgcgagcaagggagaaggagatgaaaaacaaaaagagagcgatgcataaacacttgcaggtgccactacagatgcttcagttgttgcctcatttacgtgaactgtttaaggtgagaacataagctaatcaataaacctgcgcgatgaggtggtagttatgctcatccccaacaagtaaagctaccggatggccaatcaaagtagtcgacacgtagatattcagtattttctacattttccacctttacacagtacatagtatccaaaattattcccttccagcccaagatgaatcgatatcatgaactcagcatgtcgtgggaaatgctgcgcgatctctacgagacctggctaatcctggccattggcatgttggtgcgctggaatcgctggcgtccgttgatccatggcatggtatcgccactggatccatcgcttaagcacatcgtgggcgacaatgaacgctgggcgggagtctactttggatgcggcacactcatgaccatcatgcagtatcgatcactttgggtgcgccggtgtcgtcaccgcgtccacatcctgatgctgctgtccgaaataatgctactgctccagctggtgcactggatcgactgccagctgtggcaatcctttctgagcctcttcgaggagctcttcatcgccctgggacgcggtcaatggggctcctggatcttttgctgtccggccgcagtgcgcaatctgttcctgcgtggcgatgtcttcgatgtgttccgcttgctcgcctcgttcgccatcttcgccgtggccctaaactcgacagctggtgaatggcgggtgtccttggacttcctgctaatcggctatttcccaaaaacttcactctggaggcagtcgctctatgtggaatataggagtaagggtttcgagcccacgggctcgtacgtactgctaccacttcccccacccgagctcctcatctacaagcgtatgtgtcgcctgtgtctgcagcaacttgaaacgaatcccactcaccaaaagattcagatgccttgttaaacgaaggagcagtgcagttcattcctggcttctttatttactgtagctgatacgtttaaattgaattagttttcgcatctttggcaaattccaattatacatatattttatatctctgaatattcatacaataaaatctagcgtgtgataagctcttagaaagttttgatggccatcagttcttacttagttctttttcgagtacatgcatcacttggtgtcctaatgtgatcttcatgtgattgatagccacaagctgctatagcggcgcatcgcagaacccagaaactatgattaaaatcgcattttccatgataaaccgaggaatgccaaagtcatcgacctaaaactgtcgtaataaccgcagggtatgtgcccaaagataaatgcaaccgcacgtggaccgcaaatcgaatgcaactgcaagccaattgtcaatcgcaaactgccacccaaaataccacccatccatcctgaccatcaaaaccaccgcgggaaatctgcctaattatctggttagctggattcggattgggattgggattgggaggttaggggtgatattgtttatccggggctaagtaacgacatacctggcactcatttgtgtggtcatcaaacgcggcggtgggtctgcggattggttcgtgtttgcgatgacagtaatcgactgattaagcgtaattatggatgtaatttccactcaaatattgaaggcgaaacagcaacaaacagcagccaacaatggactataaaggccttttcactttggctttaaaacaaattggctagcagtttaacgcattagcgcgcacacttaattagaattccctggctgttttttttttttttaaattttttttttttttatttgttatttggcgttgcttttgctggccaaagtgggtggcaaatgggcgggtggtgatttccaatatgcacagcgcacgcgagcaacccaaaaaaacaaacaaaaattcggaaaaaaattaaaataaat

SEQ ID NO: 37127 - DNA, 726 bp, DROSOPHILA
atgtcgtgggaaatgctgcgcgatctctacgagacctggctaatcctggccattggcatgttggtgcgctggaatcgctggcgtccgttgatccatggcatggtatcgccactggatccatcgcttaagcacatcgtgggcgacaatgaacgctgggcgggagtctactttggatgcggcacactcatgaccatcatgcagtatcgatcactttgggtgcgccggtgtcgtcaccgcgtccacatcctgatgctgctgtccgaaataatgctactgctccagctggtgcactggatcgactgccagctgtggcaatcctttctgagcctcttcgaggagctcttcatcgccctgggacgcggtcaatggggctcctggatcttttgctgtccggccgcagtgcgcaatctgttcctgcgtggcgatgtcttcgatgtgttccgcttgctcgcctcgttcgccatcttcgccgtggccctaaactcgacagctggtgaatggcgggtgtccttggacttcctgctaatcggctatttcccaaaaacttcactctggaggcagtcgctctatgtggaatataggagtaagggtttcgagcccacgggctcgtacgtactgctaccacttcccccacccgagctcctcatctacaagcgtatgtgtcgcctgtgtctgcagcaacttgaaacgaatcccactcaccaaaagattcagatgccttgttaa

SEQ ID NO: 37128 - protein, 241 aa, DROSOPHILA
MSWEMLRDLYETWLILAIGMLVRWNRWRPLIHGMVSPLDPSLKHIVGDNERWAGVYFGCGTLMTIMQYRSLWVRRCRHRVHILMLLSEIMLLLQLVHWIDCQLWQSFLSLFEELFIALGRGQWGSWIFCCPAAVRNLFLRGDVFDVFRLLASFAIFAVALNSTAGEWRVSLDFLLIGYFPKTSLWRQSLYVEYRSKGFEPTGSYVLLPLPPPELLIYKRMCRLCLQQLETNPTHQKIQMPC

SEQ ID NO: 37129 - DNA, 2716 bp, DROSOPHILA
tatatatatatatatatatatacagtcgtatatagagagttaatctgtgggcgattctcttctaggaatgcgtcgattgctgttcatgcaagtgtctggccataatagagggtttcctgatccatttgaagagctatatctacagacttaggatgagtctatacaacctataggatgtatatgaaatctactggtataagaaagtagatgactacacctataagattgtagttaaagcttaattggcaagtgtttattgttttatctgaaagttaagccgaaaatatgatgcacttctctatataacacacttgtatacacccccttgtactcagttctattttggtttaaccatgccggaaatacaatggagcaatgtgcagagtccgtctggatcaattgaattgcaactgccagtgcattcaaatccaaatttcattgcccccattcccatcacattcctcacgagactcgccatccgctcgagagtcttctcgttgtgtgtatccaatggtgtcgcttaagtcatcaagtccagccagataaggtgctccgaatcggaaccaattgagcgagtggcgaacgggacaaagggagcacatttccatgggccaggacatgggttcaggacattgggcatacatccacatggccagtcagtcagacaaccagtcagcccgacagcttaactcggttgacatttatctggcttttgcatttgtgcattgctgttgccatagcgccacgcccacccacaatcggaatgggcgtcccattgatgacgctggcgactttcattcacaaaactgcagcatttcaaggcaggaacggagtggcaaacgtcagcagtgaatggaagagacagccatgcaaccacccccttttgctcctcgatgaaaatgtggaaaattgtgcagacccctcggctctccatcttctttggatgtccttcgtcgtggatgtggatgtgaatgtgaatgtgaatgtggatgcagatgtggatgtggagaagctgggcggcggaggtgacttggctaatgaagaccaatgacgtccgacggcttacaaaagcactcggaacaaaatgcttaatcgttctcgaatttaaatgaatagcattagctcaactggcattcctttcatgaggaacacacattttgacttgataagtcttctaattaggcattgaattcgcagttactatgtattcctaaaaagcaacaaggatatgaaagggatattttgtgataattttcagatatatttaagatacatgtgtgcattcaaggccttacagaaataaatcgatgcaatatgagtatctttttggtaattttccatatcattttaaaccacacatttgatatgctgttcggcgagaatattttcaaaagtctgtgtggaatggtcgtggaaattggggccccttgattgacctcagcttactggaccatcaatcaattaggcgccattttgccttccacgaacgcgtgcacatggaatccgcatcatattcctgttcctgcaccatgttgcatgttgcatggactgacctcgctgcctcctgatgacgtctgcgtggaaactatgacgtcactggcggcgaaactagtgcaaatacactacaagctgcacacgcatgctatcggtgtgaacgactgcgcctgtgtgcgtgcggttgcacgtcatcaatgtggaaaatgtggaaagccatagaaaaagtacaagggtataaacacaagtccctaaaaataggcgattatccgagatacgaactactccatgaaaacaacaacggaaaatattgagctagttttaaagaagccaaatagaaatggcccaactgttagcagtagtgtagctatagaaattataaataaattataaataataacgtacgcagcatttaactaggtatttgtttagataaaagcatttttcaatctacaatataaagacatttaacttcatgccaaataaatgcctctgtaataaagctacttattaatcctattatccatgctaatcgcattatttcccccactttcttatcataatactagcttgcaaaagtttcattctgaataattgattatacttacgccacagcacaagtttcgtgcttttcagccgccctttgatgcaacaaaattagttactgtaaccgacaaacgcagttaatccttggagatgtgcaaccaatacgtgcaccaaaagtgcatttgaaactgtaatccgtttagttgatttaattaaatttgcgataactttgccaactctaaggcgaacttgggcagggttatttaaatatttcgcaggaccagccggagtaagcgaattctgacggctaccatgagtgcacccagcacctatgtacatacataatgcgagtgcatgcagcatatataaatacatatacatattatatatatacatatatatatttatatacggtgcagggaggataaggatgcgagtgcctgtttgtgtgtatataaccctaaatgggtcagcgacagctggggagtggtgttggttctggttatggagggggagttcggcgggcagacgacaacgacgacgacgacgacgacgacgacagcagcgacaaatagttgtcaggtagagcgaacgttgcaaggccacgcccacagtgggcggctcagagggggggggcgggggtgggcgcttatgacgtttgttttgctttgacgca

SEQ ID NO: 37130 - DNA, 357 bp, DROSOPHILA
atgtccttcgtcgtggatgtggatgtgaatgtgaatgtgaatgtggatgcagatgtggatgtggagaagctgggcggcggagcttactggaccatcaatcaattaggcgccattttgccttccacgaacgcgtgcacatggaatccgcatcatattcctgttcctgcaccatgttgcatgttgcatggactgacctcgctgcctcctgatgacgtctgcgtggaaactatgacgtcactggcggcgaaactagtgcaaatacactacaagctgcacacgcatgctatcggtgtgaacgactgcgcctgtgtgcgtgcggttgcacgtcatcaatgtggaaaatgtggaaagccatag

SEQ ID NO: 37131 - protein, 118 aa, DROSOPHILA
MSFVVDVDVNVNVNVDADVDVEKLGGGAYWTINQLGAILPSTNACTWNPHHIPVPAPCCMLHGLTSLPPDDVCVETMTSLAAKLVQIHYKLHTHAIGVNDCACVRAVARHQCGKCGKP

SEQ ID NO: 37132 - DNA, 2189 bp, DROSOPHILA
tataaacaattatatatataatatagcaaatactatatgtactatggcatataaaaagcagagcactcgcactttggcagtcagatttattcgaaatccccaaggaaaaacatgaaagctcttcaagtcgccggaactttgatgctgcttttctgcctgctggcagctgttaatggtaattatttaatgaaataataaaatatatatatgatatttttagctaatcatttccttattgcagctacgccgggacaagtgtatatcaatgggaaatgcattgactgcaataagcctgataatgatccgggaattataattcctccagaccataaatcagctggatccatgtcttacacactcacatctggagccatcttctttggaattatatatcatatattcagttaaattactatgtaatcaataagttaataaaataatatcttttatttctcaaaaaaaaaccttaagcttgtgacaaattgcgaacttaaatacaacccttatcacgtatagatttagtcacatattaaaactgctatttaacaaatcccaactttatgggtatttaaattgcatttagattatagcaattgcatattagattaaaatctgtaaatttaatttaattcccagctttgtttaaaccgctaggaagctttaaataatttagctttaatttttatatttattcatattgattttggaattagatttcctatttgagacaaatctacaataatctattattatttatattcgattgattgatcgctatcgctttattttgttttgccattgttctgaatgtacatcgccttatcaacatttttttttgtagggcatttccagactgggcacaacttttgtgtgattacaacagctgagatacgtactatccgggaaaaacctgatatttaaatttcatcataaaggtgcctataaaagaaaaccaatgaagtgaatttttatcagtttcatttcaaccgttgccaacaatatgaagtggatgtccttggtctttctatgcggtctgctcgccatggcagtgggtgagtatctataagattcatacatccttaaccagtatcctaattatttttctactattactatagcttctccgttaaatccgggtaatgtcattatcaatggagattgccgtcattgtaatgttcgcggaggctaaattggagttataaaactttgatgtttagtaactacaataaaacttatgaaaaatacagattgtgcataaagtgatggtcttttttattttattagtacgcaaactataatagttcgaacttcatttctaactgcaaaagttaataattataataataaacaacattttggtgtttcagtgactttagtttatttcatattctgatttccacattctaatcgccgcgtatattgcaaactttgcagtcgccgtttataatcacattgccaggactcaggggattggctagaaataaataaataaaaaaaagatttcaattagaaataggtttttattatttatacagcacatcattggcacttaccactagccaaagccaaaagtccgaagagaaaagtaatcgagagcagcttcatattgtttgtgatttgacgattcagcgactaaattgcctatcgattcaaacaggtctcttttatagccgcgcaaatcggtttgattagcaaattgcgcactttttcaattaaaatatgacccctggagtatataaaaatgcgtcataacttgatttgaacagcctatccccagcgatttagtagctttaaagagatctttgtctgtgattggcaaacacacaaagcagttattaattccagggaaatttcaaatctaacttattcgattctagcacttttgaaatatcttatttaatgcatataaaaacaaagaatgaaacaactgaaaacgtaacgaatgacactgcagtttactagcaagaatttaacttcttaaattttcgttttctatgtgtgtatctatgtggtcgccaaaggtaaatgaacgtgtttgtggtcgaattaactttgaaaaagttgctgtaggtgggtatgtttgattcagtttataagtaactttgtttgtgcactaaaagaaaaaccttaaatttcaaaaacgaaaaattgttattgtgtttttatcaaaggtatataccattatttct

SEQ ID NO: 37133 - DNA, 123 bp, DROSOPHILA
atgaagtggatgtccttggtctttctatgcggtctgctcgccatggcagtggcttctccgttaaatccgggtaatgtcattatcaatggagattgccgtcattgtaatgttcgcggaggctaa

SEQ ID NO: 37134 - protein, 40 aa, DROSOPHILA
MKWMSLVFLCGLLAMAVASPLNPGNVIINGDCRHCNVRGG

SEQ ID NO: 37135 - DNA, 4179 bp, DROSOPHILA
tgcaatgacatttgctcgaataaatgagaaaatggtatttcgaatgaatgatgtaatctacgtaaaagcttgctcttattgcatattatcttttctttagcactcatgaaaatgttcaatatgatgtcgaatattttcgctattgttacaatccaaaaattccattgcctacactacagaagaatgttgaagggcatgttgcagtacaaagaattaaacaaatatttattattttacaatttaatcgtaataataaatgtgtgtgcaatacgttttactggcatttttcactttctgatcgctataaatattcaaaaaaatcatgatggaaatacaaataacaggcaaagcctctttcactcggtataaaaaatgaaaaaaaaaatgaaaatttatatgtgcaactgtgcgtatgcgcaatttgccgtcggcaaacgtaacgagatgaatgtaattattaaaaattgagtccttatcggcagcacacttgaaaaattcaattaaattcttcatacctcgaaaacgaaattaatcaaagttgctgcacaaaggttcatattacaggcaaaaagggagtggcaagtggaaaaatctatcaagtgtttgattcctttcatgctccacttgacattgttttccaccattttctacccggccaaaactcaatttccgctgaattaaatcagagactagaaggacgaagagtttttgtgtgcgataaaaaaaaatatcgtttgccggtaacaacggttggggcaaataaaaatcaaatttaaagctctgagaagcccctcggaaacccgtgacttctacctcgaaaagcaggccgaaaatgtctggtagggattgaattggattggccacccccccctcacatacaactaaatgtcgcaattttacgagtcaatataaaggtgcctgaggagtcatttacaggcgcacagcggtttgccttcgctcggttttctttggcaataaaacatctctcaaaggacacgggtcacaggacacgcggaaagcgcggtatgtggcaatgcctttgcctttgccgcaaggaaaacgagaaaaacacgtgttcgacggcctggtggcgggtatagccaaatatgatggcaatttttatgcctttttgttgaaatatttccaccaatgaggcataaaacagaagccaaaacggaactttcctcgggccccacaaatgatttacgatccggtcttgagtttacgacaaatttacgagaacattgcaatttggctattattaatttagtacactgctgaagcagtcaggaagcgaagaacaatgccttaagctcgattcttatacatttcaaagaaggtttttaatcagaaacacggtgacactttagcataatagttacttctttttattttatgcacacaagctaatacttagtagtttaaattagtttttgttttttgttttaatatggcaagtttgaggtaatttatttataaatacatttaccatcttcgagtaaatttgattgataagtgagccgagtttttggtggcgcgtgccgtgcagtcattgcaattgccatgaactataatgtcgccattgcgaatggtaatcctgggaattgttcctgaaataagtaacatatttttatagatattcattggaataatttttatagatagaacttacgagcatatccaaattcgacgaagaaaatgagcgccagtagcgcaaacaaaatcgaaaaccacttcatcgctgcgacaattgagacgagtcaataactgcgatcgctcaattccagtgcgatttatacggctgcatcttttcatctcgacggtgaataacacgggagtaacagaaaataccctagaatattttatagatctttgggttttccaaaagccccatcgctcttgataacgtataccactcaactgaacgtttgactcagaggcagtgcatctcaaaagcatctcaaaagcttcaactaaatcagcttattatttaagtagtattctaagttatagttgtgataagagtaatatgacgtagggggaatatttcagatatgcaatgcatattattttcgagttgtgtaataatcataagtaatatgaagctctattacttgaaaaactatactaagtatctgttaaagttaattttcgaactactttatttaaaacacacatttgaagttcttaatatttttgtagaatttcatttaaattgaaaaatgaatattgtcgtaaaaagtattttcagtgcatgtatgtattcaattatggtcgaataccgcaaatattaataaaattctatggaagtaaagtatgtaaacttgtatattgcgcaaacaaaactttttttttccgaccaataaacaatgctttgataaaaagaaatgaaaaggaaaaattaaaattttaaattggtaataaaatgccatcatatgtttaataagcgtattaaacgagggtctttttgattttctaattgatttataacttttttattagctttgattacttaatagctcttatataattttactttttaattaaaaatgtttgtctctacgaaactcaaaaaacagttggaaaattaattttatcaaaatttataaaggacatttataaaggtctgaaccaataagattctataaaatatgacataaagtaactataccaaattttcagattttttaaagaattataaattatgcccgaaaattaaaaaatgcgaggtattttatgtacaaatcacaatataatttcgttaatccccgcccccgctgatgctgcagcccacgcaatccttattgtgaaggtaagtgccacctggcagacgaccactgtaaccatccggatactgggcgccaccgcctcctccgccgccagcgccagttcgccgaatgggaccatcgagagctcctagatatgcgccaggggaattgatatacaccgttccctggcccggcctacccgtcctgtaggattggccaccgactacgacgttttccgccaccggcggactgcaatcctggcatactccgccgataatcacatttccggctgcggaataataaaataataagcgaaattgtgacattgaaaggcgcgcccatctgattcttacccgtagcctgggaagccaggacaacgaaaattgcaaaggacagaatcaggcacttcattctcaatctgcgtgcaagacgaatctattcgagacacatggaatctgtgagcttttaagcattcccattcgctttgttatgaaaaccagattgcagtggaggcacaaccaagggtggataggtgcgggattcgcccccagaaaccagttcaatttacagataactcttgacaggggttttccacaagcttcttactttgcttattgctagctagaaatcgaatgaaagcttatttgtaaaatatagaatttttagattgttttgatttttacattctagctcatgtttatcatgtttgtgataaaatatacagatttttatgccatcaataatttaatgtcttcggttatcattaaatttgcttttcttgacaattatatataaatataagaatacccattgtctcatttcatctgcataatttgttcgacaacttttacaacttttacttaattatatttatatatttatataaaacttaaaacaagctatttcttaaaaaatgcttcttaccaatgattctaccgatttacctgaaattaataattaataattaaaataataatttatataaaattcttataaaaaaaaagtctgaaatatgcgtacttttaccttctttgaagacttcatcttaagtctaccgattaaatgcttgtgttttcccaaatacacggcttatcaccaattcgcgtggctctctaatccgacgctcgactatataagatcggctccaactagccgagatcatcagttcaatccaatcaattgcccagtgcactcagtatccaaaaccggagaaatccatccagaatcaatatgaaattcttctcagtcgtcaccgtttttgtgctcggtctgctggctgtggccaatggtgagtaaaactaattgaaattgcctatttgatgatttaactaattttattattattattattttccagctgttccactgtcgcccgatccaggaaatgtgatcatcaatggcgattgcaggg

SEQ ID NO: 37136 - DNA, 405 bp, DROSOPHILA
atgaagtgcctgattctgtcctttgcaattttcgttgtcctggcttcccaggctacggccggaaatgtgattatcggcggagtatgccaggattgcagtccgccggtggcggaaaacgtcgtagtcggtggccaatcctacaggacgggtaggccgggccagggaacggtgtatatcaattcccctggcgcatatctaggagctctcgatggtcccattcggcgaactggcgctggcggcggaggaggcggtggcgcccagtatccggatggttacagtggtcgtctgccaggtggcacttaccttcacaataaggattgcgccgtcgaacacgtgtttttctcgttttccttgcggcaaaggcaaaggcattgccacataccgcgctttccgcgtgtcctgtga

SEQ ID NO: 37137 - protein, 134 aa, DROSOPHILA
MKCLILSFAIFVVLASQATAGNVIIGGVCQDCSPPVAENVVVGGQSYRTGRPGQGTVYINSPGAYLGALDGPIRRTGAGGGGGGGAQYPDGYSGRLPGGTYLHNKDCAVEHVFFSFSLRQRQRHCHIPRFPRVL

SEQ ID NO: 37138 - DNA, 2549 bp, DROSOPHILA
atgaaattcttctcagtcgtcaccgtttttgtgctcggtctgctggctgtggccaatggtgagtaaaactaattgaaattgcctatttgatgatttaactaattttattattattattattttccagctgttccactgtcgcccgatccaggaaatgtgatcatcaatggcgattgcagggtgtgcaatgtccacggtggcaagtaggaagtttcaacccaaggattcgaaaaaggacatagtctacaaactagaacacaaaagctgttaccattttttactggaataatacatagaattaaaaatgcaaatcaaagaaatacatacaaatagaggattctatttcctttctaactaaacaaaagatgttttttatttttagtattttcgaattaatcaaaacaaaaagtgtaaatctatatttcccacgaaaaaaatattttgtcagcagctatcaatcaatcgctctcatctcatatggcacttgattcactcctagatccgactatctgctatataagatcggtttcccttaatcgagagcatcagttgtagttgatcgtttgtccggtgtgttcagcttataaaaccggatctattaattgaaaatcaatatgcgattctttgcaatcgtcactgtctttgtgcttggtcttctggctttggccaatggtgtgtagaacctacaaagattaattagttgattacttaagtaaataatcatcttattcaacagctattccgttgtcacccgatccaggaaatgttatcatcaatggcgactgtgtgaattgcaatgttcgtggtggcaaatagaaatttttaatcaaaacttatatttagcatcataataaaaatgtaataaaatgaaagctatattgtaaattgtatttaaatcgcaatcatttatagagactataagaaaaaattcgaatattggtttacagatgattcctccaccacataagtttaaacaatcttcgttttaaaaaaaagataatttcttagtgtttcaataatttattgactttatccgcgaatattgcaaccgacgcaatcactattgcgcaccagtgttccgccgggatagccactggaatcgatggtggttatgccagatcctgcccatcctccgcctccaccccttccgccagatccgcccaaatcgatgtactgaccaccgcgtgactgacgcttcgaacgcctgccaatgtattgagttcctccagccgattgatgcagtgcccagtcaccggtcaggtcatcatcatcatcgtcatcccatgatgggcgaccgcgggctggagatgatctcgagcttggccgggctgtcgtcctacctccacttccttttccacttgttggcttgtgcgtggtggtagtcgtttgatcatgggagcagtttacgcacttgccgttgatggtcaccttgccacctaggtagaagaacggttaatattcaagttaaaaccttttggccttcaaaccgaccgtggacaaaggccaacgtggccaagatcaaaagcgccaataacgtcaggctcttcattatgattccctctaagccgattgatcggcgtcgccttctttttatagccgtgccgattagctgagatttataatctgtataatctatatatataatgtatacaaatttaaaaccgatctggctggaattgagtacacctttgttttaaaacaaagctgaactattgactgttgcctgtgtaggagattaaaggaaatgagtgcttttcaaaatataataaattatcatcttttttttaaaatcaatacaatttacaaagcggctgatgcaattttatttcagctatttattatagattaaccatattctaacatgatttagttaattattccctgagttctaacttttttttaaatattatattgactgcgtataaaatttcatttaatggttacaagaagaatataacgctttctttgtagtaattgttaaaaagattactacagaatattattatttaaaaacatactcaatagtaagtttaatgaactcgtttttgaatgcaagtgtatacgtgttaatttaatttgtagcacgtgcagactttgtattcaaaatgttataagccggtttcaatttcactgagcacaacacatttctatattgaaatatatgcaaaactttgcaggtgcatgtgcttcaaatcgaggtaaaaaacaacaacaaactttgtttgtaaacaaaacaaaaaacaaattattcagttcttataaagaaagacaaatgattgaaagctatattgaactgcaactattttgaatacttctaagaactccaatggttttctctcgaacattaaagcaatcttagcttctacctgttggttcacataacacgcccataaacacgggactggaatttccagatttaaatacgcaaaacaaatgctattgaacgctcaactttctgtgttttcccaagcgctttcgattcgatgggggttatcagtggcctccgtccaaccaatgcacatttgctgctccaagattccaggctgagc

SEQ ID NO: 37139 - DNA, 494 bp, DROSOPHILA
atgaagagcctgacgttattggcgcttttgatcttggccacgttggcctttgtccacggtggcaaggtgaccatcaacggcaagtgcgtaaactgctcccatgatcaaacgactaccaccacgcacaagccaacaagtggaaaaggaagtggaggtaggacgacagcccggccaagctcgagatcatctccagcccgcggtcgcccatcatgggatgacgatgatgatgatgacctgaccggtgactgggcactgcatcaatcggctggaggaactcaatacattggcaggcgttcgaagcgtcagtcacgcggtggtcagtacatcgatttgggcggatctggcggaaggggtggaggcggaggatgggcaggatctggcataaccaccatcgattccagtggctatcccggcggaacactggtgcgcaatagtgattgcgtcggttgcaatattcgcggataaagtcaataaattattgaaacactaagaaa

SEQ ID NO: 37140 - protein, 154 aa, DROSOPHILA
MKSLTLLALLILATLAFVHGGKVTINGKCVNCSHDQTTTTTHKPTSGKGSGGRTTARPSSRSSPARGRPSWDDDDDDDLTGDWALHQSAGGTQYIGRRSKRQSRGGQYIDLGGSGGRGGGGGWAGSGITTIDSSGYPGGTLVRNSDCVGCNIRG

SEQ ID NO: 37141 - DNA, 2268 bp, DROSOPHILA
cacactcacatctggagccatcttctttggaattatatatcatatattcagttaaattactatgtaatcaataagttaataaaataatatcttttatttctcaaaaaaaaaccttaagcttgtgacaaattgcgaacttaaatacaacccttatcacgtatagatttagtcacatattaaaactgctatttaacaaatcccaactttatgggtatttaaattgcatttagattatagcaattgcatattagattaaaatctgtaaatttaatttaattcccagctttgtttaaaccgctaggaagctttaaataatttagctttaatttttatatttattcatattgattttggaattagatttcctatttgagacaaatctacaataatctattattatttatattcgattgattgatcgctatcgctttattttgttttgccattgttctgaatgtacatcgccttatcaacatttttttttgtagggcatttccagactgggcacaacttttgtgtgattacaacagctgagatacgtactatccgggaaaaacctgatatttaaatttcatcataaaggtgcctataaaagaaaaccaatgaagtgaatttttatcagtttcatttcaaccgttgccaacaatatgaagtggatgtccttggtctttctatgcggtctgctcgccatggcagtgggtgagtatctataagattcatacatccttaaccagtatcctaattatttttctactattactatagcttctccgttaaatccgggtaatgtcattatcaatggagattgccgtcattgtaatgttcgcggaggctaaattggagttataaaactttgatgtttagtaactacaataaaacttatgaaaaatacagattgtgcataaagtgatggtcttttttattttattagtacgcaaactataatagttcgaacttcatttctaactgcaaaagttaataattataataataaacaacattttggtgtttcagtgactttagtttatttcatattctgatttccacattctaatcgccgcgtatattgcaaactttgcagtcgccgtttataatcacattgccaggactcaggggattggctagaaataaataaataaaaaaaagatttcaattagaaataggtttttattatttatacagcacatcattggcacttaccactagccaaagccaaaagtccgaagagaaaagtaatcgagagcagcttcatattgtttgtgatttgacgattcagcgactaaattgcctatcgattcaaacaggtctcttttatagccgcgcaaatcggtttgattagcaaattgcgcactttttcaattaaaatatgacccctggagtatataaaaatgcgtcataacttgatttgaacagcctatccccagcgatttagtagctttaaagagatctttgtctgtgattggcaaacacacaaagcagttattaattccagggaaatttcaaatctaacttattcgattctagcacttttgaaatatcttatttaatgcatataaaaacaaagaatgaaacaactgaaaacgtaacgaatgacactgcagtttactagcaagaatttaacttcttaaattttcgttttctatgtgtgtatctatgtggtcgccaaaggtaaatgaacgtgtttgtggtcgaattaactttgaaaaagttgctgtaggtgggtatgtttgattcagtttataagtaactttgtttgtgcactaaaagaaaaaccttaaatttcaaaaacgaaaaattgttattgtgtttttatcaaaggtatataccattatttcttttttatatatcatattctaacttacactgcttactagttagttaataaataattagaccgttttctgtttttttttcaaagaaaatatttattgcttttcattgcaataaacattgttttttttcacaatgtacttgtttttgcacatggctggcaattaagccaatgaagcattaaaaaccaccagtcgagttccatgcaaaatgagttttttggctgtttcgtggggcttaaggcgattgtcggggttttcgatgggtgtgtgtgtggggggggggatggtgggtggttttgcagcagaagaaaggtgagtgcaaatggggcggagaaagggtttagcgcagtcaaccagcatccactcacccaggattagtgccgcatgcgctaaacgctgttgttgttgtcgttgttgttgttccacacacatttgt

SEQ ID NO: 37142 - DNA, 189 bp, DROSOPHILA
tcaaatcacaaacaatatgaagctgctctcgattacttttctcttcggacttttggctttggctagtgccaatcccctgagtcctggcaatgtgattataaacggcgactgcaaagtttgcaatatacgcggcgattagaatgtggaaatcagaatatgaaataaactaaagtcactgaaacaccaaaa

SEQ ID NO: 37143 - protein, 40 aa, DROSOPHILA
MKLLSITFLFGLLALASANPLSPGNVIINGDCKVCNIRGD

SEQ ID NO: 37144 - DNA, 2723 bp, DROSOPHILA
ttcctgagatgcccacaaagtagtcacgagtttctaaaaacgttaaagcttatgattttttttcttttctttggggcttaaataggaagggaatgctttaaaaaaatttgtgttttaaggccaacaaaggtttataagtagggaagaaattgaaaataagtaagaaacaaatggaaaattcatgtactttttatagatttccatacatctgcaaaataaaaacaaaaagttttggaatttttgcttcataagaaatatcttcggattgcgtgactccaatttccgctcacgttagcatctcctgcaggacttccgtggggcttggaaacggacttcacccagcaggtatttagacttggctccttttttaagagtattttaaacgacggcgcgtcctttttgtggacttggagcaagcgaagggcggggagttcgagacccgagcgcagataagaggcaaatttggaagtggcataaaacgggggcgagttgggtttgctgcggagctgggctggctagctgcttgggcggatggcgccgtcataaattaattatgatttaacaactttagcatgcacgacacggcaggaaaactttgcgcttttcatttaccccgccctcttctattttgtgtcgcttttgtggagggtaaaattttataattttaatgagcgcaaaaaagttgtaaacttttggctgcgttgccattggaaatgcactccacgctagatagtaatttatatacaacataaaaaaaatgttcgccatcaaggacatttaccggccaagagcacttagatggctacaaagtcttcagttaactcagaacagtatatagtgagcctatacactgggaaaaaaagaagattattcaaacataatatacattttaaatcattttgccagcagcgtaagttttaatacatcatattaaataccatttaacatacaattttactttgggcaatgctctcttttcgatgcgacaatggcttccgcatcactgttttccagctccgctcttgatgtcctcaaaggccttttgccacagcttgtcaaactgcttgggcagcttggagcgaatcttatcggccaacaagcgggctcctctcaagttgtcctcctcatagaagggcaatgcggagatacgtgccaaccaggcggataatttggggtatttggtcgcatccacgggacagtagctcaggtgcagagtgctcacggtggccacaatgctaaaatcggcgatggtcagctgaggaccggccacatagggattctccgccagaaattgctccagcaaggcgtaggcatccttcaactcagccaaacgatccttgggcacctcagtggcattctctttgaacagagctctctgcaattgcttgaagatgccgtgaaaaaggacaccggtctcgaaatgcagccgctgatccaccacagctcgcttcagcggatcctttggatagagctcatccgactgggcgtacttgttcaccagatagccgatgatggcgtgtgagtcccaaatgcatgactcaccatcctccagcatgggtaccgtgtgctggggattcttgcgtaacatatccggcttcagatgatcgccggcctgcatgtccagcgtatggaattcatggtccagctggagggcacgaagggtcaacaaaacggcacggaccggcggactggactcagtgccatatagaatcaggttagccattgtggttgcttaactaattgccttctagctggttgaattgagattcgtagcagacagtgtgccatccacaactgactcaaggcagtctaaataatttaaatttctttcaaacgcgataagattagatattaaacttagtttcttgataattaccacaaagacgtcataatgctgcaagtttaagtttgcctgattgtttattaatgtccgggataagtcggtctgctatctattagctgtgtcaatatttgatcaatgtccccgtgatttatttgatcatagttggagcaccaaaggggctacttatatacactgctagaaacgtccaaacgaaacctaaagtaaccagactcattagcagtgtttctatgcaaacattttcatataaatataattataaaattatgagtttaatattattacttctgtgtatcagatcatacaattttatccaaaataacgataagctttatgccagcttaacttaagctttaagcttttagaaactttcaagcttcgttaggaagacttgaattgtaaatttacatgggttctacatgattcaaatagatgtatattacaataaatcataaaacaagtaactgtattaaattaatttcttctgacaaccaatgttcctgagttcacagagacctactttgtttttgatgagtatatgttttttgtagttcaccactgcatatggtgttttaaaattagtatcatatagatgattccagaactatcagttgggggtaattaatgtttgttatgatgaaataggcatacatattatatatatggtttttttttaactgtttaacacatggtttcgagcttttatcttagatttacgaaatgctctctcatttagcaaaaagcttgaggcaataaggtgtgtatatatgtacagtaaatagagagatcagtcgaaagaaaaacactgacgggtaaacaacacgtatcatgtcgagctctggaattgtactctatgggacag

SEQ ID NO: 37145 - DNA, 723 bp, DROSOPHILA
atggctaacctgattctatatggcactgagtccagtccgccggtccgtgccgttttgttgacccttcgtgccctccagctggaccatgaattccatacgctggacatgcaggccggcgatcatctgaagccggatatgttacgcaagaatccccagcacacggtacccatgctggaggatggtgagtcatgcatttgggactcacacgccatcatcggctatctggtgaacaagtacgcccagtcggatgagctctatccaaaggatccgctgaagcgagctgtggtggatcagcggctgcatttcgagaccggtgtcctttttcacggcatcttcaagcaattgcagagagctctgttcaaagagaatgccactgaggtgcccaaggatcgtttggctgagttgaaggatgcctacgccttgctggagcaatttctggcggagaatccctatgtggccggtcctcagctgaccatcgccgattttagcattgtggccaccgtgagcactctgcacctgagctactgtcccgtggatgcgaccaaataccccaaattatccgcctggttggcacgtatctccgcattgcccttctatgaggaggacaacttgagaggagcccgcttgttggccgataagattcgctccaagctgcccaagcagtttgacaagctgtggcaaaaggcctttgaggacatcaagagcggagctggaaaacagtga

SEQ ID NO: 37146 - protein, 240 aa, DROSOPHILA
MANLILYGTESSPPVRAVLLTLRALQLDHEFHTLDMQAGDHLKPDMLRKNPQHTVPMLEDGESCIWDSHAIIGYLVNKYAQSDELYPKDPLKRAVVDQRLHFETGVLFHGIFKQLQRALFKENATEVPKDRLAELKDAYALLEQFLAENPYVAGPQLTIADFSIVATVSTLHLSYCPVDATKYPKLSAWLARISALPFYEEDNLRGARLLADKIRSKLPKQFDKLWQKAFEDIKSGAGKQ

SEQ ID NO: 37147 - DNA, 3671 bp, DROSOPHILA
agagcgagcgaaggaagccgagcggcgggttgcggagatgcgaaaggagcgcgaggagaatacgcacattatctatggcctgggacacacatcgttgtttctgcgtatctatgataccactattaatcactggcagaacaaccgactcacacgggccatgcagtttgcccccaaaatggttttggattgctcctacgatgagcacatgaacaatcgggaggctacctatgcagcaaagcaattgatgatgtgctttgcggagaaccggatgaatgatgagcccttcgatctgcactattgcaacacccagatggacagcagatgcatgcagagcctccaacgctacatccccaccatgcacaatccagagttcccgataaatttgcatagcaagtgctttacggaactctttcccaagcagaacctggtctacctaacgccccactgccgggaggatctggtcacttacaacccagatgacatctacatcgtgggcgccatggtagacactatgaacaacgaacccctttcgctggccaaagccaaacgattgggccttcggatggcgagactgcccctggatcgctacctacagtggggttccggttcgggaaagtcgctaactctaaaccagatgatcaacattatgctggacctcaagaaaaccggcgactgggatacggccttgaagcatgtgccccgtcggaaggtcgtgcaaaacgaattccagccgcgcagggagaaagatcattggagcacaggcacgcgggccaggaagcttaatatgcgaatcgatcatctgtttgattttgacgagaatcgccggcaggctacctcctatgcaactccgcagaatgtaaggcagcgacgggagggcttggagttccaactggacacttgggcaacggggaagcaaaagaaaaagcagagacaaaattaaagttactcgttgtattcattaagatgcatatttcattttattcggattcggatttcttattcatgggaagttagtttttggttgtaggggaccttctgcctccacttccttcttaatggctgccacagtctgattcgatgagggaatctcttcaattactagaccagtatactcttcagcaggttcaccataatctgtgtctgtgtcatatttgaaagtactttctggcatggcttctgtcacggcttcatcttcttgttcatctttatcggtctttttgtattttagccacatgttcttgccgttgatggcctggtagttgatggccgccttaaggccagcatccttcatcagttctttagctttggattcgtactcctgcacacgatctttgcgctccaccgtcatcagcttggtttccagaataaaaagtgattgcgcacgcatcgcctggaagaagtccttgctcaagaaagagtaatagttataggccataaagacgatatcaaacatattgttccaatgagctgcaccctttttcagctgctccatctccatgggcgacacaaagtgcactgttactccgggcacgtggatccatggcttatcgtaagccgcttgcccagcagcgtcctcttcctggtggttcaacaagggcgtcatcagcagctgaacagagccataccgtcgggaacgagtggtatcatgctcgtaggctgtctgggtcagcaattcatggaagaattccatgagattgcgttctgttatatcggtagcacgataatcattatcaccgtgcacagaatgatgcattcgctcctccacggtgcgcagcccgaagccacaaaacggtccagtctggatatcacccacatagccacggtggatgaagttgcgtccattgcgcaccaatccaacggccagtgtcttgttcggcttgcaatgctcatattccggaaaaacgaaagccacgccggtctcgcgccaatagcggtactcctgcgaacagatctgctgccctccacgttcctttagggtcatgctcaggtcccaatcaaaggccccgttgcgatggtcatacctggtgccgagcagggccctcgacctttgctcccagtaggcggtcacctcaaagacattccacggttgcggctgccaaaaagtgaaagccatctcaaagccatctcgttccttgtactttagtccttctatattcagcatgggagccaggcgctgaagttcctcctcattggtgaccattttgagcagtgtgcgtcccttggctgccatgtaatggtgcgagctgggacggatcaccgcatttccgtagaggtccatgaacaagtgcaccttggacaccaggttaaaggactcgggatcctccagggctacgcccaggagcagcatgttcctggcttcaatttcggcgcaaccatcgagtaaatagatatttagtttgggtcggatgcgatgtgtgtatcttttggccagcgtcttgataacatgccgtggatcagctccaccgcagatgagtatgtttagggtgttcaaagtattatctccggccgcttcttctgcttcctcgcgtgcatgctcatcctccggcagcgggtcgtccttgatcttgaaggcccttaggtactcctcgtataaatcaagcgcggaactgattccccacagcattttgaccttgagtggctttggtttttcgatgaagtctggatccgttgaaacttatttggttatgctatcgcccaaactgacttttcactcttgattgatggcagttgccaggactacttgttgtcgccgttgtcccgggcaacgtcttgctcctgctgcactccctcatttgcgtgcatccgttgcggggattagggagctctggcaatcataacggaaattgcttttcgatatcagtggctggcagcgggtgctggacaaatggctcatcctgcagggcagtggggccacttccacttccaccctggtgtggagcaaagtggcgggtaatgcattattcagacttggttgtttgctttcagctgattggcaaggcgagcagcagcagcgaatctatcggggatttcccttggattcctaattggataattttctgcagcaagcggttgcttgtgctgtgtgtagtgtgcttatgaggatttctaaaattgaaatgcattttctaggaccaaactaccttctcctactacaaagtttaaccctttcgtatgcaacacttattaaataaatttaatcatttgttttttcattgtttttttaatctttcaagctagccatgtactctactgcttttgtaatcttttaatttttatatttttctaaatcgctaaaagcgaacaaatattcaaagcggatgagagataatgtgactctagtttttttgtcgatgcttttttttattgtttgcttgcgggaaaatcgtggtggccaaatggatttaaagccccgcggcaagtggctcacttaatcctgatactttgtctgcgctttgctagtttttattcagtctgaattcgggttttcgcgtcttcctttcagcttggtaacttttctttggcaatgccggaaagttcgtaatacatgactaagtcttcgccataaagttttccggctgctctgaatacgctgcgtatgcgtgatttgacgatgatagctagcaaggccagaattcgtatgtgctatgccatgcctaagtgaaaactcagaa

SEQ ID NO: 37148 - DNA, 1671 bp, DROSOPHILA
tcaacggatccagacttcatcgaaaaaccaaagccactcaaggtcaaaatgctgtggggaatcagttccgcgcttgatttatacgaggagtacctaagggccttcaagatcaaggacgacccgctgccggaggatgagcatgcacgcgaggaagcagaagaagcggccggagataatactttgaacaccctaaacatactcatctgcggtggagctgatccacggcatgttatcaagacgctggccaaaagatacacacatcgcatccgacccaaactaaatatctatttactcgatggttgcgccgaaattgaagccaggaacatgctgctcctgggcgtagccctggaggatcccgagtcctttaacctggtgtccaaggtgcacttgttcatggacctctacggaaatgcggtgatccgtcccagctcgcaccattacatggcagccaagggacgcacactgctcaaaatggtcaccaatgaggaggaacttcagcgcctggctcccatgctgaatatagaaggactaaagtacaaggaacgagatggctttgagatggctttcactttttggcagccgcaaccgtggaatgtctttgaggtgaccgcctactgggagcaaaggtcgagggccctgctcggcaccaggtatgaccatcgcaacggggcctttgattgggacctgagcatgaccctaaaggaacgtggagggcagcagatctgttcgcaggagtaccgctattggcgcgagaccggcgtggctttcgtttttccggaatatgagcattgcaagccgaacaagacactggccgttggattggtgcgcaatggacgcaacttcatccaccgtggctatgtgggtgatatccagactggaccgttttgtggcttcgggctgcgcaccgtggaggagcgaatgcatcattctgtgcacggtgataatgattatcgtgctaccgatataacagaacgcaatctcatggaattcttccatgaattgctgacccagacagcctacgagcatgataccactcgttcccgacggtatggctctgttcagctgctgatgacgcccttgttgaaccaccaggaagaggacgctgctgggcaagcggcttacgataagccatggatccacgtgcccggagtaacagtgcactttgtgtcgcccatggagatggagcagctgaaaaagggtgcagctcattggaacaatatgtttgatatcgtctttatggcctataactattactctttcttgagcaaggacttcttccaggcgatgcgtgcgcaatcactttttattctggaaaccaagctgatgacggtggagcgcaaagatcgtgtgcaggagtacgaatccaaagctaaagaactgatgaaggatgctggccttaaggcggccatcaactaccaggccatcaacggcaagaacatgtggctaaaatacaaaaagaccgataaagatgaacaagaagatgaagccgtgacagaagccatgccagaaagtactttcaaatatgacacagacacagattatggtgaacctgctgaagagtatactggtctagtaattgaagagattccctcatcgaatcagactgtggcagccattaagaaggaagtggaggcagaaggtcccctacaaccaaaaactaacttcccatga

SEQ ID NO: 37149 - protein, 540 aa, DROSOPHILA
MLWGISSALDLYEEYLRAFKIKDDPLPEDEHAREEAEEAAGDNTLNTLNILICGGADPRHVIKTLAKRYTHRIRPKLNIYLLDGCAEIEARNMLLLGVALEDPESFNLVSKVHLFMDLYGNAVIRPSSHHYMAAKGRTLLKMVTNEEELQRLAPMLNIEGLKYKERDGFEMAFTFWQPQPWNVFEVTAYWEQRSRALLGTRYDHRNGAFDWDLSMTLKERGGQQICSQEYRYWRETGVAFVFPEYEHCKPNKTLAVGLVRNGRNFIHRGYVGDIQTGPFCGFGLRTVEERMHHSVHGDNDYRATDITERNLMEFFHELLTQTAYEHDTTRSRRYGSVQLLMTPLLNHQEEDAAGQAAYDKPWIHVPGVTVHFVSPMEMEQLKKGAAHWNNMFDIVFMAYNYYSFLSKDFFQAMRAQSLFILETKLMTVERKDRVQEYESKAKELMKDAGLKAAINYQAINGKNMWLKYKKTDKDEQEDEAVTEAMPESTFKYDTDTDYGEPAEEYTGLVIEEIPSSNQTVAAIKKEVEAEGPLQPKTNFP

SEQ ID NO: 37150 - DNA, 4122 bp, DROSOPHILA
tcatatgcaaagcatacattttcgggcatcctcttgcgcttatacacacacacatgcagttgtgggacaaatagtagttgaaaatactatttgcgatacatactttcaattttagataataagaaaacaaaaacataattcaaattgaaatgttggatcaaacatagtaaatgaaagtaaactctttataaaactaccaccttgaatatattattttatttgtccataattattggtagaatgcatcttgagatttttgtactgcaacctcattattttgcccacaactgtactgtataagagggacttgcacatgaacggattcagttgaattttcctggaaattgcaattgcccaacgaaaatctcaacatatttcaggtaaaagttgatataaagagaatccttaaccagtttttgtttgcaaatattcctttagctttcaccagagtggcttgtattttatttccttttattcttttcaataaggatttattctgcaaatgaccactttgtggctgtacaaattgaagtggtattcattcaaacattttaaatttcccatttgttcaccatctatcgtgctctttgtttattttccaactttttgcgccaaaacatctgctttgaagcctaatatacctgccacatgccgaacatttaattaacgcgcagctattagccaacagctcgagactttgtggcgctgccaataaacaatggagagccccaagaaaagctcaacaaaaaaagcataaaaaaaaaaaggtaacgccaaatcataatggcccgtaccaccgaactttgtctgtgggaaattcttggaattaatttatgattcttcgtttcggccgctggccaactggcgaaccgaaaaataacaatcagaattgctgttgattaaataagcgttcagtggtttagagaagtggggcaagtgctgagcaaaatacatttaatttaattctcggccccaggcgttttgttaactgtctgctatattaatgccacaaagtggctatccaactcacctgcacagtctttttcctccccttgattacgtcgggatcattggttatatgcgcctcgattagcaggcgcagcttgtcggtcactttgttcttgaacttgctcaagtacgactcatggtcctcgttgtccgggtcgatggcctcgctggcggcactgccgggcaccctgaaattggtaatagccctaattagccagcactcctaaccaaaaatttccggaggccattaaggccatgggtgtagactcaaatagtcaattgttctgactagtgctttcacaaaatattaaataatataaaaaatgattaaatgtgacatcgttagatttcagttatagcacgtcataagaatctatttagctttttataattgaatataaaatgcttttcactaaattcttgtcaatatttcagtaaaaaaaaatgttttagctgagcctttaatgctttaattggcactttgcataatgccttttcactttttttttattattcgtggttggtaaaagttatcataatgaaactttttcgcattatcaaaagtgattaattaaagtttttaaagttgtgatagtagtggatttcgtaagtgagcacacatcagactaacgatatactgcatttttttgttatcaaaaagttactcttctttgttggactataaatgaaataactgacacatatatgcagccggaaaacttacacaagtgtagtatgattatctgtggaaaggttcatggtgagttcgtccttgatttttcgcagccgctctgccgcctccacgtcccccttgctgcactgagcggctcgttctcggaaaactgccaggattttctcgctggtgagggctgaaaacgtgaatttagaatatgaaatattctttcgatacaaataaaaaaccaacttacccatagcctgcgagacttccctttcgatctgcgtgcgtcgaagtagctgaacccgttccataaagtcaggcgatcgtcctgatgcaccggatccttgaagcaacgattgaaaggcttgttccaaaaagctttgcattcgctgtgattcagccagccaggcatccacgttcataaggctgcaacaaaaaaaaaaaatgaaggggtttcaataactggcggacacgttccagatgtcgaggcaagtgttggcatttccatattttccctaccacacccattccccattccgcccattcaaatatttgccaaagttcagctccaattgagtggccaaacaaagcgaatgtggcacatggataatttcagccaaacatggcacaatggaacggaaacggaactttgacaaatattggccaactttgtccaataactatttcggttgcagtttgagttgcggattacgctgcttgcaggcaagaacaaaacaaccttaactggtcgacatgtgtaaccgatcaataaacaacatctggtttacttctcttcaatgcaaaacggttcataaattgtttaggtcgtctaattaaacgtgattaagtattcgactcgttaacttaccgataatcctgtttgagctgccgttgcgtttgacttgcatccctttcgtaccacttaaccaacatagcctcatgatcggcagaggtctgctgatcggcgaggactgcggaaaagatgtcctcatctattttcgtgggcagcagctgacgaccgatgccatcgcccacgagcaccatgaagaagacgctcttcgtgtgcgcgtggcaagtgtcgatctcgtgcagatagtcatggatcaagtagggatcccgctccagctgatgcacctccaggtcgccagtgccgaagtgcatgtccacgaattccagctgtttacgaatcgaatcaaattaaataatacatcaaaccagtaataatataatttgcacccacctcaatttgtcggtcatcgtagagggactgcagctcgggaccgaccagttcgaggagcatgcgtcgctcctggttaaactcctgcttcagactggccacgtagatcttgatgagcagcggtttgggcaggcgggtgtgggcgctggttacgcctctcagtgcattcagcacactctcgtcgatgggcgcggccattttcgattgctagctgctttttgcctagtttatttgattgtttgtttcttttttgcgcgcggctgtgtcggtgattgagtgggtggtgtggtggcgcctcgcctcgccttgcctgcttatttaagttggccgaaatcaagtggcatcgtcgtcctcgtcgaggttttaccagagtcaacttcgagcagcccgcagctttggcacattttcaatgcgagcggcaaataaaattggttctttatctgtatctgaatcagaatctgaatctatatcaacagccgcgctcctcgccaccgcacaattcctgggcatagctggccaaaaagtttatccttctcgattcagctggaaaatacaaattgaaaagagcaaaaattgtatttatggcaaagtttttgcataacccgaaacgcaataaaaaacgaagccatgcgagacaaaaaaagtttcatcccatgatcaagcgagggataagtccatacatactatatacactcgtggccaaaaaaggggaaagcaaaagttggacaagtcagcaagtgttagcatttgactcagttgttggttgattgaaacattttggcaatcaaaagagggagtgaaaatgttgccctaaattgtaagtttaaagcaagtgagatacgtaagtattagacttaatacacttaagttattgataagtaatttatatttttactgatgtatgtttgaaaggaaaaggaatgtttaagctattaaatccgtgcaaccgcaaaatgctttagctgtgccttaaacgattaaaaataattgagcacgcccaatgctggctttaagatgaaaacggacttgaaaaggggagcctggtgggtggggcaagtcctgttggaatcctgctgccgtcctgccactaatgaagacccattcccttcgtcctagaaggtgctgtctgccaaccgccaaacaaaatcgattgccattaattccgcttcaatgagttggctaaattgctcgttaggac

SEQ ID NO: 37151 - DNA, 1020 bp, DROSOPHILA
atggccgcgcccatcgacgagagtgtgctgaatgcactgagaggcgtaaccagcgcccacacccgcctgcccaaaccgctgctcatcaagatctacgtggccagtctgaagcaggagtttaaccaggagcgacgcatgctcctcgaactggtcggtcccgagctgcagtccctctacgatgaccgacaaattgagctggaattcgtggacatgcacttcggcactggcgacctggaggtgcatcagctggagcgggatccctacttgatccatgactatctgcacgagatcgacacttgccacgcgcacacgaagagcgtcttcttcatggtgctcgtgggcgatggcatcggtcgtcagctgctgcccacgaaaatagatgaggacatcttttccgcagtcctcgccgatcagcagacctctgccgatcatgaggctatgttggttaagtggtacgaaagggatgcaagtcaaacgcaacggcagctcaaacaggattatcgccttatgaacgtggatgcctggctggctgaatcacagcgaatgcaaagctttttggaacaagcctttcaatcgttgcttcaaggatccggtgcatcaggacgatcgcctgactttatggaacgggttcagctacttcgacgcacgcagatcgaaagggaagtctcgcaggctatggccctcaccagcgagaaaatcctggcagttttccgagaacgagccgctcagtgcagcaagggggacgtggaggcggcagagcggctgcgaaaaatcaaggacgaactcaccatgaacctttccacagataatcatactacacttgtggtgcccggcagtgccgccagcgaggccatcgacccggacaacgaggaccatgagtcgtacttgagcaagttcaagaacaaagtgaccgacaagctgcgcctgctaatcgaggcgcatataaccaatgatcccgacgtaatcaaggggaggaaaaagactgtgcaggtgagttggatagccactttgtggcattaa

SEQ ID NO: 37152 - protein, 339 aa, DROSOPHILA
MAAPIDESVLNALRGVTSAHTRLPKPLLIKIYVASLKQEFNQERRMLLELVGPELQSLYDDRQIELEFVDMHFGTGDLEVHQLERDPYLIHDYLHEIDTCHAHTKSVFFMVLVGDGIGRQLLPTKIDEDIFSAVLADQQTSADHEAMLVKWYERDASQTQRQLKQDYRLMNVDAWLAESQRMQSFLEQAFQSLLQGSGASGRSPDFMERVQLLRRTQIEREVSQAMALTSEKILAVFRERAAQCSKGDVEAAERLRKIKDELTMNLSTDNHTTLVVPGSAASEAIDPDNEDHESYLSKFKNKVTDKLRLLIEAHITNDPDVIKGRKKTVQVSWIATLWH

SEQ ID NO: 37153 - DNA, 5088 bp, DROSOPHILA
ttcagaagtgttagaagttccatccgagcacggtcgtaaatatatgtgtatatgtatctatctctaaatatatatatataatgtataatataggtacacgtaaagatacacatcaatatactcgtagtaacgtctgagtgaagtactttgattaaatggtattctctttagttttgctttgtttttatgttttttgttttgttttttgtttggcttagattaacaacagtcaacattcaacagtcattccgatatgagatattcgtcaattggaagaattttttttgcgaagcaggtggagcgtttagtttagtaaccctagcctagacaatatacttatccgatagaggtcacgtgtatatgtatatgctgcttatggccactatgtgtatacataaatcaacatctataaagtttctctcgtcctttgggaactgctcctcaagcgtttcaattgacagcgcattattggaattgaagttattcgcattggaacacatatatgtatgtatatgcaagtacgcattaaaaagtacacctataaataaatagttctatggcctcgcccacttggaggccacacacgcctcgttggatcaatggatcattggatcggggcttatcaatcgtgaccttcggcacccaagttggaggagcgtctggctgcgataagccaatccaaaacatccgccataaacaagccgactatcgccgaatctggaggcctgaccacagccaatgacttgctgaaaagcaagacccggcattaaacttttaatatacggagcccaacaaaggagatgaacacatccctccgcccgttttctgcggtcccatctgaatggcatttggaatatttcgccccgcagccgcttttgataaaaattcgcttttgtatacagttttgtggcataattttggcccaggaatgccgggcgataaaacgaagacatcgaggttggctcagcacatgtgattgggttttgcctgggggatatctttatagcacatgcagattctcgcagctcttcgacttggagatgtcgctgaggcagatcttctgcagcagttccttggccaagtgcagcgatatgtgggtgcgggaagtcttcatcttcgaggcggtggcctttttctcccgcttctctttcagccgcatctgttttatagtgtaagaatgaaaaatggtataaagaaatattcttaaaggcatcttcctcaaaacagcaatatttgtagaccttagattaagttttcaaatgtcaaaatgtattttatgtgtaatcaagacatccctttattattttttatatacaaccttgtctaccagtatcggaaatatcttactccgagttaagtaacaatacccaatcacctaatcaagtttgctgaccaagtttccttcggtcccgcttaccgcaccattttcattaattagtgagccgatccggaagcagtaacccaacccgaaaaccaacccaacccgcagcagcgtggtaaatccatttaactccatttcctgcacaatttcgccatgcatcggtgggttgcgtgtggttggcaccttgccccaacgaccgcagccccactgccccacttcctctctgccccccaatggtccgcttgtcctagcttttcacctccgactcacctgcttcaatatgccgacgagcagctcatcgacgttgtgctgtatgccgctagacgtctcaataaatttggcatcgcgtgaggcggccagcgctttgccctcttggggaagcaagagtgaattggggaataatgaaatgaaatcaagccatcataattaagaccccccggacttaccctgtgatgtgataagccgggcgcgggccagatccgccttgttgcccaccagtatgacagccttgtccttggtgtagttctcctgccacaggtaatttatgatttcctcggccacgcggaaggagctgcgatccaccaccgagaagaccacgacgcagccatgtggctcatatgtggatagggagttctccacgctcatctcaacgcttggatggtcgatgaagaccatgtccgactcctcatcgtccagcagcacgctcaccgtcttctcgccgaactcgtcgtctaaaactcaaatcagaattaaactctaaagacgacagtggcagccgggaagctaggggtcaggtacacacataggttccagctaggggtcactcggctactcactgcgctctgcggatcgtccccgaggtacccggaccataacccggacccactttggcatacaacttacccaggctggcgtcataggtgtgcatgtactccgacgtcatgaactgattgaccagcgccgtcttgcccacgccggcatcgcccagcatcacgacgcggtagcgggcgggcggaggtggatccaaattctccgagtcatccggtgttgccggcagcgaatccacattggcatagcccgctccgcaacagctgccctcgaatggggaacgttcgctggcccggctgtttgtcgagttgacgctggtgttgcttcgcgatctccgcgagattatcgagtcgccacagttaaccacgttgcccttgctgatggagaagtgacgcaggcggtacaggtcatcactggcacgcggattgtacggtcgctctggaagggaacagactcgcggacgcacatggtcgggaactgagacgaggaaaaaaaagaaaattaagaataatcatagacagacaatgaaaaacaaaatcattctcacctggcaactcgagaaagttcgatgttctacgctggcgaccgcgattcgaactctggaaggccagtggtccaacatcgtcgttggaaacgatggaggcattggagcaggcgctcttcatcgactcacgggaacttcgccggctggccaagtaggccagtccacctttggagctgccccggcgtcgcggtttatgctccacatgggccttcggcttgttgggcttgcagccacttagctcgtgttcagcatcttgggtcaggtcactggtggatttgcggtagcgaagtgagaccacgctatcggaacaggtacgatccagcgtggagtgggagctgtggagcacctggtagccgggattggaggtgatgttgatggcatggcgacgttggcgccgtaattgcggctgtccagcctcttgctccatttccggctccgtaaagctaaagctggtggtggtgtgggtcaccatggtgctattggtatgctgggtacccgtctcgccggattccatagacagctgcgtgcagtctgtgacgcaggagtcgcgcttcaagccataataacttcctccagccgagcttgatcctgcagccgcacttaggtttctcgcctcgatcttgctgatcaccggtagttcccactcatctctctgccgcttgtttggtcctccttgggcgtaacctccacctcctgctccgcccatggccatagccaccgccatgctctcatccacgcctgtcgtagtcaattggggaacgggatccagtggggtctttgttctcattaactttttggaaccctgtcgacgtggcgaactgggtggatcatagtagagagctccatcgtctggcgagatcggttcgtagtactcgaacttccttccgtgactgggactcactgcatcaaagacgaactggcactgcgacttgggactgcgggcagtggtgcgtccactgagcagagatgccgaatcatctatcgatcccgatgggggcgtctgataataggagctgggcgtggagctactgacatcatcacaactgtcttgggcaaaggtggtggtgatcttgggactcctcggggtatcatatcctccatagttatagctcgacgtcggacctccatggtattgcctgttaggggtgtcgaatcccaatataacttgtccagatctaatttggaatcttacctgggcagcttgggagtggctcctttgcagggcagcggattgctggcagcgcgagcaggtactttgtggtgcgaggagtggggatggccataggatcctccaccgacagctccctcgtcccagctgcgctgttgctgggccatttcacgactactggatggttaaacatgaattactcagtgcactaagagtaaaatctaagcacaatcaaaaatacctaacataatgcagaaccccatgattacctataataactctttttttcaacatattactagcaatttattaagatagtgattgctctattcttaagaattggcgtaaaatatgttcaaagtaaatcaatttatccctgttcatgtggcaggatgagatgagatgggtagatgagatggtaacgactcgctgatggccaactcatgtgtaaatatcatgggccattactcatcctcatcatgcacacacacaaaagtgcgtcctggccgtccggggcattgcccaaacgagcacaaagtaaacataatttatggctttatctgtatttaatcaaaataatgaaaagcggaccatagcagccgggcattataaagaccgcgcccactagcccacaagtccgaatagccagcaaaaacagggcgacgagtgttgtggccgcaagtcattttccgactttggtcagagagcaggaagacataaagacccggggaagtgctctatttggcctggcaattattgttaaatgtgcgttctccatcggatggtggcgtaagtggccgcccctattatcgctccacatcccccatccgcccatcctcccatcctcccaggcacccaaccacacccactagctgtcagcacattcacacaccactggatgctaacttatgcaaaagttggcaacaatccgcttgcgggaaacttcatgttgttgtttggggcggtaagaaagttccctctaatgggatttgccagcctcgagtttgagttgcagccgcgaactgttgcctacattttgggggcgccctcggacttgattatggcggcagatggcaagtgatggccatttctttagctcctattgagccggcaagtggttttccatgccccgcataggggttatgttggccagcactttagttttac

SEQ ID NO: 37154 - DNA, 2223 bp, DROSOPHILA
atggcccagcaacagcgcagctgggacgagggagctgtcggtggaggatcctatggccatccccactcctcgcaccacaaagtacctgctcgcgctgccagcaatccgctgccctgcaaaggagccactcccaagctgcccaggcaataccatggaggtccgacgtcgagctataactatggaggatatgataccccgaggagtcccaagatcaccaccacctttgcccaagacagttgtgatgatgtcagtagctccacgcccagctcctattatcagacgcccccatcgggatcgatagatgattcggcatctctgctcagtggacgcaccactgcccgcagtcccaagtcgcagtgccagttcgtctttgatgcagtgagtcccagtcacggaaggaagttcgagtactacgaaccgatctcgccagacgatggagctctctactatgatccacccagttcgccacgtcgacagggttccaaaaagttaatgagaacaaagaccccactggatcccgttccccaattgactacgacaggcgtggatgagagcatggcggtggctatggccatgggcggagcaggaggtggaggttacgcccaaggaggaccaaacaagcggcagagagatgagtgggaactaccggtgatcagcaagatcgaggcgagaaacctaagtgcggctgcaggatcaagctcggctggaggaagttattatggcttgaagcgcgactcctgcgtcacagactgcacgcagctgtctatggaatccggcgagacgggtacccagcataccaatagcaccatggtgacccacaccaccaccagctttagctttacggagccggaaatggagcaagaggctggacagccgcaattacggcgccaacgtcgccatgccatcaacatcacctccaatcccggctaccaggtgctccacagctcccactccacgctggatcgtacctgttccgatagcgtggtctcacttcgctaccgcaaatccaccagtgacctgacccaagatgctgaacacgagctaagtggctgcaagcccaacaagccgaaggcccatgtggagcataaaccgcgacgccggggcagctccaaaggtggactggcctacttggccagccggcgaagttcccgtgagtcgatgaagagcgcctgctccaatgcctccatcgtttccaacgacgatgttggaccactggccttccagagttcgaatcgcggtcgccagcgtagaacatcgaactttctcgagttgccagttcccgaccatgtgcgtccgcgagtctgttcccttccagagcgaccgtacaatccgcgtgccagtgatgacctgtaccgcctgcgtcacttctccatcagcaagggcaacgtggttaactgtggcgactcgataatctcgcggagatcgcgaagcaacaccagcgtcaactcgacaaacagccgggccagcgaacgttccccattcgagggcagctgttgcggagcgggctatgccaatgtggattcgctgccggcaacaccggatgactcggagaatttggatccacctccgcccgcccgctaccgcgtcgtgatgctgggcgatgccggcgtgggcaagacggcgctggtcaatcagttcatgacgtcggagtacatgcacacctatgacgccagcctggacgacgagttcggcgagaagacggtgagcgtgctgctggacgatgaggagtcggacatggtcttcatcgaccatccaagcgttgagatgagcgtggagaactccctatccacatatgagccacatggctgcgtcgtggtcttctcggtggtggatcgcagctccttccgcgtggccgaggaaatcataaattacctgtggcaggagaactacaccaaggacaaggctgtcatactggtgggcaacaaggcggatctggcccgcgcccggcttatcacatcacaggagggcaaagcgctggccgcctcacgcgatgccaaatttattgagacgtctagcggcatacagcacaacgtcgatgagctgctcgtcggcatattgaagcagatgcggctgaaagagaagcgggagaaaaaggccaccgcctcgaagatgaagacttcccgcacccacatatcgctgcacttggccaaggaactgctgcagaagatctgcctcagcgacatctccaagtcgaagagctgcgagaatctgcatgtgctataa

SEQ ID NO: 37155 - protein, 740 aa, DROSOPHILA
MAQQQRSWDEGAVGGGSYGHPHSSHHKVPARAASNPLPCKGATPKLPRQYHGGPTSSYNYGGYDTPRSPKITTTFAQDSCDDVSSSTPSSYYQTPPSGSIDDSASLLSGRTTARSPKSQCQFVFDAVSPSHGRKFEYYEPISPDDGALYYDPPSSPRRQGSKKLMRTKTPLDPVPQLTTTGVDESMAVAMAMGGAGGGGYAQGGPNKRQRDEWELPVISKIEARNLSAAAGSSSAGGSYYGLKRDSCVTDCTQLSMESGETGTQHTNSTMVTHTTTSFSFTEPEMEQEAGQPQLRRQRRHAINITSNPGYQVLHSSHSTLDRTCSDSVVSLRYRKSTSDLTQDAEHELSGCKPNKPKAHVEHKPRRRGSSKGGLAYLASRRSSRESMKSACSNASIVSNDDVGPLAFQSSNRGRQRRTSNFLELPVPDHVRPRVCSLPERPYNPRASDDLYRLRHFSISKGNVVNCGDSIISRRSRSNTSVNSTNSRASERSPFEGSCCGAGYANVDSLPATPDDSENLDPPPPARYRVVMLGDAGVGKTALVNQFMTSEYMHTYDASLDDEFGEKTVSVLLDDEESDMVFIDHPSVEMSVENSLSTYEPHGCVVVFSVVDRSSFRVAEEIINYLWQENYTKDKAVILVGNKADLARARLITSQEGKALAASRDAKFIETSSGIQHNVDELLVGILKQMRLKEKREKKATASKMKTSRTHISLHLAKELLQKICLSDISKSKSCENLHVL

SEQ ID NO: 37156 - DNA, 2231 bp, DROSOPHILA
cctccgcaaaaacaacaataacaacactcacaaaagctggtcaaatacaaaacacacttgtaaatttatttaatcttcgctccaccgtttttttttttcgattttttcatacgctctggtcgcgcttacacattacgatttctatctctccgctcttcttcattttacttgatttccatttgtcgcttcctccgcttttttttgtatttcgctggcgagatttcttttcacgttgaatttatactatattgcatttatattattgcgcttatcactggcgctttgttgctggcttcttgcctttcgcttacatattatattcacttggttggtgtgtgtgtgtttgcactgaacaatcggatgcggattcgaaatcgcgtgggcgcagcgtgcgacgcgtaattttgcatttaacatttaacatgaacacacataaataatcgccctcggctgttctattggaatttttttctgttattcgtgccgtctacggcgattctgattggacaacaccacctgctcgcgaagcaaaaactcggcaccgactcagtgtggccgtgtagcgaagcagacaaaatgacgaaatcgatgacgactgcgagacaactctgtggaagaaagcggatattagccaacactaaatgcagatttaaattcgttacatatttaccaatacaatgtacattcgattaaaacacttaaatctgtaaatgaaaattatatgtgtgctttagacttgttgaaaatatataaacaatgtttagcctggaagcaaacaaagaaacaaaacattaaatttatagtaataaaataaaagttaatagcttgtaagattttgaagtcctctctgcatcaatttacaaggcttaaagtcttaacaaaaggttggatttctctgcatactttcaggcgtccatcaaagagtatatggtaagaatcagagcaattgctttagtaaaatactaaccaatgagtcattatttccccaactttttggagcttagagataaagttggcgcttttggctggaggattttttgggcggctccgcggtttggggtctctggcgtatcaccctggtattctggggcacctgtcgcactttctggatcaggatggtcttcggaatctcacgagcctcgtaccatccgggatttacggctttgacccacgaactggcacagcactcgaagctgctcaatagttttgccacaccgccaaaggagaccatttttcttgagaaataaaacttaaaaaatctatggaaaatatagaacaatctgaaaactggattatgttcacttgaaacttgtaaatgaaatgagtttatttgattgtctgttcatgaaagtccttttcgacgcttgcttttgtaacggaaatttctacttcctgcgcagcttggaatacgcacgaaaccaagtggcatcttggaaggaccccgtccatgaatgaatgccttccagctggccgttgattcaactttccaccagcagccacctgaatgaaaatggagccgggaatttcactacaccactaaaacggaaattgcgtaggtggagagagagagagagtaagaatgagcgagaggaccaaatgagttacgcaccaggagtcgcgtgacgtcatttcaaagtttgtgcaccactgcgagaaactaaggaatatatataagacagaatttaaacgatttaaattaatttgaaaaccatattttgaaaatacatttaagattgaaagttttatattacttgaatggacaaataaattttttttttttttttgataaaaatatgttgtttatcacaagaatgaacaaaatattgcagttctatagccttataaacaaacatttcatagcaggccgtttaccaattgtcagggtttttccaataacagatatggcaccaaaagtgcatccaaaattttcaatgaacccacaagccccaattaaaccagaaaaaaaaactattcaacggcaaagcaagccagcagaaactttcagagtcagcagttgaagaacaaaacctcaagcgaatcaataagaatccattaaatccagcatggttcggagaagggtactgactaattcggccaagcaggcttcgatgaatgcctatcagcagctgtggcagcagcagcaattcgcccgagctccattagttgccgctatgccagaatattggcattccgtgtgcaacaaatttggtggcgccatgccgcgaatggcg

SEQ ID NO: 37157 - DNA, 231 bp, DROSOPHILA
atggtctcctttggcggtgtggcaaaactattgagcagcttcgagtgctgtgccagttcgtgggtcaaagccgtaaatcccggatggtacgaggctcgtgagattccgaagaccatcctgatccagaaagtgcgacaggtgccccagaataccagggtgatacgccagagaccccaaaccgcggagccgcccaaaaaatcctccagccaaaagcgccaactttatctctaa

SEQ ID NO: 37158 - protein, 76 aa, DROSOPHILA
MVSFGGVAKLLSSFECCASSWVKAVNPGWYEAREIPKTILIQKVRQVPQNTRVIRQRPQTAEPPKKSSSQKRQLYL

SEQ ID NO: 37159 - DNA, 2621 bp, DROSOPHILA
aaaatttgtcaaaatataaaaaaaaagagaagcagggaatcttttcaatcaattcaaacacacttttgtgaaaattccaccgcgagagagtagaacttgaacttgagacaatgcaatgcaatgcaaactatttgtttataataaagacaaagagcgctctcgctgccgggcaatgcggcgtatgcgtaatgtctgttgagcgaattagacgatggccggcgaaatcgagatgagtgtcatacttttacataattgcatgaaacaaatgctgattctgcactgatattacgtcctataaatcgccaatgccacgtgagccggttttgaacttcagccaacaacgggaaacaaggaaaaaccaaaggcttggggggggggggggtagggctgaaaaaaaagtatggaaaaaacagaaatgccattgccacgtgccgtttgacctttccccattggtcgcccggcgaatgcgatgaacctcaagctcggcgctcgcaaatgagacatttcaaaataatcgcaaccagaaatacaccaacaacaagtatagcagtcgtggcagaaaataccagtgtcgcctccgtttgggaatccttcagccgaaggcgaaaaaagtcgcatcaaaaggtcctattgatttaaaaggcaagcagctcaaggcaaggtctaaaatgttgttgattacgagtgtcgcccattaaataagggccctgaaacaatgtcaagaatttcagcaatatttgtctgcaaatcgcaatgcatggccatcgagaaaagcatttgctccgtaatactttttcaaaactaatggtatttgcatttaaattggattggataatactttgtaggtatatctacttttgaaactattccacttgatttaaagatatttctttattgttttgcaagcctattcaagttatagaacaaatacaaatttttgggatattatctatgtgaaaaagtgaaaaaaaaactaatccaaaagttgctgtatattaatctacatgctacctttccacaacagcttattttcaatttccattttagcgtactgctccctcagttcttcgagttcctttgagttcctagcagccaagcgatacaattgggcatttaggccaacgattctttcccttagagcattcactgtatattggctaagacgttctggccgaaagacatcctccttaacggtggccacaaaatgccacatatcctgaagctctccacgcttttcgctgctatatagcttaagtttttcatggagcacaagtttctcctgttcgatttcgttgatcagacctattagatctgccgtggaggaactgttgggtcgtggatttcgaccagtttccggctcttggcaagactcggtctttgaatctgtgccctcatcatctttgagtatgaaattattgggattcagcttgacttgattgcattcgagatatttttgctgcgccttcaggcgcgtcaattcacacagaatggcggtaggtgttagttttgccgccctgatcttgggcggaattttaacttgattccgtttacgagcgggtttttccggcggttgagcccttggagccgttggcttttgttcatcgtcttttggattttccattggggcttcggtagcatgtgattgttgcacaacatccaaggagagagtcgttgcaacttctgcagcgctcgtttggttgttcttatttacacgcggtaatcaaacgtgttgccagcacacccaaccacccacccactccttccacgtgtttaatcgatatgcaacctttccacccccctcgatttttccggctgctgtgccaacaattctatgcttctgccgggggtcagtaaactttatttggcttggctggattttacaattttccaaacggcagcggtaactttcagtggaaatggaaaatcgattagtacaattactgtttccatgtcatggcctacttaattgcccatggaaatgggacaaacggggtcgtggcttgaagaccactttcgtggctaactaatttctaatcagtacttgtgggagaccgggaaaatccacctgctagccaaaaactcaagtgacgatcaaatgtttggcgagctaatcaagtttcaatggactaacaaaagtataaagtaaaagtaggaaatacaacagtgagccttgctttagtggaactaatatattaaatcacaatctacaatcaatgaaatcaaagctaagaaggtttatatattatgcaaaaatgttcgttatatttaagattcactgttaactaacgaaattcgtttatatttaaattgccttttttttttatgtacggctaaaattgctggaattacaaaagtgcttggtatggaagtttgactgtttgtgcggatgaaatgttgatttattatttgttttgctatcgcctgcaaagtcaaatcgggcagcattaacttggcgcgtgctgtttgtcttctgtctccctcccacccaccagccacaacccacttgcgcccacaccacccactccgctgtgcgacagagacagagagcgaacgcacgtgactgatttgcgaatttacttttcttgcgatgacaaaacatcgtggatgaaaaatcagcagaa

SEQ ID NO: 37160 - DNA, 621 bp, DROSOPHILA
atggaaaatccaaaagacgatgaacaaaagccaacggctccaagggctcaaccgccggaaaaacccgctcgtaaacggaatcaagttaaaattccgcccaagatcagggcggcaaaactaacacctaccgccattctgtgtgaattgacgcgcctgaaggcgcagcaaaaatatctcgaatgcaatcaagtcaagctgaatcccaataatttcatactcaaagatgatgagggcacagattcaaagaccgagtcttgccaagagccggaaactggtcgaaatccacgacccaacagttcctccacggcagatctaataggtctgatcaacgaaatcgaacaggagaaacttgtgctccatgaaaaacttaagctatatagcagcgaaaagcgtggagagcttcaggatatgtggcattttgtggccaccgttaaggaggatgtctttcggccagaacgtcttagccaatatacagtgaatgctctaagggaaagaatcgttggcctaaatgcccaattgtatcgcttggctgctaggaactcaaaggaactcgaagaactgagggagcagtacgctaaaatggaaattgaaaataagctgttgtggaaaggtagcatgtag

SEQ ID NO: 37161 - protein, 206 aa, DROSOPHILA
MENPKDDEQKPTAPRAQPPEKPARKRNQVKIPPKIRAAKLTPTAILCELTRLKAQQKYLECNQVKLNPNNFILKDDEGTDSKTESCQEPETGRNPRPNSSSTADLIGLINEIEQEKLVLHEKLKLYSSEKRGELQDMWHFVATVKEDVFRPERLSQYTVNALRERIVGLNAQLYRLAARNSKELEELREQYAKMEIENKLLWKGSM

SEQ ID NO: 37162 - DNA, 14902 bp, DROSOPHILA
taaatgacaggcaacaggaaaaaaagaaaggagaatcgagaatgtgaacctttttgttgcaaccccataacttataaaatagttttaacaaggattttatttatggttcacaaaggttatgtttggaagcgaaaacatatatgttatgatatgttacacacgtaacatatcaactaacaaaaaaaattatgttatgtatgttaattatttaaaggaaaatgaacacgaaatgtacctaaagtgagtagatgtattggttattggttattttattgtttgaacactttgcttaactccaggatgacccaacaaagaaaactcaagacttaccaccctcctggacggtgggcaacttcgagtggaccacccgatggattcgccgattattgggcgccaccagtggcacagagccaccggcggccgccaccaagggcagcgagtgcggcggcgataggcccttggacatacccatgggcagagccgcgcccaccgggtaggtgccattggggggcgattgactgagagatttcagggtgggaggtagatagtcacgtttcatgcgagactcaacctcgcgaattatctcgggtggaatcactatcggttgtggtcggattaggtagtggggatttttaagcagcgagatcgggagcggtagcggttgtagttgttgttgttgttgttgttgtgcagtagcgggcaatgcaaaattatcaattgcaataaaccaaaaatgtttacataaaaagaaagtttaaaaaggcaaaccatcaaattaatacagtaatcaaattataattaaatacatgtgtacaaaatgaacatgtgagcacatatcttatataaacacttaataatacactatatctctgatttaaggctatatatagagcagcatgcagtttaaatttttaagccaaatttaaattataatcttaattttcctattaaaatggcatcctatattccacatattcagaatgattcgatattgcatattttataatattttagttagcctctctaacgcacctggcggtctctcggtgaccgtgagcaatcctgttcgccgctgccgcatattggaggaggtagttggcgcctgggactgtgatcctgctcctgatccatgtgctacggatagatcctccgtgcagcccaccgtatggcgctgggtgcctccacgcttttgcatatagctacaaagaattgaatgttatcatgttcctaagaaggaaatatagattcaagtcaacctttgcagctcctcgttgcattcgccggtggcattctcctggcagcattgcatctgcgccaccgactgttcgttgagcggcgacagctcctgcactgccaaaggatctgtgccgcaattcggattgatatagtacccggccgtgtccatttgctgaccctgagctggacccacaacggtgcccgtggcgggatagtagatgtgaagatttgccccgccgtctgaggcacgacgcccaaatgagcctagaaaaatagatgccacattaatgttgtaaatgaacacttctgtcatattggcaaatactcactggctcccataacaacgggcggcttgagcaaatgctgatccttgatggtgaggttgtgcaggggttggttctgcagcatgggcagattaactggatagtagggaactggctgagtgggatcgctgcactgcggtggacacttgaagtcgatgggcggcacattgggattagccagcgcctgctcgtgggccacatcgccgggtcccactgtatggcgtctggtattcgcaccattgacacctccaccagcgtgtgcactcaaatgctgcgcattaacagggggctgaaaaaaataatccacgttgttatcgaaagtttcaagagaatcatttaatgctcacatcatttgatcgcgccaggcattccagctcaaaatcaccatatttctccagatccacggcgacatcggaccagccaaagcccaaagctgagctggaggcattggcattgctcaacggactgagtcggtccagagattcctgcttgacgggctccgagcgatccaccacgcccgtcgtgatgctcgtcttacgtgatcgggagtaggctaggctggcgtggtgctgcagtctttggttttcgcgtcgcctttgctgcagcttgtcatgcagcaggttgtaaatggcgtagatgttgtcgaatctctgctcgtgcaccgactgtgctatcatgtcggcggtcagtccgggcaattggagcatatgcgtcattaccacagagtccagttgcggcggtgaatccgacgcacttcccagcgaggatgtggacgccgatttggacactgttcccgagccgggggacatgtcaccgaaacgttcctgctcctgcatctctgactgccactcgctgagccagcggtgcttgatgatttgtttgatagtgtatcgccgatcaggctccaccaccagcatgttccgtattagctgctcgcattctgtgtaacataagttttggtttaagatatgttctttcatactaccatttagagctcaccttgcgacataaagaagggaatgcgaaatttgcccaacaccacgcgacttttcagttccaggatagtctttccatcgaaaggtaatgctccacaaaccaaggcgtacagcacaacgcccaaactccagatatccgacttgggtccatcgtattccaagccttggaaaacctctggagcggcatagggcggtgatccacaccaagtttttaaggtggcaccctcttcatagtgattactaaagccaaagtcggcaagctgaaaggcaaagaaagaaactcaattcaaaattctactagaatggtaattatattatcataccttgatgttcatgtccttgtcgagaaggacattctcggccttgagatcgcgatgcaccaccccgcgccggtggcagtagtgaacggccgagacgagttgggtgaagacacgtgccgcctccggctccttcatcctgccattggccaccagatggtcgaagatctccccgtttggcgcgtactcggtgaccagatagatcatcgactgcgactccatcacctcgtacaatcgcgtgatgtgtggatgccgcagcgatttaaggatcgctatctcgcggaacgtcttgttcaggtactcctcgttcagacatgttttgtctatgatcttgatggccacctgcaaaatatgtcgcgagaaaacaggaacaagattttagccaaaaaatacatatcattcttcgaccgactgtttgtcgccttgctggtttgtttggcccaggtgaacgaacgtttgcggtggagcaagtaaatggggagaaatgtgatttcaaaagcgtacgagcatcagagaaagagaccccaaaaatcaagatgtgtgggttgcacacacaaaaccaacaaaaaagtgtctcgcatggctaacacaacagtggtaagagaaaaactttgttactatggtataaaaaagccaaaaggaagatggtctaaaatgaggggcaaggtcaaccatcttatgtcccttttgataaatacataattgctatttcgacagattatggttaatatttttgagaaaaatgtattaaatttgtattctcacaaccaaagttgggtacttttgctattatttaacccttttaagtggctttttcttatagtgtcagaccactgtaggtatttctgttaccaggcgtctttgtgggtggcttggtggcgcacagtctgcagtgtcagcataaacggtggctacacacaatgacagcgccatacatggtgcgcgtgttcggatctcgggatctctacggatatgtgagtatgagatatggatggatggatggatgatgagtgcggagcggcggcgatggcggcagacaagacaaaaacattctttgctcacgactttctgttcgcagacgacgacgacgaaattgccgttgccgtggccgactgtttatttgcttttgtgtattcgcgaaacattttaaaaatttatcacaatgttaaataattaacaacacaagtgagcgcacactcactcagtcgcgccgtctctttctcctcagctgttgctctctcgctcgacgacaatgagctaaagcatcatcatcgccaccggtttctttaaactttttttttttttgcttttttgttattgtttgctcaacatttaagcgaattcctgctgcttcctgagtacttatttctttaatatattcagcattttatgaaaatttgtcaaaatataaaaaaaaagagaagcagggaatcttttcaatcaattcaaacacacttttgtgaaaattccaccgcgagagagtagaacttgaacttgagacaatgcaatgcaatgcaaactatttgtttataataaagacaaagagcgctctcgctgccgggcaatgcggcgtatgcgtaatgtctgttgagcgaattagacgatggccggcgaaatcgagatgagtgtcatacttttacataattgcatgaaacaaatgctgattctgcactgatattacgtcctataaatcgccaatgccacgtgagccggttttgaacttcagccaacaacgggaaacaaggaaaaaccaaaggcttggggggggggggggtagggctgaaaaaaaagtatggaaaaaacagaaatgccattgccacgtgccgtttgacctttccccattggtcgcccggcgaatgcgatgaacctcaagctcggcgctcgcaaatgagacatttcaaaataatcgcaaccagaaatacaccaacaacaagtatagcagtcgtggcagaaaataccagtgtcgcctccgtttgggaatccttcagccgaaggcgaaaaaagtcgcatcaaaaggtcctattgatttaaaaggcaagcagctcaaggcaaggtctaaaatgttgttgattacgagtgtcgcccattaaataagggccctgaaacaatgtcaagaatttcagcaatatttgtctgcaaatcgcaatgcatggccatcgagaaaagcatttgctccgtaatactttttcaaaactaatggtatttgcatttaaattggattggataatactttgtaggtatatctacttttgaaactattccacttgatttaaagatatttctttattgttttgcaagcctattcaagttatagaacaaatacaaatttttgggatattatctatgtgaaaaagtgaaaaaaaaactaatccaaaagttgctgtatattaatctacatgctacctttccacaacagcttattttcaatttccattttagcgtactgctccctcagttcttcgagttcctttgagttcctagcagccaagcgatacaattgggcatttaggccaacgattctttcccttagagcattcactgtatattggctaagacgttctggccgaaagacatcctccttaacggtggccacaaaatgccacatatcctgaagctctccacgcttttcgctgctatatagcttaagtttttcatggagcacaagtttctcctgttcgatttcgttgatcagacctattagatctgccgtggaggaactgttgggtcgtggatttcgaccagtttccggctcttggcaagactcggtctttgaatctgtgccctcatcatctttgagtatgaaattattgggattcagcttgacttgattgcattcgagatatttttgctgcgccttcaggcgcgtcaattcacacagaatggcggtaggtgttagttttgccgccctgatcttgggcggaattttaacttgattccgtttacgagcgggtttttccggcggttgagcccttggagccgttggcttttgttcatcgtcttttggattttccattggggcttcggtagcatgtgattgttgcacaacatccaaggagagagtcgttgcaacttctgcagcgctcgtttggttgttcttatttacacgcggtaatcaaacgtgttgccagcacacccaaccacccacccactccttccacgtgtttaatcgatatgcaacctttccacccccctcgatttttccggctgctgtgccaacaattctatgcttctgccgggggtcagtaaactttatttggcttggctggattttacaattttccaaacggcagcggtaactttcagtggaaatggaaaatcgattagtacaattactgtttccatgtcatggcctacttaattgcccatggaaatgggacaaacggggtcgtggcttgaagaccactttcgtggctaactaatttctaatcagtacttgtgggagaccgggaaaatccacctgctagccaaaaactcaagtgacgatcaaatgtttggcgagctaatcaagtttcaatggactaacaaaagtataaagtaaaagtaggaaatacaacagtgagccttgctttagtggaactaatatattaaatcacaatctacaatcaatgaaatcaaagctaagaaggtttatatattatgcaaaaatgttcgttatatttaagattcactgttaactaacgaaattcgtttatatttaaattgccttttttttttatgtacggctaaaattgctggaattacaaaagtgcttggtatggaagtttgactgtttgtgcggatgaaatgttgatttattatttgttttgctatcgcctgcaaagtcaaatcgggcagcattaacttggcgcgtgctgtttgtcttctgtctccctcccacccaccagccacaacccacttgcgcccacaccacccactccgctgtgcgacagagacagagagcgaacgcacgtgactgatttgcgaatttacttttcttgcgatgacaaaacatcgtggatgaaaaatcagcagaagaagcaactccactgatagcatttgtgcttatcattggaatgtatgtatgtatgcgtattttttttttttgctgcagatagcatagttttgttagtatcaaaagcatacaaatatgaacgtggaaatgcaaaggaaaggcaaaaggtcgaccttagatttagtgcgcataattttttgggttttgtaaacacacacacacacagtagaaatatgataaaaaccgcagacacacgaatggtgagctgcaaaaagccgcgaaattgttaataaaaaggtaaataaaaattgttaaacgatttcagccacccatctcgctcgctcatcatctccgtcccgcttgcactcgcttcttttcggtctgacgcgtgttagatgttcaaacatgttttcggtctgctggccaaaaggcaacgctcagacggcagcttaaatatttgcccatagcgaaagatcaatcaacaaatgtgagcgagacggtgtgaattgaccagaaagagacgggtagagcatagggctgcacagagagaaataatatcgacatataaataatgaaatgtatagtagcatacagtttaaacagtttaaaaactcacatttgcaatgcggtttttcatcttaacttggaatgaaatttaaaaaatattttatttaagttcccctgcttttctctatgtaaaaacaaacacgagtggtatatagagtgtctacgctgcatggctggtgcttaattgcatcaattggagcattaaaacagttgccaaggcaactacagaaaaattcaattaaactaaaacttgccaattgagtgcaaacacattccgcacacaaagaaagtaaactgaaattcaatttgaaaaacggcacatgaaagcgatcaagagagcgtagaactctaaacaaagaaagaaatcaattaatactatttatattggctaagaaatgataaaactgtttatttcagagtcatttcccccgcagattttcactagaggaaatcatgtaagctaggctatgatttgcttttacgatacgctgatcaaagtacgtatcgcacactttcttatcgatgggttctgcagttccttcggtttaaacaaataatcataattcgaatgtgtgtgtgtgtacccacagttgtgtgtacaagtgaacttttgccatttttccattgataatagtgaattattggcaaaatgcgcttaggagcgataagccatgggctctaaggccatacaccatacgtaaataaattcatttgtattcagatcctaacgtactcatgttttaccaacgcacagatatagctatactatatagaatgagtacacatattgagtggacatggcagaaataagataagtggccaccattggaccttgaagttgtcgaacagctgtgcgctcttatcaggggtaacaaaatttcgttacagtcaacaaacaattcgccagatcgagggaagctgattcgatttgtttatctatctgctttgatgtgccacactgaccgactgtttcgagaaatatggcatactatagtcgcactgagcgataatttgacattcaaagttatatataccattagtgagtaccacaattgttagttttggcccactaaatgtcacagcattaatcattcaatcagactataacgatcgatttcgccagaggcacgtgctcatcacaaattcctcaacgctgtcaattatgcaaaaattgattgtttgctctataaatttgcatgctcttttgtgttcgcttctgttttcattgcctgtagtaggtacatttcacttgacaatcccaattaacaagtgtcacagctgttcccgttgtgttagcacttcgtcggatgattccacccgcaatggatgctaaagatttaaaaaaaatataagatgcaggtgagtcaatcgcttagatgcgacaggtaaggaaagacgcttaattgttatttagccggctcatcaacttcggttgactttatatagcaggaaattctcggtgggaaaagacgataacaaatgcatgtatcatcgacaaaaaaaaaaacaaaagagacaaaatcaaattacttcctcataaggaactgccacactcacatggcagtaaggtaataaacaacactcacacttttgagacgctttacaaatgcgattcaattagcatctaccgatttccacctccggattcacattcccccccgccacccttttttcaagccattgtcaattgaaggcaaacaaaaagccaagcaaccgaaacagaatcagtaagaccgagatgccgaaaacgaaacgaaactcctgattgtcaataagttgtgtaaataattattgtacacatatttacgcggcaataaacaaaatcatcaaagagcaacaacaactaaaatcaattcgatcagctcaaatgcgcaaaaagcgcgtatgaatatgctcagatttaaaaaggcattcaatttacatgtgccatagaagcgttagatagatacaaatactaagacttataatcaaaaatctttgttaattaataaaattattgtggagcaggaaccagaaataacaagaattttacacaaattgtttcgacaattcggagattttcctaaagtatctaaaccccagcaatttgtatcagtacgtgtatctattgattcgaagtagaacttaaagatctttcacccatacagatcataaccaatctttaagccgatgtcagttgccaagattagtcagttaatcagttgaggtatttgcatggaaactcacctttgtcttggtcacaatgttggtagccagcttgaccactgcaaagttgcccttgccgatggtcttctccagctcatagtagccgacccggaggagcttgtccacggatatcttgctggtcgatggcaccttgtagttctgcggcgttgaggacgttggaggagctgctgctggcccagccgttggtgtggtggccatcgtcgcagctgcgtcggtgtattccctttttctctttttgccgtaggaggatgaggattcttgcggatgcgtaattggcttttcgcgcacaggaaattcacttaatatgcattttcttttgtcgcgcagttcaaacgcgaacgcgagagttcatttgctggcggcgagactaacaaaccggagaatggtgaaccggagaattgagaatggagaacggagaattgggatgacgggatgcgggaaactggttggggatccgggagtttggagacgggggagccgccgccagcaacagtggattgtgtgagttgtgtagagtttgcgcggactctaaaatattcacttaactcgattaagaggtcaatggcagcttctcgttcggactttccagcggattctcggcgggcagtgggccatgcccaccaggcaactccaatgctcactttgttctttagtttttttttttttatttattgaagcgacacttcctcgaacgttttatttgttctcaatatatgtatatatatttttttggtttacgacgccttcaagtctcgatttaatggctctttgttcgaacgcaaattacttttcacatttcgattttgcactttttgtcaccgtcttgagggaagagagggaaaattattaaataagtatttcactttgtctagtttttgaccttggggttttcatttctatttttctttatcgcgggtgggcgtggcgcatgtgtgcgtgtggtttaatgagcaaaacaaacaccaaagatagcaaaaagagaaaaagaaataaactaatgaaaacagagagcagtagtgttatctattcgagcagaaatctcaaagaaaacaaaaggcacatgaatatttttccagccataaccgctttttgtactttgatttctaagcgctggcaatgtttttatttcattttattttattattttagctttcaaaaaaacttggtgataacatttttggttcagcgtatgttcataaaaaacggaacttttgaagtaaactagttaaaaaattttgttatgcttaaaaagtacattatctcagaattttttttcagaatactttcaagatatttttccaaatacgaaaaagtagatattttactcaatgaacatatttttattaggcaggaatagttttaagttttcagtgtaacgttaagaaaatgaagcgcgttaagaccacgataaaaaaagaaaacagggcccatgtctgttttttttttttttgtaagctgatcgcgcgaaagagacagcgagtaataggggctcacaatgggttaatgtacaacatcaaggtcgtatgaaaaccgggcacttgcacagccacattcgcacataatcgtgaagcgaaagggacggtgatagcggtggggaacagagaggggtagtcgtcaaaaagctcattgaaatcaatttagaccagagtgtgtgcgaagaagaggaagcaggcggcgacgacgacgatcaaacattaacccaaccaacactcgccacacactcgcataatccaaacaaattgttttcccccaaaactttctcgtgatatttcgcgggtgtgaaaagagccgcggcagctggacacctcaccctctcgcttcctctcacatccaccgattttctcacatttctgaaaggttttcgcgtacgctttcctattgtttatttgcatttatcagtggaaagacacaaaacagttgtagaatttttgtggaattagcaagcgaatggcataccgcagaccgaaccacgcgaagtacgaagcggacggagtcaaaagtcaaaactgaatgaacttccaacctggaagatacttctccggctaactgaagccggggaggctgcgacctcgcttccagccagccacacacacttccagcgcagagcgagagggagcgactgtaagagggaaacagagcacgcagcactatgtggtggggatgtaaaagacgtcaccgggtcaaaggtgctaaaaatccactatatatgtatcgcacggtgtactcaaagaggagttactctattcattattttttttaaactataaataatttaaataatttattgaatcattattaaagtctagctttaattcgctgaatggaagttaaaaagtattgaattatacaaaagactgatttgaagcaaagtgtgatttgaacctatacatatgtaaatctttgaactatccgattttaaactgctacagtaaatatatccttaaataaacatagagaaccttaacatttagtagcataaaagtgcctactacttgaaaaaaacgcttttaaaactgcttttgaagcaagagttgggtattcaacgtatctggccaattttgctgataactagcagttgttttgactcttttttaccaaatcggagagacaaaaatgattaaaaaaataaaaacaacagcaagcgaaaggcaaaaaagaaacgacaagtaaaataaatgaggcaacaagccgaaagcaaaagagagccgaaaaaccaaaagcagcagcaacaacaactagagaacttggacttacacagcatccaaagccagacagaaaagcagacggaaagagagggggcgagtgggagtgggggtggcgaacggtgggtagtgggcagagaaaaagggatagggcgacggagcaaagcaaatatgcgagaagagagacaatcgtgggttctccatcgactgacaaagctaagagggagaaggcactatcagcagggcgcccatttgcatgtgtgcgtgagcgggggcgcagcaacagcttgtgtatgtgtttgggggcttgggactccaaggagtcaaggaattttacaggaaaactaccgcaacccgtatgaaaattacaattactggggcatacacaaagagaaaatgtgatctgtgctatgaatttcaaaataatttttgtaactccaagaaatagccaactaaactgaaagaaatactattgaacgttatttttacagatttttaaatatattttaaaacatttataaaaacatttttaaggtttcttgggttaattcgcagtgacatatttgctttagagataaaaaaaatctcaaaactcatttaaaattcaaaacataatgagaacgtactctttgcttctcagtagtaattttaaaaaaacagtaaagattgagcaaaacgaatttgggcttttcgcttttgctcaatccatacaaaaatagctatcaattcattttaggaatgtccatttcgactttcagtgttgtagttaatgaaacaagattttattcaagatcactacacttcttttattcccgtgcaattgcatatgtgtgacgacaaaagaatgaaaaagaacttgtcgaggtcgcacgcactcacacacaccacacactgtttacaggagaaagcacctgcaattgataacgggtcgccaaatggtaaatagtacaaacaatgcatacgcaaggtgtccaattagaccactcaacggcaattggcttttcgctgccccttatttgcgttttaccggagttgcaatgacgtacgcacgcacacacacacatgcgtataaaagcgaacgagtgagagagacagagagcccccaccgcaaacatacaaccacacacacactcgtacacgctcacaccgttatgtatgggaaaacgtcacgacttccaaagtggaaaatcgtacgcgcattttttttgttttcctttttccacggctcggaatcgaaggtaaaacttgccgcagcgcacgtcacataattgccattcatgaatatgtttttagcttccgcatctcggtggccattcgagatggccgcgtgggtcacgagctcttttattgcactctatgctgtgaactggtggaagcgcatatcgtgtcacgcgctcatcactggaaatagttgctcaccacacacacacatgcaacagcgctgctgctgctgtgttgttgttattccgcttttctttcagcctccgcaaaaacaacaataacaacactcacaaaagctggtcaaatacaaaacacacttgtaaatttatttaatcttcgctccaccgtttttttttttcgattttttcatacgctctggtcgcgcttacacattacgatttctatctctccgctcttcttcattttacttgatttccatttgtcgcttcctccgcttttttttgtatttcgctggcgagatttcttttcacgttgaatttatactatattgcatttatattattgcgcttatcactggcgctttgttgctggcttcttgcctttcgcttacatattatattcacttggttggtgtgtgtgtgtttgcactgaacaatcggatgcggattcgaaatcgcgtgggcgcagcgtgcgacgcgtaattttgcatttaacatttaacatgaacacacataaataatcgccctcggctgttctattggaatttttttctgttattcgtgccgtctacggcgattctgattggacaacaccacctgctcgcgaagcaaaaactcggcaccgactcagtgtggccgtgtagcgaagcagacaaaatgacgaaatcgatgacgactgcgagacaactctgtggaagaaagcggatattagccaacactaaatgcagatttaaattcgttacatatttaccaatacaatgtacattcgattaaaacacttaaatctgtaaatgaaaattatatgtgtgctttagacttgttgaaaatatataaacaatgtttagcctggaagcaaacaaagaaacaaaacattaaatttatagtaataaaataaaagttaatagcttgtaagattttgaagtcctctctgcatcaatttacaaggcttaaagtcttaacaaaaggttggatttctctgcatactttcaggcgtccatcaaagagtatatggtaagaatcagagcaattgctttagtaaaatactaaccaatgagtcattatttccccaactttttggagcttagagataaagttggcgcttttggctggaggattttttgggcggctccgcggtttggggtctc

SEQ ID NO: 37163 - DNA, 2766 bp, DROSOPHILA
tttacaagtgtgttttgtatttgaccagcttttacggtgacaaaaagtgcaaaatcgaaatgtgaaaagtaatttgcgttcgaacaaagagccattaaatcgagacttgaaggcgtcgtaaaccaaaaaaatatatatacatatattgagaacaaataaaacgttcgaggaagtgtcgcttcaataaataaaaaaaaaaaaactaaagaacaaagtgagcattggagttgcctggtgggcatggcccactgcccgccgagaatccgctggaaagtccgaacgagaagctgccattgacctcttaatcgagttaagtgaatattttagagtccgcgcaaactctacacaactcacacaatccactgttgctggcggcggctcccccgtctccaaactcccggatccccaaccagtttcccgcatcccgtcatcccaattctccgttctccattctcaattctccggttcaccattctccggtttgttagtctcgccgccagcaaatgaactctcgcgttcgcgtttgaactgcgcgacaaaagaaaatgcatattaagtgaatttcctgtgcgcgaaaagccaattacgcatccgcaagaatcctcatcctcctacggcaaaaagagaaaaagggaatacaccgacgcagctgcgacgatggccaccacaccaacggctgggccagcagcagctcctccaacgtcctcaacgccgcagaactacaaggtgccatcgaccagcaagatatccgtggacaagctcctccgggtcggctactatgagctggagaagaccatcggcaagggcaactttgcagtggtcaagctggctaccaacattgtgaccaagacaaaggtggccatcaagatcatagacaaaacatgtctgaacgaggagtacctgaacaagacgttccgcgagatagcgatccttaaatcgctgcggcatccacacatcacgcgattgtacgaggtgatggagtcgcagtcgatgatctatctggtcaccgagtacgcgccaaacggggagatcttcgaccatctggtggccaatggcaggatgaaggagccggaggcggcacgtgtcttcacccaactcgtctcggccgttcactactgccaccggcgcggggtggtgcatcgcgatctcaaggccgagaatgtccttctcgacaaggacatgaacatcaagcttgccgactttggctttagtaatcactatgaagagggtgccaccttaaaaacttggtgtggatcaccgccctatgccgctccagaggttttccaaggcttggaatacgatggacccaagtcggatatctggagtttgggcgttgtgctgtacgccttggtttgtggagcattacctttcgatggaaagactatcctggaactgaaaagtcgcgtggtgttgggcaaatttcgcattcccttctttatgtcgcaagaatgcgagcagctaatacggaacatgctggtggtggagcctgatcggcgatacactatcaaacaaatcatcaagcaccgctggctcagcgagtggcagtcagagatgcaggagcaggaacgtttcggtgacatgtcccccggctcgggaacagtgtccaaatcggcgtccacatcctcgctgggaagtgcgtcggattcaccgccgcaactggactctgtggtaatgacgcatatgctccaattgcccggactgaccgccgacatgatagcacagtcggtgcacgagcagagattcgacaacatctacgccatttacaacctgctgcatgacaagctgcagcaaaggcgacgcgaaaaccaaagactgcagcaccacgccagcctagcctactcccgatcacgtaagacgagcatcacgacgggcgtggtggatcgctcggagcccgtcaagcaggaatctctggaccgactcagtccgttgagcaatgccaatgcctccagctcagctttgggctttggctggtccgatgtcgccgtggatctggagaaatatggtgattttgagctggaatgcctggcgcgatcaaatgatccccctgttaatgcgcagcatttgagtgcacacgctggtggaggtgtcaatggtgcgaataccagacgccatacagtgggacccggcgatgtggcccacgagcaggcgctggctaatcccaatgtgccgcccatcgacttcaagtgtccaccgcagtgcagcgatcccactcagccagttccctactatccagttaatctgcccatgctgcagaaccaacccctgcacaacctcaccatcaaggatcagcatttgctcaagccgcccgttgttatgggagccagctcatttgggcgtcgtgcctcagacggcggggcaaatcttcacatctactatcccgccacgggcaccgttgtgggtccagctcagggtcagcaaatggacacggccgggtactatatcaatccgaattgcggcacagatcctttggcagtgcaggagctgtcgccgctcaacgaacagtcggtggcgcagatgcaatgctgccaggagaatgccaccggcgaatgcaacgaggagctgcaaagctatatgcaaaagcgtggaggcacccagcgccatacggtgggctgcacggaggatctatccgtagcacatggatcaggagcaggatcacagtcccaggcgccaactacctcctccaatatgcggcagcggcgaacaggattgctcacggtcaccgagagaccgccaggtgcgttagagaggctaactaaaatattataa

SEQ ID NO: 37164 - protein, 702 aa, DROSOPHILA
MATTPTAGPAAAPPTSSTPQNYKVPSTSKISVDKLLRVGYYELEKTIGKGNFAVVKLATNIVTKTKVAIKIIDKTCLNEEYLNKTFREIAILKSLRHPHITRLYEVMESQSMIYLVTEYAPNGEIFDHLVANGRMKEPEAARVFTQLVSAVHYCHRRGVVHRDLKAENVLLDKDMNIKLADFGFSNHYEEGATLKTWCGSPPYAAPEVFQGLEYDGPKSDIWSLGVVLYALVCGALPFDGKTILELKSRVVLGKFRIPFFMSQECEQLIRNMLVVEPDRRYTIKQIIKHRWLSEWQSEMQEQERFGDMSPGSGTVSKSASTSSLGSASDSPPQLDSVVMTHMLQLPGLTADMIAQSVHEQRFDNIYAIYNLLHDKLQQRRRENQRLQHHASLAYSRSRKTSITTGVVDRSEPVKQESLDRLSPLSNANASSSALGFGWSDVAVDLEKYGDFELECLARSNDPPVNAQHLSAHAGGGVNGANTRRHTVGPGDVAHEQALANPNVPPIDFKCPPQCSDPTQPVPYYPVNLPMLQNQPLHNLTIKDQHLLKPPVVMGASSFGRRASDGGANLHIYYPATGTVVGPAQGQQMDTAGYYINPNCGTDPLAVQELSPLNEQSVAQMQCCQENATGECNEELQSYMQKRGGTQRHTVGCTEDLSVAHGSGAGSQSQAPTTSSNMRQRRTGLLTVTERPPGALERLTKIL

SEQ ID NO: 37165 - DNA, 4193 bp, DROSOPHILA
acagtcactattggacgcctatgtgcggctgcagggcaccaatatctcgcaaatgttacgcaagagcgtggaaacaagggattggcttaactgcctggaaccacgatccgttcgtgcggtgatgaagcgtgtggtggaggaactcggcagcatcgagacggtggtggccagtctgtacgaggcaaacactaatgcaacgtcaggattccgcaccacagcgagcagtgactctagccgaaaaacatatttcagtaactttgcttccacctcaaagccacagtatcgttccaattggtcaaactacacgccttcgcagctggaatccagctatgtgtccaacatacatcgcttgttttcggagcgagtggaaatctttacttcagtagagttcaccaaggcctcaattataatgggaattattaaaattggtctaaaagtaagtgagtttatgaaatgaaggtggctatttacgtgatttatgtttctagacccttttggaatgcgtgaggctgagaacttttagcaaattcggacttcagcagattcaggtggatgctcattatctgcaaatgaacctatggcgatttgtaagcgatgaaaagtgagttagtttcgaaaactgaaagatatgataaactaaacacacttgtttggcagtctggtgaacttcctgctggacgagattcttggctcagctgtgcaaaggtgcttggagtccgttttaatggagcccaatgctgtggaaattatttgtgaacggggttagtatttgtttccacaacataaagcaacattccacttaaaatctccgtctattttgttaaacgctgctagcttaaggatctaaaaataaacaccctgtttctaatttagatagttatttaaaatgtctaggaaattgacttcattttttttttgttagaaaaatctttcaaattccaattctgccattttttaactgtgctggttacgggtacaccaaatgtaacagaaatcattttcaatctgtggtatcggcactgagacacagagtgaactcgatggtatctcccttaatatcctcctcggtatttgtcagcagaatgctgtgggattccccatcttcgcccgttgagatggtcaacacgctgggtgtctcctcctcgatggcttttcgtttctcggtgcgtgccttccttgcctcctcgaactctttgggatgacacttcctacgatgcgtgtgctgattcgcattggagttaaatgttttcgggcagtgaggacacttgtaaagcacctcgcccgtatgcatggtcatgtgttccctcagtgtgatggcctttttgaaggctttattgcacacactacattcgtgcttcctatccgtgagatgcacatatcgctggtgactcagcatggcactcctattgggcgaaacctttccacacagatcgcaagtggcagcagtgccattatgtcgccgcacatgcttcttgagactgtgcttgttcttatgccaggatccgcagatgtcgcactgaaccttgggctccgtgacaccagcgtgctccagctgatgtcgctggaaggcagctcgtccacgtataacctgggcgcagatgtcgcacatggtaccatagttgccatgcgccattttgacgtgcgtgcaaagaagggattggttgggaaatctattcgaaaagacagcgcttaatcataggcaactttaagataagtaaaaccaagcttacctcctctcacatagatcgcacaccacattgcgctccttgtggataacgcgatgctgatccaacagatactgcttggtgtatcttttcgggcactgttcgcacataaaggtcttctcctcctccggatggtgcttcagcagctcatggttcctcaggcactgtttgtcggcaaatcgtttgtcgcactgggtgcatctgtaattaaatatcctattggttatgggttcggctcatgggattttcgcattagattggctcactccactttaccactcacttaaacttctccggatcggcgtgtcgatcaatatgatcggtgagaaaggagcgcttgtagaacttcttattgcaacaaatagcataccccttgcgatggtgctcctgcagcatgtgcttgcagagcagaagaaaggtctcctgcccctcgtgacaaacatcgcaggtgagtcgcatgtgggcagagatcttggcatcgatatccagcatgcactgcttgtagtccgcatagcgtttgcttttctgtggagttccttctgctttgcacggggttcgtttcgctttggatttgttcgccacagaattcgatttttcaggaggtgttgaagggggcaacgaatgatgtgctttgcttttggcggtcgaacgagtttctctacgctgctctgtgggtaaggtggctgaggtttctggatcgttgacagtagcattgtcttctttgatgaactgctcctttggtgggttggaatccgtttgctgctcctgctgcgcaataacttcggtgaggaactgctcgttggtaaaggaaccaccctcacttccaggtaatcccagctcctggtcctcatcctgctcctcctcctgctgctccgagtcctcaccgtgctcaactttcccctgatcttggccagatttcagggagaacctttcggtgagcaaacgatgtgcactctccacggccacatagaattgatgaaaatcgttcacctggttccagcaggtcaaacagatcaccgtggaaatgggatcatcgctttttggctgcaattaaatcgtttacatatgttaccaaaaatagagaagataagaaattacctcaaaccaaaagtatttggccagcacattggccacatttagggaaaggccaacgtcctcgaatatccgaatcgtatctgtatcgttaacgttgttcaggcacaaacggcaaatcatgcttaaattaatacattcaagcctaagccaatttttatattttttatatcaaatcaaaacataaacaagatttcttcgatatatgagatacgattatcgtctgatgtcatcggcccgaaatcgaatatgagctaaaaagtccaacaatcgaagtccgcagaaaactgtcggtaatcgatatcgaagtaggcgccaaattttgaaataagatgtttccaagtcgcattaaccttttgcactttaaatgtaataaatgaaaaccacatgggacaatgtttagagaattggtaatttatttaagataaagttcaattgtttatttatataatcatataactaattggtttgaaatttgtagtttttgtttgtatttctttttgttgttatttactcctaccttctttcgctctaaattaattacatgtaaaatcacagcagtctttcattaaaaaatagatttatcaatgttgtgtttaatccgtagaatataactctaaacatagatcgtgtgtataataacagaacaaactttcacactacactcataaaaaatgtttaaaatttaacggaatcaagagcttaccactaatcggagctactaattgccactgcaaactaactacagatttagtaatcacctatatatattaaaattaagtgtatctatatctcatacagatatagatgtacgtatagtcattgaactgagttgacaaaataaacatttttatctcgtttacgaattgcacataagtcaaaattatcattagtcgatatatttatatatagtatagttctaaatattgataatcattacggctagaacgaacgttggtttactttgtatgaaatttcggctactggaatgtactttacttgctcctgttgctgaaaaaccttgcgccaccaaatttgtattacaaattcactaaactatcttggcatgtgcgttattcgttaaaatataatataatatgttagcgaatattttaaatatttctacacgtatatacacgtttctttttgaattgaactacctaagaatcggtgtggcctacgaaaaattgaaaaatgtatttataattgatattcaaaattttgattacgctactgaacatgaaaaacgggaaagggataaactttgttatgaaattgaaacataactcctgtccaattgctactggtttaggatggctatatcgtacatatcgactttaatcacagctacgcagagtttaggcaaggcgagtagtc

SEQ ID NO: 37166 - DNA, 1997 bp, DROSOPHILA
tttattacatttaaagtgcaaaaggttaatgcgacttggaaacatcttatttcaaaatttggcgcctacttcgatatcgattaccgacagttttctgcggacttcgattgttggactttttagctcatattcgatttcgggccgatgacatcagacgataatcgtatctcatatatcgaagaaatcttgtttatgttttgatttgatataaaaaatataaaaattggcttaggcttgaatgtattaatttaagcatgatttgccgtttgtgcctgaacaacgttaacgatacagatacgattcggatattcgaggacgttggcctttccctaaatgtggccaatgtgctggccaaatacttttggtttgagccaaaaagcgatgatcccatttccacggtgatctgtttgacctgctggaaccaggtgaacgattttcatcaattctatgtggccgtggagagtgcacatcgtttgctcaccgaaaggttctccctgaaatctggccaagatcaggggaaagttgagcacggtgaggactcggagcagcaggaggaggagcaggatgaggaccaggagctgggattacctggaagtgagggtggttcctttaccaacgagcagttcctcaccgaagttattgcgcagcaggagcagcaaacggattccaacccaccaaaggagcagttcatcaaagaagacaatgctactgtcaacgatccagaaacctcagccaccttacccacagagcagcgtagagaaactcgttcgaccgccaaaagcaaagcacatcattcgttgcccccttcaacacctcctgaaaaatcgaattctgtggcgaacaaatccaaagcgaaacgaaccccgtgcaaagcagaaggaactccacagaaaagcaaacgctatgcggactacaagcagtgcatgctggatatcgatgccaagatctctgcccacatgcgactcacctgcgatgtttgtcacgaggggcaggagacctttcttctgctctgcaagcacatgctgcaggagcaccatcgcaaggggtatgctatttgttgcaataagaagttctacaagcgctcctttctcaccgatcatattgatcgacacgccgatccggagaagtttaaatgcacccagtgcgacaaacgatttgccgacaaacagtgcctgaggaaccatgagctgctgaagcaccatccggaggaggagaagacctttatgtgcgaacagtgcccgaaaagatacaccaagcagtatctgttggatcagcatcgcgttatccacaaggagcgcaatgtggtgtgcgatctatgtgagaggagatttcccaaccaatcccttctttgcacgcacgtcaaaatggcgcatggcaactatggtaccatgtgcgacatctgcgcccaggttatacgtggacgagctgccttccagcgacatcagctggagcacgctggtgtcacggagcccaaggttcagtgcgacatctgcggatcctggcataagaacaagcacagtctcaagaagcatgtgcggcgacataatggcactgctgccacttgcgatctgtgtggaaaggtttcgcccaataggagtgccatgctgagtcaccagcgatatgtgcatctcacggataggaagcacgaatgtagtgtgtgcaataaagccttcaaaaaggccatcacactgagggaacacatgaccatgcatacgggcgaggtgctttacaagtgtcctcactgcccgaaaacatttaactccaatgcgaatcagcacacgcatcgtaggaagtgtcatcccaaagagttcgaggaggcaaggaaggcacgcaccgagaaacgaaaagccatcgaggaggagacacccagcgtgttgaccatctcaacgggcgaagatggggaatcccacagcattctgctgacaaataccgaggaggatattaagggagataccatcgagttcactctgtgtctcagtgccgataccacagattga

SEQ ID NO: 37167 - protein, 580 aa, DROSOPHILA
MICRLCLNNVNDTDTIRIFEDVGLSLNVANVLAKYFWFEPKSDDPISTVICLTCWNQVNDFHQFYVAVESAHRLLTERFSLKSGQDQGKVEHGEDSEQQEEEQDEDQELGLPGSEGGSFTNEQFLTEVIAQQEQQTDSNPPKEQFIKEDNATVNDPETSATLPTEQRRETRSTAKSKAHHSLPPSTPPEKSNSVANKSKAKRTPCKAEGTPQKSKRYADYKQCMLDIDAKISAHMRLTCDVCHEGQETFLLLCKHMLQEHHRKGYAICCNKKFYKRSFLTDHIDRHADPEKFKCTQCDKRFADKQCLRNHELLKHHPEEEKTFMCEQCPKRYTKQYLLDQHRVIHKERNVVCDLCERRFPNQSLLCTHVKMAHGNYGTMCDICAQVIRGRAAFQRHQLEHAGVTEPKVQCDICGSWHKNKHSLKKHVRRHNGTAATCDLCGKVSPNRSAMLSHQRYVHLTDRKHECSVCNKAFKKAITLREHMTMHTGEVLYKCPHCPKTFNSNANQHTHRRKCHPKEFEEARKARTEKRKAIEEETPSVLTISTGEDGESHSILLTNTEEDIKGDTIEFTLCLSADTTD

SEQ ID NO: 37168 - DNA, 2324 bp, DROSOPHILA
attttcgccctggataccctgcatcccctctacccccattcctttttctgccagttgtcgacacgctttaagttctttttatattcccagctgttttttttttttttttacattttcttaacccgttttaagcccgcagctgcagtaacaacacggaaagaaaaacaattataaaatcctacctagaaatatctgctattatttaaaaaaataatgtttttaaagaataataagtatcgttctgagaacttaatctgagatcttaacaatatgattgcaacttctaccagcccatatcttttcacttatgtatttctctgagtgtaccagcccggctgcgactggcctcgtttcgcgctccacaaggcggcccgccacttgactgcgatctgcataaacgcagcgccacccagaaaggagtcctccctctctagctgtttctgctccttttcgttctgtcgttgtcacacactttctaggttggcagacaggcagcctttaagcccaaatccccgccgaacgcaaagctttaaagacgggctcaagcactctaatcctgacaaaactggaataagttccatttcgcagtactaagcatttgtaacgcttcatttgtccctgtctccaatcctctgcctgctgtactttgtcttctgttccccgctccttgctccacggataaatatttataattcccagattcattttgccgaagtggactggttttctgtgcagcagcgcggtaaattcgaatcgagcaaatgttgtgccgttaaagttaatgcaattttcaatcgcgttgttaaaatgtaaattttattaaaccatccagacgtgcggctatctccacaccagattcccatgggtgttgggacactggtgcgctggggaaatggagatggagagttgggcttgacctttttacggttccgactgttggccttcttatcggctacgtgcaatagcaaaactcgaaccccaaatgatttgttggccgtactcacaggatatccagcggcaatttgacggaacagtcgcgcaatgtcgcctgatgttgctgctgtctctggtggtattgctgcgtgttgctgctattgctgttgttgccgctggtgttgttgttgccgctgtagtgttgctgatagtgatggtggggatgctgcagcaactgttggtactcgtttggctgggcatgctgctgttgctgctgctgcagctgcagatgttgctgctgggagtgctgctcgttgccattactgctgccgctagtgttgctgctgccgctgctgttgctgctgctcgcacgtcttttggcggcagtcatcagagaggcagctgcgctcggctagagtacgcgttcaatggagcccaaacgatagccgctctcggctgttgcagcagctaattggccagtggacgtgggccagctcgattgcagcaacgtgcaacatgggttgctgccggattgccgtattgcctggttgccgggtggctggtgggcggttagatttatgggccaacccaccgacacaccgacgccgcctcctccacgtcctcctcctggggggaaactgctcttttgtttcgacccttatcgcaggagtccgtttcgagttttttgcgctttaattaaatttcaggcaatcgaggggggctgggattcctttagctctatgcgttcgaggtcactgctcacagaattggaaaggtaacctgtgactgggcgacatattgagcctcatttccgcccgggcaaacaaaacggaagttttctaacatcatcatcatcatcatcatcggtggcaccaggtcctggccttattgttgttctgtaattagatttgttgctgctgctgatgtggctgttgttgctcctttcctgggattaaagccgtaatggcctcttccgatttggctgctgctactgatgttgcccatagccatcgtctattgtctgccaaaacgctttaaaccactgaaaagagtagcaaaacaaagaaatcggttaggcaagtcagggccataaattattgataccatagtacgtatacattaacttttcatcattttttattataaaattatgatgtatattttagcaatagagcaaaaattctttccgaaaaaacaactttcattagaagaggatattcagaaatgcaatacattgaaaacagttttagtaagtagactttgaaaaacacatttgatatctaattttaaatttatatatttttgcaagtactaaacataggtttgaatgcccggaaagcgaaccacctgacaccaaagtgggatccatgcaatgcgtgcggatgaattag

SEQ ID NO: 37169 - DNA, 324 bp, DROSOPHILA
atgactgccgccaaaagacgtgcgagcagcagcaacagcagcggcagcagcaacactagcggcagcagtaatggcaacgagcagcactcccagcagcaacatctgcagctgcagcagcagcaacagcagcatgcccagccaaacgagtaccaacagttgctgcagcatccccaccatcactatcagcaacactacagcggcaacaacaacaccagcggcaacaacagcaatagcagcaacacgcagcaataccaccagagacagcagcaacatcaggcgacattgcgcgactgttccgtcaaattgccgctggatatcctgtga

SEQ ID NO: 37170 - protein, 107 aa, DROSOPHILA
MTAAKRRASSSNSSGSSNTSGSSNGNEQHSQQQHLQLQQQQQQHAQPNEYQQLLQHPHHHYQQHYSGNNNTSGNNSNSSNTQQYHQRQQQHQATLRDCSVKLPLDIL

SEQ ID NO: 37171 - DNA, 2896 bp, DROSOPHILA
ggcggaacgagtccgttgtcgactacggcggggtccttgaatttgccacgttgtataaatagcctcgcaaatgggcggaacgagccgagtaaataaacttaatcaatttcaataagagccaccaggccgtgcaacaagttcataacttttttgtgtttctcaatattgtgtttgttttttgtttttgcttggtcgcctgggcactcaagcgtttcagaattattcacgttgatgaaccgtttgcatttcgcatttggcccggtgggaatatgcatttcgctgaatctttaatgcggccaaaatgcatttgacatatcagatgggagcagatcgagggtttcagtttgaggccaaagtgcacccttgggagctgaatgcattatttatgctgctccacaggataatttgacattttgcgctgagggagctccggagtttcgctggcattagttggccccactgccgccatcagttccatcttaataaatattaataacaacaataatgaagatttatgcgaatcagtgaagtggaagctacgccatctatccgcgcatcaaagtgccaaacaaattgaaactgctgcatcagctgcaagacaagttcacccacccccacatggcccccacttcgttcaccttgggccttgtgtgtggcacatgcaacttccggctcgcagcgaaattgcatcaggccaataacccaattttgtgacactctgcgggctgggcaacaaatacaaggcgaccggaaaagaaacaataataaaacctggcccaaaaagcgattcagttcgggtgttagacgttgccgtttgccaaatgaatttgcaaacatttccgctccggctcccgacatggacacggaaattggctgggacatggccagcgtttcagtttaatttgatagatggccaggcagcaggagttgtagcagtagtaccacgtccatgccggcagacagttaattaataattacggacaggccgagagaaaggcaattaaaaatgtccacacacactcacctctggcgacacaaagtagctgggactcttttcgatggttatctggccacggaacgaatgtggcatcttcttgcggtaccactccagacctttcaggtagttctcgtcccggtcgaagaagtgcacctcaccgccggccttctggatccgcggatgtaggtagagcatctccagcagcgcccgtgtaccacattttcgcacaccgatgatgagtgcctgggtgcggaagtcgagccaaaagaacacgaacatgcaaattgcagcaattagtcgggtcccaaactgactgccacacatactagccatctacatgcggagcaactaaatagttacctagtttgttctactttaaaacatattattgtggcctcattacattatattttagtcttggattggagtaggtacactaattaacaattcctggctattttgcatttaagctatttaagaatttatcaaatttactcaggacttacctgcggcaaccgtcgactggtttttggaaagtgcacacggctggagggaaaaaccatgggatggctgagctgattggagctgggcacgggctttacgaacacgggcagatgattggaggcgccaccggcggaggagaaggaggagccggaattggacgacgatgaggaggaggatgccagagccgatgcggaggcggtcatagatagacgatgcctttcgtggacagcctgggccgcttggatattgtatacggcactatcgtacaggacatggaaggtgaggaacagagagatcaacatgaccgtaaggaagacgacggccaattttggacgggaaacgcccaccaccaggatgcagtccgtgggcgaggtatcaggacccgccggccgcattgccgatttcggtagccatctataagagagagagagagagagagagatagagaggacatcgattaggatttggttttggtttcagctaattagattgccctgccggctgtcctgagtaattaaggctggcggttttccagcacttctgttcaacccactactgttcctcccgttttccggttgcctttagctaaattagcaagacgacactctggacgcagtcctccattttcagccaccacctgaacgctcacgtccggcggcgcttaagcgaattccattataaacgtttccgcttagaccgcaacaaacactggcagcattattatgagcaccacattgcagcacactaggcgtatacgtaacgtggcctaatggatgacttcatttgcagcatgccgcagctgcacggtacgggaatgatgagggtgagcaggtggtccgctatgtcgggcattagcaggtgacagaaggagctgctgccagtctgcggctaagtgcaatttcatatacagagtaggggcgtggtggcaaaggcatagccatagcaaagtgatgtggtggtactggtggggcagggcagggcatggctgggaaacgtgtggcaactggtggcttcgcccctggagtttcctccctgccgccgccagtggctgccagtgcctcatccacttcgcatgcgacacctcgttaaaagtaacgacacactgggctagaggcccgcaaggagtcgaggcacttcactcgacggcgccgtttgcggcgcacggagcaacctcagagcaagaccgaccgacttcctgccattctacataccccccatttctatattttcgccctggataccctgcatcccctctacccccattcctttttctgccagttgtcgacacgctttaagttctttttatattcccagctgttttttttttttttttacattttcttaacccgttttaagcccgcagctgcagtaacaacacggaaagaaaaacaatta

SEQ ID NO: 37172 - DNA, 723 bp, DROSOPHILA
atgcggccggcgggtcctgatacctcgcccacggactgcatcctggtggtgggcgtttcccgtccaaaattggccgtcgtcttccttacggtcatgttgatctctctgttcctcaccttccatgtcctgtacgatagtgccgtatacaatatccaagcggcccaggctgtccacgaaaggcatcgtctatctatgaccgcctccgcatcggctctggcatcctcctcctcatcgtcgtccaattccggctcctccttctcctccgccggtggcgcctccaatcatctgcccgtgttcgtaaagcccgtgcccagctccaatcagctcagccatcccatggtttttccctccagccgtgtgcactttccaaaaaccagtcgacggttgccgcagatggctagtatgtgtggcagtcagtttgggacccgactaattgctgcaatttgcatgttcgtgttcttttggctcgacttccgcacccaggcactcatcatcggtgtgcgaaaatgtggtacacgggcgctgctggagatgctctacctacatccgcggatccagaaggccggcggtgaggtgcacttcttcgaccgggacgagaactacctgaaaggtctggagtggtaccgcaagaagatgccacattcgttccgtggccagataaccatcgaaaagagtcccagctactttgtgtcgccagaggtgagtgtgtgtggacatttttaa

SEQ ID NO: 37173 - protein, 240 aa, DROSOPHILA
MRPAGPDTSPTDCILVVGVSRPKLAVVFLTVMLISLFLTFHVLYDSAVYNIQAAQAVHERHRLSMTASASALASSSSSSSNSGSSFSSAGGASNHLPVFVKPVPSSNQLSHPMVFPSSRVHFPKTSRRLPQMASMCGSQFGTRLIAAICMFVFFWLDFRTQALIIGVRKCGTRALLEMLYLHPRIQKAGGEVHFFDRDENYLKGLEWYRKKMPHSFRGQITIEKSPSYFVSPEVSVCGHF

SEQ ID NO: 37174 - DNA, 3484 bp, DROSOPHILA
atgtaacatacgcaccacttgcattagttcaatcattttcagtattcaagttgcttgaggacctcgagtacccctgatatgtatttatgttgtgtataaactacactatattaaactatactatgctatgataaatgtgatatgtttagttttgtttatgtttctgtacgcacacatttaattcagccgactgttagtctaaatacatttttaattgccacttcactcctaatttccatatctctcactctctctccctccatcaactgcatatatcccacaagcagccatcgcaatcattttcaatttgtcctatgcttacatgctataaaatcacatttagttgcttaattaatttttatcctctcgaacactcccgattcactcactcacacgcaggagagagaatgagtatgtaaaacacaagcagacgtagaaaacgtgtaaccttcgaacatcatgtagatattgcttttcatttcgctatatatatactatatgtatatatgtatatatatatatatacgacatgtatgccccattcatgcacacacattttcatggcctgctgcacagcaaaatgcgtgcagtttattttactatatatattttttttatgcggatccttgttccttcgcttgctctttgctcctgcaaaagcaaatttgcatgtggtgatggtgaattgtgatggggatcggaacgggtggtggcccgggaaaataggaatgcaatttttcaatacgcgcacataattgaactgtcagagtagctcgactcggccaggcagaaatactgcgctccgcctcccgcaaaagtatgcaacggaaaagggcaaatgaaagtcctggataactttgctcgtttttttccatcagccgctcctgcttgtaattaaattggctgcactgtgacccaaacgtttgaccaacagcagatttatggccagccaggacagcgaagagctctccatttgccagtgaatttcgccacgacgagcttactcctccggccagccgagatcctcgccgaccagctcgtaaaatcgctgattgtactcggcgaagaactttcgcaatctggagaccaccacgggatccacatgcggatgcttcctgcccttcgtctcccggaggcagcgatccccgttgtcatagcgcagacagtagaagcccttggtctcattgaagtaaaagtgctcgctattcacccgatgctcaatgcctgaaaacgagaaaaaagaataaataaaattaaattaaattttaagcatttaaaggtatcatttacagttgaataccaaacatagcttcaatcacagagcacacttcaaaagttactcacccaagaaagcctcgatgcgtttcagctgagaaaccggatcttcgatgaggcgatccccattgaccaccagcagctgctcccgcggaaatacctccagccagcgatggaggtggacatggtacatggagatgctgagcggtcgataagcctcgttaacggtgccattgggaaatatggccagctcctcaaaggacctgcgaacggggtgaaaggaggcgagggaatttaaatcttcctttcgacaaggatggcaaattgaattgccagcagctgcaaatgagcagctcccagctccccacttcagccagctctacgaccatgttaaacagagtccttggctcctttggctccgcctgccacacaccctctgtcaacaagtgaggccgcaacaagaaagtttcaccatcggcgcgacagagacagaagcagccagagccaaggacaagagtcgcattttgggcaactttcatttgcagtttgcatttcatttgcatgtcaagcagcggcggaagggggcaaaagggagtgcggacatggagcactgggcacgggcaaatgcctcagttcggttcacttacttggctgccatttgggcggcgctcgccattggcgacattgttgtcgtggtcatcgcagctccagcgacaccaccgccactgcccaacgcctgtctcctgaccaaagacgaagataccgttttgcctttcgtctccttggcgcccgccccactgccacccaacagggcattgtcatagccacgggccgactgcagtttggcatacagcagtgattgtgttggcatcttggcagctgcggtcccgcttcccccaccaccaccagcaccaccaccacctgccccaccgccagaactctccctcggactcggtggatccttctcggccaacggcagaatggcggtggccgcatggctacgcagctgcgtgtagtccgaaatggcccgggtcaccggctcccggacaatcaggagcagcttgatgctcgcattcatggcccgcacacgttccggcacctgaaatatatgaaaagttaagaaacacatttacccagcattttaaaatatttaatgaaaggaaaatatgcaggtaagttcactggacggaaaaatctgttgagttccatataaaatgtttaccatcgtggaacaatcgattaaaataattcttgtctaattagttatgcacgctttatccagcatagctaatcattcaagagtattaaatttttcagctaatataaaattaaaaataagccaataagcggggaaaacttattatctgtatttaaccaaaaccaatagttttttttcctattattttatgcaaatattaaagcaacctatcatttatggaacaaaaacacaatataaaagaaaattgcacgcggtaaaaagcgcatgaaaaagaatataattaagttggcagcttgaacggaaaaacgatgtttaatcaaaataaatagtgtgtgctttaacttttaaagaaataaaatggttcatctttcttgcagctggaaatatgaatgatgctttttttagtgcagttcttttcgatattttctcaaggtgtgtaaaattggcatttgatgctgtgccttcgccttctgttccaattaatgaatttatgccggatacctaccaacaatcgataataattgcaaactctggctgctacattttcagaggagcatggtcgccccccccccctttttgttggctttaatttgcagccttttgtggcagccacgcccaaccgtcgccgttcccctgtccgcctcctgctgctgcacttccgcagcaagtgtgctgtgaacaatttaattaagccggaaaatattgccgtacaatgttggcggaacgagtccgttgtcgactacggcggggtccttgaatttgccacgttgtataaatagcctcgcaaatgggcggaacgagccgagtaaataaacttaatcaatttcaataagagccaccaggccgtgcaacaagttcataacttttttgtgtttctcaatattgtgtttgttttttgtttttgcttggtcgcctgggcactcaagcgtttcagaattattcacgttgatgaaccgtttgcatttcgcatttggcccggtgggaatatgc

SEQ ID NO: 37175 - DNA, 897 bp, DROSOPHILA
atggaactcaacagatttttccgtccagtgccggaacgtgtgcgggccatgaatgcgagcatcaagctgctcctgattgtccgggagccggtgacccgggccatttcggactacacgcagctgcgtagccatgcggccaccgccattctgccgttggccgagaaggatccaccgagtccgagggagagttctggcggtggggcaggtggtggtggtgctggtggtggtgggggaagcgggaccgcagctgccaagatgccaacacaatcactgctgtatgccaaactgcagtcggcccgtggctatgacaatgccctgttgggtggcagtggggcgggcgccaaggagacgaaaggcaaaacggtatcttcgtctttggtcaggagacaggcgttgggcagtggcggtggtgtcgctggagctgcgatgaccacgacaacaatgtcgccaatggcgagcgccgcccaaatggcagccaagtcctttgaggagctggccatatttcccaatggcaccgttaacgaggcttatcgaccgctcagcatctccatgtaccatgtccacctccatcgctggctggaggtatttccgcgggagcagctgctggtggtcaatggggatcgcctcatcgaagatccggtttctcagctgaaacgcatcgaggctttcttgggcattgagcatcgggtgaatagcgagcacttttacttcaatgagaccaagggcttctactgtctgcgctatgacaacggggatcgctgcctccgggagacgaagggcaggaagcatccgcatgtggatcccgtggtggtctccagattgcgaaagttcttcgccgagtacaatcagcgattttacgagctggtcggcgaggatctcggctggccggaggagtaa

SEQ ID NO: 37176 - protein, 298 aa, DROSOPHILA
MELNRFFRPVPERVRAMNASIKLLLIVREPVTRAISDYTQLRSHAATAILPLAEKDPPSPRESSGGGAGGGGAGGGGGSGTAAAKMPTQSLLYAKLQSARGYDNALLGGSGAGAKETKGKTVSSSLVRRQALGSGGGVAGAAMTTTTMSPMASAAQMAAKSFEELAIFPNGTVNEAYRPLSISMYHVHLHRWLEVFPREQLLVVNGDRLIEDPVSQLKRIEAFLGIEHRVNSEHFYFNETKGFYCLRYDNGDRCLRETKGRKHPHVDPVVVSRLRKFFAEYNQRFYELVGEDLGWPEE

SEQ ID NO: 37177 - DNA, 3915 bp, DROSOPHILA
gctgcaggtaactcacgcgagaatcgctccacgtcgtcccaattaacattttaacgttagtattctgtctctgtttctgttactccgtgcatgtgttcaaacacaacagtcaccactgatcctgatccagaacctgacactcagcctgaacccgaattcccatccgaacctacatcccagtcccaaccctcaaccgaagaaacagatgacgatgcagaggatagttgcagctccagtggcagtaatcaaaccgggataactgtctaccaggccgatgaaacccagccagatacccaagctgaacagatccttgagattgccgccacgttaactgattcacatctatccaactatcccactgttgacaccctaactcctgccacctcctccgaagacatattctatagccctattggtgtgtgctcttccatcttagtctcttctgcttgctaacttgccgacataatatttttaagcatttttaatatcttaaatacttatcattccccatttaggttcacccacttgcttcaatactagcctaggaacccaggctctcctcaagagggccagcattcaatccgtcctgggcaagtaattaaagagcattacctgtttgtaaactggctaatatcactgtgttcctcagcccactccacgcccacgacggagatgagggatcaacccattgaagaggcaaacaactcggtgccccaaacacctgagaccgagaaaactcagccccaaactcccaaggaagtccataatcagaatcagcagcaaaatcaacagcagcgccaacgcaatcatccccaccaacgttatcgtggacgcaatcggcgctagtccttggaaggatatccttgtcatatcgtttgaatttcctcctagccagctagccgttcttctattttttttacattcccatattgttagtgaatactgcgagtaaatctctgaacttaaccgatagtctgtacttgagcttaggataaacatatcacattaagtcaccgactggttccaatttaaagcgaatgtcaccgcagggtgataagataatggtgctttcatattcaatcggagtttcgggcagccagctgaccttgtagcttcgcaagagtcgcaccagcagcgtttcgatctccagctcggcaatccttttgccaatacaggttcgaggtccaaagccaaagggcaggtatacgaaggggttacgggttcgggccgctggacaagcctggatatccggagctaagtcggacttaagccagcgttccggtatgaactcagagctctgagcaaagtatttatcgtcgttggacagctccaggacacccatcagaactccagtgccacgtggcacctgatagcccgatagcactagatccttgggtgttatgcgaaaatttcccggcgtaatagatgtgatgcgcagaccctccttgatgcaggctctcagataaggcatgtttttggtattttgatccgtcaacgagtccttggtggtgggcaatatacggagtagctcccgacgcagtttctcttgctttgatggattgcgagccaagtgatagaggatagtcagacaagctgatgaagtctaaaagaaggcatttagtattgaatcgtaccaaatatattaataatcataccgtatcaattccagccataagcatgtccataaccattgtcacagccaccttcttgttgtgttccagcaattgctccagaacgcattttgtcttaccgtcatcatttttaccaaagcctctcattgccgtctctatataatttgaggtaatatcggtaatattgtcgtaggttttgagaaacttcttgaagccagcggttttataaaaagtccaaatggagggctgcacatcgaactggaagctatagttaaaaaaatccctcatatgtttagccagacgatccgcattaggatctggattatcactaagcaatcccatgcgggtgttcagagccacaaagctaatcgactcgaaggcccacatcttcagctgattgtgaaagtcagtagtgagagtgtgggtctctggatttctttgggtttccaatctaaaaaggaaaaaatgcctttacctcaaatagtgttaatatatgtttgtaactcctacttgtctataaactccttagatatctgatctagttgtggtagattttgccggacattctgaactttcataagaacgggattcaccttgttgcgaatatcagcccattcctgaccctgactaaaaatataacgttttaaagatattatctgtaagatatatatgttgtgtagcttactcagatgccagaccgccaacacctttaaagacatcaggtctgtgtatcttgcgatagtagttcaagctctccagaccgatgcgaatgggccaaacaccctcgttgcggtaggtcatttcgaagtcgtctgggttgtaagtgaagactgcgttcggtttacccatcattccgggaatgcagtatatatcgccgtacatttctctcatcaggcggttcatttgaatcaagtttgtgttgcgaagtgctcctagagtgggagagttattaccttcttatatgatataaaatcttaaactaaatagtttaccgcctggcataaaaaaggatagcattcgcaggaggctgggacccggaatttctccaaacgacctggcctgttgccatttctcatctatgcgagagtccgcaagttccaactgggtctgcgaacagatatagccattgtttgtaaacaaatttctgctctttaaaagctcttgctctttttgccaacttcttacctgctgactgagtgtgccaccaacagatgagttcctattaaaccacagctgattgcccgatacgttccggtagataattttgttagaatatttccacattctaagtccctttgattggcaactgctttaaattggtatatattatttatatactatacaaaagcatataattggaaattaaacggggctgggcttgactgcaaccggtggcgagaatttgccaactgaaactgaatctagagaagaaagtatcacgccgatgaagctttttctctagaaattagaattccagcttttccgtacactgcaaacataaggtttaagtttacatcaaaattatttaaactgattatatcaagtttttcttcataatctgttgtatatggccttcattctatttcatctgaaatttatgtatcttactgtaaatttacacaggtttgtgtccaaaagttgagcaagctttctacccaaaactttacatgtgtgtaaaatgtataagtccaatgtctcagaaattaagatacaaactccaacatattttccgtttttcgaattacatttatttattgcatgcgtaaaattttccatagcataaaatgttgattcttgttggttttcttacaatttgttgaattcatatacgattttgtttcgttattagttggtttatttttgtttatttttttttgtaatttttgaatattttgtatatgtatgtacattgaaagtttgaataagttgtaagagttgagttatcattagagtttaagttaaagttaaagaaatagagagttgatttttaaggtacattatagttgttgagttttgcacgttcaatttaagtagacaatacatcaataatatcaattatatcaatatatcaatatcaatggaggatctagagttgagttaaacttttgatatgtatttcgtatgcaattggcttagttgaagttagaggacaaaatgtgactacaaattgctctttgagtatattaataaataatttcgcattactataatatattttaaaacggaaattgtttccatttcggttatctttcctggatttcggttaatgtacttttcccatctg

SEQ ID NO: 37178 - DNA, 1686 bp, DROSOPHILA
atgtggaaatattctaacaaaattatctaccggaacgtatcgggcaatcagctgtggtttaataggaactcatctgttggtggcacactcagtcagcaggtaagaagttggcaaaaagagcaagagcttttaaagagcagaaatttgtttacaaacaatggctatatctgttcgcagacccagttggaacttgcggactctcgcatagatgagaaatggcaacaggccaggtcgtttggagaaattccgggtcccagcctcctgcgaatgctatccttttttatgccaggcggagcacttcgcaacacaaacttgattcaaatgaaccgcctgatgagagaaatgtacggcgatatatactgcattcccggaatgatgggtaaaccgaacgcagtcttcacttacaacccagacgacttcgaaatgacctaccgcaacgagggtgtttggcccattcgcatcggtctggagagcttgaactactatcgcaagatacacagacctgatgtctttaaaggtgttggcggtctggcatctgatcagggtcaggaatgggctgatattcgcaacaaggtgaatcccgttcttatgaaagttcagaatgtccggcaaaatctaccacaactagatcagatatctaaggagtttatagacaaattggaaacccaaagaaatccagagacccacactctcactactgactttcacaatcagctgaagatgtgggccttcgagtcgattagctttgtggctctgaacacccgcatgggattgcttagtgataatccagatcctaatgcggatcgtctggctaaacatatgagggatttttttaactatagcttccagttcgatgtgcagccctccatttggactttttataaaaccgctggcttcaagaagtttctcaaaacctacgacaatattaccgatattacctcaaattatatagagacggcaatgagaggctttggtaaaaatgatgacggtaagacaaaatgcgttctggagcaattgctggaacacaacaagaaggtggctgtgacaatggttatggacatgcttatggctggaattgatacgacttcatcagcttgtctgactatcctctatcacttggctcgcaatccatcaaagcaagagaaactgcgtcgggagctactccgtatattgcccaccaccaaggactcgttgacggatcaaaataccaaaaacatgccttatctgagagcctgcatcaaggagggtctgcgcatcacatctattacgccgggaaattttcgcataacacccaaggatctagtgctatcgggctatcaggtgccacgtggcactggagttctgatgggtgtcctggagctgtccaacgacgataaatactttgctcagagctctgagttcataccggaacgctggcttaagtccgacttagctccggatatccaggcttgtccagcggcccgaacccgtaaccccttcgtatacctgccctttggctttggacctcgaacctgtattggcaaaaggattgccgagctggagatcgaaacgctgctggtgcgactcttgcgaagctacaaggtcagctggctgcccgaaactccgattgaatatgaaagcaccattatcttatcaccctgcggtgacattcgctttaaattggaaccagtcggtgacttaatgtga

SEQ ID NO: 37179 - protein, 561 aa, DROSOPHILA
MWKYSNKIIYRNVSGNQLWFNRNSSVGGTLSQQVRSWQKEQELLKSRNLFTNNGYICSQTQLELADSRIDEKWQQARSFGEIPGPSLLRMLSFFMPGGALRNTNLIQMNRLMREMYGDIYCIPGMMGKPNAVFTYNPDDFEMTYRNEGVWPIRIGLESLNYYRKIHRPDVFKGVGGLASDQGQEWADIRNKVNPVLMKVQNVRQNLPQLDQISKEFIDKLETQRNPETHTLTTDFHNQLKMWAFESISFVALNTRMGLLSDNPDPNADRLAKHMRDFFNYSFQFDVQPSIWTFYKTAGFKKFLKTYDNITDITSNYIETAMRGFGKNDDGKTKCVLEQLLEHNKKVAVTMVMDMLMAGIDTTSSACLTILYHLARNPSKQEKLRRELLRILPTTKDSLTDQNTKNMPYLRACIKEGLRITSITPGNFRITPKDLVLSGYQVPRGTGVLMGVLELSNDDKYFAQSSEFIPERWLKSDLAPDIQACPAARTRNPFVYLPFGFGPRTCIGKRIAELEIETLLVRLLRSYKVSWLPETPIEYESTIILSPCGDIRFKLEPVGDLM

SEQ ID NO: 37180 - DNA, 7681 bp, DROSOPHILA
tgtatgtatataaaaactttgttgttgctctttttgtggggtataaaatagttcaactatctaaaatgtatcaaatcgatcaatcggagtgggttacatagaaattaatttatatttatttgtatagctgggccggggccttttaagagctgattatcctagacaaagttaataattatatgttttagaaaatgttttgaacaatctttccgagtgaaataattacaatcaatttggttaggataaggcttaattaggtatatatgtaaaggtatataatgaaaaagcgtccttaaacgagtcgagtgcaatcgagtggtaaattgtaaatggagtttgggggaaacttctgtgcggtacggagcttccgtggtttaagtcacattaagtagtaagcctagttgcaaaattctttgaaaatatcacaaattgaaatacacaataaataattaatcgcatttggattcgcgcaaaaaggaatctggtagttagcaatttgagttttggtaaatattcgaatagatctttgagagaggttaccttaggtacatgcaatgtttcaatagattcctatttatatccgctatcattgtgtatgtacataatcgctttgtgtaaatagtttgagttctgcgcacatttacattaatattctcattttctgtgtatatatatatatataattatattaaaataagtaaagcaattttgtgctgcataattgagtcaaggtgaattgcgtgtgttgtttccttctatgggtggaactggttgacttcgattcttaactagctaactaactttggtgtctaattgaattcgctatggctcagactgaggctcttggcctggccaaacttgtgcttcaactggctggtgttggcccggaagcgctgcatcaactgctgctgccttccgccgtatccggatcccgatccgcttcctcctgctgctcctcctagtgcgctggactgcagcggcgaaagggacgccattgccgcatcagcgctggttatggactatgatcctttcagtttcttcttgggattgttgcgcgtctgatcggtgggtgccgatggtggcagctctcgatattgattctgcaataaatattattattatttatagcaaatgcagctagttaaaagaccacttacaatctcctcattatctggcactcgcgagaggaagtccaatagctcgttgttgggaatggtattgggtctcagcaaacgtctggagaacttcatcaggccccaaaagagcagcagccagcggagcgggacaaaatgcaagaccagaatggcgcccaatagcaaaaccacagccagccaggtcagttcggggacggaaaagttgaatgtgctggtgattacaaagtgttcatatagactgtgatgcatctcataaataacaataaagtttacttaatggtgctctcgcctaaagaagccaggtagccgatggtattctgtaccgtttgggagacttcttgaatggcctgtaatctctccttgatggacttcttttcctccttctccttgtcatcatcatcatcttcatcgtactcatagtcgtagtgagcagctgcatctgtggtgcccgttataaggcgaaccagccagtttctaaattaaaattgttgagtatttggatctctctgaatctcttacttaattacttacttaagtatgatgagcagtagaactagaggtactgtctccagatcgccgtagacacaggcgactatccaaaagacgaaagctatgctggatcgcacaggagattcccactcgaaacagctcctttaaaaaaacaggcagtgaattataaagaaattgtaattggaaccctatacactcactggacatagcgcgctgcatctaggatatccatgattatctccttgagtctattgacgttgcgcaggaagagctgtcgcttgaacttggcctcctgctggatgagcttttcctccttgggctgcagggctcgacacacggcacggatctcgctccagactaccgtcagttccagctgaatttgcggtgagtttcctttggcccgcacacagagattcttgtccttcagcgtataccatcgcttgactccacttttgatccttaggaggggaatgactagcttgcccaggaactctacgcgatggtcgcgatcctcatcgaaaacggtgatctccaggacctgcgtgatgtctttaacattgctacaaagcgaattaaataattttttttagcaatatatagcatttaaaagtaggttagctttacttacaaagtaaatatcttattccaattaggagtgagtgttttatactcagtttgggtttgcagtcgggcgttacccagttccaatacacaaaaaggatcggattttccacctatatccgctgcagccagtccagtggctccaaagacctttacagttaggtgacccacatcgcggaggttttggaggcatcttaggaatttatatctttcccttagcaattgagcctctcgaggatcctccttgaaggccttcagatcgctgatcgtctccaaggcagtggttccacttatagtgagcataaggtggacctcaccagggcaatcttccagaggtttccaaatgccatgcgtgttttcgcgctgaaaaacgctgaggtcaataatggctttgccatagagggtgttccggttccaaagtgcgatctccaggttttgatcttcatcaaacaggtgcaagtcgaactgctccagccagcgttccgtccaggaagacttgctcttgtacttctcattgcccaatctgaaatcaatagtaatcaattacctttatgatatcactaccagttaatagttatcaacttacctgaatttgaagtgagtatcattcagcttgctgccatcttcagctaagggcaaatccttggctttaaccagcaatatggtaaccactgagctccagatctgtgacttcaatcgcttcgatgactcagccagtttcgagttgcgctggaaatgctgcaagacatccggaaaataagactcggccacctccatgagatcgtcgcatccctgctccagctgctcccgcaactcctcgtgctgccgcctcacatgtttgagcaccatgcgaggagcccgcttgcaaccgggccaactgttgcccaacatgatccgcgctcgagagccccaactaatgcagacagcaaattacacaggccccaatacaaaacccaaaagccgcacttcgctttcgaagctccaacggtgactaaaaccatttgggagtgaggtcttgcgattgcgagagaaatatgtacatacatacactaagtgcaatattacgaggtatgccggactagagataattgctcttacatatcattatgagtcacctttacacatgtctgctaatacagagtaataggtatcacattacagaaagcatttaataattgatacggatcagcattactcatttaattagtttttgcactaaaaagagtatcaaatatatttctatgtaaatattattccaattaaatcaattgctttgtttattatattatttgattacattattgtttctattcccacagttagcattatcttttgtatattccatattgagttttcaaaatttttggccatagggtatttaaaaatcgacgttcgcatgttttttttttcgaaacgggaaaatacacagcccccctttgtcatttatttgttttggagcgccctcgttgagagataacatgcaataccaatggcagctcaagcttttatttgttgagccactgcgatcgtgactctcacctcatgaaagctagtcatgatgagttggaaaacggctcaattgtgcggctttagttcgtgttagttgcgggcactggatcaaagttaatgcttcgtgtgtgtctatccaaaaaataaaactagaagccatgtccaactgattccgccataaataacttaagtaggtaagcaagcgcttataaataaaagttgggtttttggtcggagctagtcgagaggcaattaagggtgccagacaaaaggtagcgagacaatcgcttggctcactgtggataaccgccgggtgaagggctgattgatggcccagacgagaatcccccccaccattagcgcttccgaacaatagagtatatggatttatcgatgccacttaccatttccttgtcctcctgactgcgcggccacagcgtcaaattgatgagtatctcgcccaagccacttccgccgtttccgctggaatcgcacagctgcaggtggatgtcctcggccttgcccaattccaattgggttaagtctagcttggccgagcccataaaatcgtcctgcagtccccaatcgtagtcgaaaacctgattggaaagcgtatcgaacgagacaaaacggaaattcattttgattagatgagatggggcttttgggaattcgcttcagattgtggatccgacacttcaaaaactattcgttgcctggctgaaaatggatttgtgcaataaaaaagtttccttctggcagcggtgggattcgaacccacgcctccgaggagactggtgccttaaaccagcgccttagaccgctcggccacgctaccatgctatcgtccggcgtccgatttcttaacgcatattgctgtccttatctacgcaaaaactaattttgacagcactaagaactttaagaactctaagaaaccccatttaatatcatatcatcacaaaagttagatgaagacttttaattatgttttggacactgcaatagcgagcaaaataggacaaagttcaactgagcattatacatttgaagaatgaatcaaacagggaaatgaatgtccaactaaattctctatattttttcttataaatagtaattatctagtatctttcgtttttaccgatataaaagaactacggttaagtcataaacaaattttttagaacatatatatgttacatgccactcttccttatattacagtgccacaacaactgattccatttattcaccaaaatttctctttgtgtaaaacagtgccacaacaactgattccatttattcaccaaaatttctctttgtgtaaaacaatgcccaacttttctgaagcgcctgacaggtcacccccaaaacttccccggactcaccttgacgataatcggctggaaggggtcctcgatgggcacgatgaagacctcgtcccatacgggattcaggtcccggtgaatggtgcgcgacttgtggaggagacggccaccgaccttgaacttgacataaggatcactcagtcctgcggcagggacgaaagacaaaagaaatttctcgctgcagtgccagtgcattgtgaccagtgcttgattaagcacaaagaagtgggcaggataatggtaatggtatgggtatggtgatggtaatggtaatggtaatggtgatgggcacagggcaaggatttgggtgctgggatgtgctcaccattcttgtccatggccaccaggtcactgccggatttgagatgcacgcgcagctgaaagaagacgaattgacgtaattgggcttcgcgcttgcgacgcagttcgttggcctgatcgattgcagttgcgttttcatttgcattaatcagttagttagagttgtgcagcacagcaagtcgttggcaaagcaataatcgaaaatttaaaaaaaaaaaaattccagaaaatttcagttagtgccattgcgtaaaagaaaaggcgataaattcaagtgaaaaccaattgataaaaggagtgaagcaaagtaagagatgccagatgataccaccaacctgcagggcctccagttgctgttgagtgctcaattccggtggactacagccagctgaaccgttctccggatgctcatctatcctgccctccatggaacccccgaatctttggataacctgcgccatcttcgccgtggctcgaaattccctggccagtggtgagccaccaatggttgtgctgcgatgccgtggactgtgcgtcacggaactgccttcggaactataatccgccgcatagtcggtgctttcttcgagaaaatcactgggcgacttgcgacccaaacgatctttgctcttcgcgcgactccagcgatgtcgaagattgttgaagaatccgtgcgtcttctgcagcacgcccacgccactggccacgccccccgaactgactccggccaactgctgggccacggcactcttggccctcttcggtgatatgtgcggtgattcactgagatggcaatcgtgaccattcaactccgaggcagatttgctgagatgcttgcccaggcgctgcgattgctgcagacttggcgaaccatgtggtgatatttggagcggcggtgtggatccactgacggtggagctgctgcccggttgctgctgttgatccaactccacctgatccacctggtcaacgtattggatgcgtgctgaaagtaggtggaaagatggcagaaggggtaagtgttatttcacctaacacgcaactcccacaatcgatttaacaaaattccagcgaccgattgataaatcaagtactacgaaaatcaacactcatacatatttaccgcccaatgcaataatcgcggaaaattgaatggtttcaggcgattcaattgccatccatgacatcactgctcttttgcgattgtcttaattataaaaattacacagagcaattggaaaatggtatgattctttccatttgttgatgtggtcatcaaaaagtagaaaattagccgctacttatgtataatacctaaattgctcatacgtactatgcaagttttacaacccgaaaagtttgacatttgtgtttacataaatgccagtcattcgaaatttaagcttttatacttttaatattattcacataaactgcaccgcatcgtaaaaacttttatgggtcaatgagaaaaatgtagttttaagtatattttgaattttatttaatttaccacctactacaataaaaactaaatttatagagtgccaacttttgacactttgatttgaataaatgtgaacttggatgtctaataaacttgaaaaataatggtcgctgcacttagagaaggggatttttgtccaaattgctaaatctctcgacttcgtgataaatcattgcttattttgctgccatttctcagtttccacacgcattccgcagaaaagtgacagccagttgggttctatcaagctacatatatgcattatgaacgaatctcgttatatctatctttgctatatacactgggtgtcccacaatctacctgtaactgggaatattttattaattctgtggcacaacacagaggcttgtggcctctccgagttcttcgaggacttgaaagagttcgcgagatgcagcggttgcatgacatggccaatacccgcgagcatgggttaaattgaaatgaataattgactagagcactttttgattgcgttagctgcactttgaggtacgtgttattttatttatttatggtggatatatcagcacgacacaaaagcttagtgaatgtatcagattttgcagaaatgtgatgcgaccagaggattttcacgcgattttccaatgcggagcatggagcgaactgcacgctggcagtgcccctag

SEQ ID NO: 37181 - DNA, 2971 bp, DROSOPHILA
atggcaattgaatcgcctgaaaccattcaattttccgcgattattgcattgggcgcacgcatccaatacgttgaccaggtggatcaggtggagttggatcaacagcagcaaccgggcagcagctccaccgtcagtggatccacaccgccgctccaaatatcaccacatggttcgccaagtctgcagcaatcgcagcgcctgggcaagcatctcagcaaatctgcctcggagttgaatggtcacgattgccatctcagtgaatcaccgcacatatcaccgaagagggccaagagtgccgtggcccagcagttggccggagtcagttcggggggcgtggccagtggcgtgggcgtgctgcagaagacgcacggattcttcaacaatcttcgacatcgctggagtcgcgcgaagagcaaagatcgtttgggtcgcaagtcgcccagtgattttctcgaagaaagcaccgactatgcggcggattatagttccgaaggcagttccgtgacgcacagtccacggcatcgcagcacaaccattggtggctcaccactggccagggaatttcgagccacggcgaagatggcgcaggttatccaaagattcgggggttccatggagggcaggatagatgagcatccggagaacggttcagctggctgtagtccaccggaattgagcactcaacagcaactggaggccctgcaggccaacgaactgcgtcgcaagcgcgaagcccaattacgtcaattcgtcttctttcagctgcgcgtgcatctcaaatccggcagtgacctggtggccatggacaagaatggactgagtgatccttatgtcaagttcaaggtcggtggccgtctcctccacaagtcgcgcaccattcaccgggacctgaatcccgtatgggacgaggtcttcatcgtgcccatcgaggaccccttccagccgattatcgtcaaggttttcgactacgattggggactgcaggacgattttatgggctcggccaagctagacttaacccaattggaattgggcaaggccgaggacatccacctgcagctgtgcgattccagcggaaacggcggaagtggcttgggcgagatactcatcaatttgacgctgtggccgcgcagtcaggaggacaaggaaatgacatgtgtaaaggtgactcataatgatatttggggctctcgagcgcggatcatgttgggcaacagttggcccggttgcaagcgggctcctcgcatggtgctcaaacatgtgaggcggcagcacgaggagttgcgggagcagctggagcagggatgcgacgatctcatggaggtggccgagtcttattttccggatgtcttgcagcatttccagcgcaactcgaaactggctgagtcatcgaagcgattgaagtcacagatctggagctcagtggttaccatattgctggttaaagccaaggatttgcccttagctgaagatggcagcaagctgaatgatactcacttcaaattcagattgggcaatgagaagtacaagagcaagtcttcctggacggaacgctggctggagcagttcgacttgcacctgtttgatgaagatcaaaacctggagatcgcactttggaaccggaacaccctctatggcaaagccattattgacctcagcgtttttcagcgcgaaaacacgcatggcatttggaaacctctggaagattgccctggtgaggtccaccttatgctcactataagtggaaccactgccttggagacgatcagcgatctgaaggccttcaaggaggatcctcgagaggctcaattgctaagggaaagatataaattcctaagatgcctccaaaacctccgcgatgtgggtcacctaactgtaaaggtctttggagccactggactggctgcagcggatataggtggaaaatccgatcctttttgtgtattggaactgggtaacgcccgactgcaaacccaaactgacaatgttaaagacatcacgcaggtcctggagatcaccgttttcgatgaggatcgcgaccatcgcgtagagttcctgggcaagctagtcattcccctcctaaggatcaaaagtggagtcaagcgatggtatacgctgaaggacaagaatctctgtgtgcgggccaaaggaaactcaccgcaaattcagctggaactgacggtagtctggagcgagatccgtgccgtgtgtcgagccctgcagcccaaggaggaaaagctcatccagcaggaggccaagttcaagcgacagctcttcctgcgcaacgtcaatagactcaaggagataatcatggatatcctagatgcagcgcgctatgtccagagctgtttcgagtgggaatctcctgtgcgatccagcatagctttcgtcttttggatagtcgcctgtgtctacggcgatctggagacagtacctctagttctactgctcatcatacttaaaaactggctggttcgccttataacgggcaccacagatgcagctgctcactacgactatgagtacgatgaagatgatgatgatgacaaggagaaggaggaaaagaagtccatcaaggagagattacaggccattcaagaagtctcccaaacggtacagaataccatcggctacctggcttctttaggcgagagcaccattaacacattcaacttttccgtccccgaactgacctggctggctgtggttttgctattgggcgccattctggtcttgcattttgtcccgctccgctggctgctgctcttttggggcctgatgaagttctccagacgtttgctgagacccaataccattcccaacaacgagctattggacttcctctcgcgagtgccagataatgaggagattaatcaatatcgagagctgccaccatcggcacccaccgatcagacgcgcaacaatcccaagaagaaactgaaaggatcatagtccataaccagcgctgatg

SEQ ID NO: 37182 - protein, 983 aa, DROSOPHILA
MAIESPETIQFSAIIALGARIQYVDQVDQVELDQQQQPGSSSTVSGSTPPLQISPHGSPSLQQSQRLGKHLSKSASELNGHDCHLSESPHISPKRAKSAVAQQLAGVSSGGVASGVGVLQKTHGFFNNLRHRWSRAKSKDRLGRKSPSDFLEESTDYAADYSSEGSSVTHSPRHRSTTIGGSPLAREFRATAKMAQVIQRFGGSMEGRIDEHPENGSAGCSPPELSTQQQLEALQANELRRKREAQLRQFVFFQLRVHLKSGSDLVAMDKNGLSDPYVKFKVGGRLLHKSRTIHRDLNPVWDEVFIVPIEDPFQPIIVKVFDYDWGLQDDFMGSAKLDLTQLELGKAEDIHLQLCDSSGNGGSGLGEILINLTLWPRSQEDKEMTCVKVTHNDIWGSRARIMLGNSWPGCKRAPRMVLKHVRRQHEELREQLEQGCDDLMEVAESYFPDVLQHFQRNSKLAESSKRLKSQIWSSVVTILLVKAKDLPLAEDGSKLNDTHFKFRLGNEKYKSKSSWTERWLEQFDLHLFDEDQNLEIALWNRNTLYGKAIIDLSVFQRENTHGIWKPLEDCPGEVHLMLTISGTTALETISDLKAFKEDPREAQLLRERYKFLRCLQNLRDVGHLTVKVFGATGLAAADIGGKSDPFCVLELGNARLQTQTDNVKDITQVLEITVFDEDRDHRVEFLGKLVIPLLRIKSGVKRWYTLKDKNLCVRAKGNSPQIQLELTVVWSEIRAVCRALQPKEEKLIQQEAKFKRQLFLRNVNRLKEIIMDILDAARYVQSCFEWESPVRSSIAFVFWIVACVYGDLETVPLVLLLIILKNWLVRLITGTTDAAAHYDYEYDEDDDDDKEKEEKKSIKERLQAIQEVSQTVQNTIGYLASLGESTINTFNFSVPELTWLAVVLLLGAILVLHFVPLRWLLLFWGLMKFSRRLLRPNTIPNNELLDFLSRVPDNEEINQYRELPPSAPTDQTRNNPKKKLKGS

SEQ ID NO: 37183 - DNA, 6792 bp, DROSOPHILA
caattttatgagcatactggcacccctgatagtaggactaatagtctgggatgaggtaggaaatgcgaccttttaatctttaatggttttttaaatgattttcgttatcctttccagacaaatccggcgcaatggcgaattgtattcttcttcaccgcgtttgtttacttcattgggaatctactgtttatgcttttcggacgcacaagggttcaaccgtggaatagtcgccccacaacgagaactccgtcgcctggaggtggtggagagcgggatgaaggtactgaggatcgaggtccgctcattggcgcataagaaataacaaaaaacgtggcctaaggattggttgtagatgtgaaacatttgtaccttgaaggcgaagcattccttggaattgatgaatcgcaattagtatcgtattactagttatacacgcaacacacatttatgtctacatatatgcgaaatatatatacatatatatacaatttacgtataaagcattgaagcactcatagttttaatttttcgtttcgtttttattggtatttgtatttgcattgtttgtacacaatgatgtacatatggtagacttatatgctggctatgtggtatcctgacgtaatgctatctctaaggtctacatactaatggttctaactggaaatatcaagggttttcaaaagagcgctcaatgcaggtaaagtttcttaatagaaatttcatttgtggttattgttatcttattcaaaattcgttttaaaaaaatgtatggaattatcttcactcttcgatatttcattattcttttaaagtgcttatttttaacatatttttaattaaagctaagtaattacagcggatacggttttgtattttgggccaatgcagctggaggagctatcctccatcgtcctggaccccgtgaaccccatccgtatcccctctgcccctatgtacatgatgaatcttttcaatttccgctgccggaggagtgtgctcagtgcagtttgtgattggcgggcagatcttcggaacggatgcatcgtccgcggtagcagatctccgtttcggaggtgactttggtcgacgtggacgtggcgtacaccacatgctccatcagatccttgtggaagctgtcctttttgctctccgccacggtggcttccgtggtgatggcttcatccgtgggcgctaaagtcgttgtttccgggggagtgactggactggttcgtcggatgcttgtgtactcctggcgacgcttgcctacggccgctagagcggcggtcactgcttctccttcactttcctctatggcaaacagatcgtgcagttgcttcttcacctcggagaagatgctcggttgcacttccagatcgtccacatccgctgccgtgtccatgcggcgtgtggcgctctcctcgctcaagggaagaatggaggtaatggtggcctcctcaacgtcttgggcagtggtgacctcatactcctcgggcgtcgtgggggctgccactgtggtagtcacaaccaaaggctctgtctgggcttcggtggatggagttaatggagtggtggtcttgggtagctcctccttttcgctggctgcttgaagagcattgtagagctgaggtcctagattctgggactcagccgtctcgaaattttccgagttatccgagccagataagcggttctttttctgccacttgccacgtctgtttaggcgactaaaagtagtgctggtggtttcagtggtcgactcctcgggagctttgcccatcacttcctctaaaagctcggcaaaggatttctctggcctataaatatgtatttagtgtattgttcgatatataaagcaacagttcttacttcagattgggcgccataatagtggtgcgctgaaccgacgatccaccaagatcagcagcaacattaatatcataggtctctggttgattggttggtcctgcggtcacaatctccggttcactctcgaagttatgggtttccgttttgtatttgggactcaatggcttgaagctgttcgtgtttgagttgctgttggctgtttccgatgatggcgaccactgggattcctgaccttccagctggaagggttgcttgtaccgacgacgatgggtgatgggagacttaatgggttacatatgttaaaaggagttttaatatattgtatcaaactcgcataccacggtggattctttttcctttgtctcttggttgttgtagcggctcagcttgcggagatagctcttctgggtaacgggttcggattcctcctcgggcgccactgtcgaagaggaggcaggatgagttgggcgacgctgtcgctgacgcaccttaaccactcgacgaggtggcagacgggaacggatcttaagaaagtaatacatttaaaacaagttttaaaatttgaaaatgtaagatcttaccgatggtctatcctcagcgggtgtggtggaggtgattggcgtctctgtggttgtggttgtacgcagacgaggatagtttctcctcacgaacggcgagcgacgcgttgttgtagtcaatggagcctcagtggttgtagtggttgtggtcgtggtggttgatggagttgtggtggccagagtggtgtagattgggctcacctcgttgcgcacgatggcctctgttggattaagatcctcttggttggggaagtaacccggtccatagttatccttggagaactcttggtagtgctgagcaatttgcatgggttccaaaagattggcgggaaagacgctctgctcgttgccaccatcgatactgttgctaggggtcaccgtatagacttgctgggactcagatgcgggtccttcggtggtggcctgaacatcgtaggaactgggaatggcggtgggactggtgggtcgtctggatggggccttgaacaccggatagttttgcttgagcacatcccgctggtaatcaatgtcctgatcttcctgtggcttgccgttctttgaacctttcctggtcttggttttcagagtttggcgctcctccgttgtgggcctatagcgaatgcgattgggattgcggatgagtgggttccgtgcactggtgggacgacgggtgggagtcactgctgattcctcgccaccatctccgttgccggtggaggcatctggtgcggtggttcctcggctgctgtatggcctcctgatccggtgagtgggctgcttgttgctggactcggattctgaataggaaacagaggaggtaaccttggtcacagctggcttacgagtgcgcagcacgggtcttctggtgggtcgcgtttccggttccggttcggccaatggagtggttggaattgggggttgcaacttgtctttctcctgcagattgttaacgagtccgggaatatccggagtcaatggaggcagctccgagggcacatggtagggatttggttcgtactccacattgctgttttctagaatctcgttttgaacttggttatagctggggcgatggttaagtgggccctgctgatttacactgttatatcccacatccgatgtggtcacaggaacggcagcaggtgtgtactgattcagcctgtgcttggtcttgatcctctgagtagttgtggttgtcggcagaggagcctcatagtctgcaatgctttgagtatattcgaagggaggatttgtggtgtgaggacgttggcggaaggcatcctgttgacggaagtactgtttcatgcggagctcctcctcagccgtggacgcagttggtggacgggtggttagtcgcggaagctgctcttgcaccggttgctgaacatactggggatacaattggccactggagccagggaactcgatctgtggccgcgtgctgtaggtgaacaaagattgtggagcagccgtcgtcgaagtggtagatgtgctggtcgacgtggaggtgctggaagtggaactggtcgttggcttgctgcccagggttttgaagaagtcatcccctccaatttggttcagcgaatcgaagggatcctggctttgggctttggttggcgacggacggtagatggactgctgctgctgctgcacctggacattctgtggtcgcttcttcttatgcctctcctgcttggcgggagcctttggcgagcttacttcctggatgccatcctgcacataataatagctgaacttgttgccccgctcaggtacttgaccttgagcctgggtctgcgattgtgtggtagtctcgaatggattgcgggtactactaaccgtggcatacggacgttggggacgcggagcaggtgatatttgctgactggcagcgatatccttagccctgttaatcacaatagaacctacatggggttctggtagcaggatcttattgaagccattgggtgtgcggtaacttaatggcgccacaaagaaggaaacatcactcaaatcgcgattggaggtgagttgcgacagataaggtagatcgaactttacatagccatcgggaatgggcatgccagcaggtccaacaaagatttccggtgtctgcttggtgggcgagtcaattacggatatgctgtgcgcattcctcagggcagcaaccacatccgtttgggagggacgagagctggatcgcaacagaaacatggccaatggaggctgatgggctttcggcttgggcttcgctgtggtgaattgcgtctgtggctgtctgtagttttggaagatgctctggggctggctggtggtggtgctgggtcgggtggtcgttcccgagctaaagaaatcactacccacactgggatcctgggtgtagaactggttgatttgatagggattcacggcgggcagaccaggattcacattgaatttgttcacctcgaagttggagttcgatacggatcccgattgctgacgctgctggttgtacagggtatcgtacggtacatagagtaactggacatcctgatctcgggaggaagatggagcagacgatggagcagccttattcgatccgaagagcgtatccgcttcaggatccacgggaaagacttgtggggtcacactctgcagtgaagcttgtgtgggcaaaggttttccaaggcttttcggaggaaggatgtcctggatgtagttttgctgatggagtggcttgtttagagcctgagccaagggcttttgggagcccagcgaatggaaatcggcaccaaaaggctgactttgctgttgtccgaaaagagatggaggactgaagagctgagagggacttgggaatcctggagctcctgcaccgaaggtgtgctgaatctggtagcccgtttgcagagtgggtggtgcctgagcctgtccctcattgttaccatggaatggcatctcgaatttgaagaatgactgcgacgtgggctcctgaccagacgcctttagcgtagagggaggtggtggtggcgcctggcgaagcggcagagcctgtcccgctccattgggataccgctggaactggaagggatagtcgaactgggagcccgtcttggtcagatcaccgaaacgcgcgctgggtggaaaggtctgcgagtaggtcaacacacgaccattacccgtgcgatccttgctgccatccagcggttgcgccaagggcacccagtcaagtgagtccgtatcggatgtggccacattctccagttgacgcgaccatttggaggaggattcttggttttgagccagactagccgtggccaataagcacagccaggcggcggtgagttgcatgcctcgcttcatagcttaagtgcctgaaagtatttgaaaagaataatgatttgatgatatattgttctaaattgatcataaacaggatttaatgcaacctttagttatatcagcttttaaaatgtagattgtctaaattcgattaccctctaaaacctcaagaaaaattgtcttctacactccaagcatgacattataaaattccatttttgaaaacaaaccaaaagcaagaggtcacctgctgtttgcccgtatcgaaaccaacttgtaataaggtagttccgataaaatttcaattcaacccacaattatctgaatttcacaatgaaaatactgaaaacattaatgaactgcacattgtttttttttgggccgatcgaaaggtcacaaacgctggttccaataccgaaaatgccaaaaaaaaactataatgccaagagctcgaaaccggaacactcagaaccggtaactaattgtcccttgtaattatacaaatccaaatgcaaattcgccaagttctttgaatgcctaatgagttcttttcccataggctacctccattcgttcgattgccactacccacaaacccaaggtcgctgggcgttgaatgcagttgaattatatgttcgattctgggcggatttgcatctttcacgatcgcaggtgactggaggggtgatcaagtgaaaggtttctccccgtttcgctggctggccgggttgtaaatcaagagataattgccggggtcttggtcttcgcaacggcatctggattgcagtgcattggtttgctggtgtggcaagtgtaactgtcggtgcaactggtcgacgagcggactgtggccataactgctccggcagccaagtggccataattgtgcgcttgttttcatttggccaatgcgagaaattgcaatacttaaggcgaaatggcagttcgctgtggcttttggcttggctttggtaatgcgccattgggtagccatgatccatgaaacgcgatcaatgatcgg

SEQ ID NO: 37184 - DNA, 4561 bp, DROSOPHILA
atgaagcgaggcatgcaactcaccgccgcctggctgtgcttattggccacggctagtctggctcaaaaccaagaatcctcctccaaatggtcgcgtcaactggagaatgtggccacatccgatacggactcacttgactgggtgcccttggcgcaaccgctggatggcagcaaggatcgcacgggtaatggtcgtgtgttgacctactcgcagacctttccacccagcgcgcgtttcggtgatctgaccaagacgggctcccagttcgactatcccttccagttccagcggtatcccaatggagcgggacaggctctgccgcttcgccaggcgccaccaccacctccctctacgctaaaggcgtctggtcaggagcccacgtcgcagtcattcttcaaattcgagatgccattccatggtaacaatgagggacaggctcaggcaccacccactctgcaaacgggctaccagattcagcacaccttcggtgcaggagctccaggattcccaagtccctctcagctcttcagtcctccatctcttttcggacaacagcaaagtcagccttttggtgccgatttccattcgctgggctcccaaaagcccttggctcaggctctaaacaagccactccatcagcaaaactacatccaggacatccttcctccgaaaagccttggaaaacctttgcccacacaagcttcactgcagagtgtgaccccacaagtctttcccgtggatcctgaagcggatacgctcttcggatcgaataaggctgctccatcgtctgctccatcttcctcccgagatcaggatgtccagttactctatgtaccgtacgataccctgtacaaccagcagcgtcagcaatcgggatccgtatcgaactccaacttcgaggtgaacaaattcaattgtgggtagtgatttctttagctcgggaacgaccacccgacccagcaccaccaccagccagccccagagcatcttccaaaactacagacagccacagacgcaattcaccacagcgaagcccaagccgaaagcccatcagcctccattggccatgtttctgttgcgatccagctctcgtccctcccaaacggatgtggttgctgccctgaggaatgcgcacagcatatccgtaattgactcgcccaccaagcagacaccggaaatctttgttggacctgctggcatgcccattcccgatggctatgtaaagttcgatctaccttatctgtcgcaactcacctccaatcgcgatttgagtgatgtttccttctttgtggcgccattaagttaccgcacacccaatggcttcaataagatcctgctaccagaaccccatgtaggttctattgtgattaacagggctaaggatatcgctgccagtcagcaaatatcacctgctccgcgtccccaacgtccgtatgccacggttagtagtacccgcaatccattcgagactaccacacaatcgcagacccaggctcaaggtcaagtacctgagcggggcaacaagttcagctattattatgtgcaggatggcatccaggaagtaagctcgccaaaggctcccgccaagcaggagaggcataagaagaagcgaccacagaatgtccaggtgcagcagcagcagcagtccatctaccgtccgtcgccaaccaaagcccaaagccaggatcccttcgattcgctgaaccaaattggaggggatgacttcttcaaaaccctgggcagcaagccaacgaccagttccacttccagcacctccacgtcgaccagcacatctaccacttcgacgacggctgctccacaatctttgttcacctacagcacgcggccacagatcgagttccctggctccagtggccaattgtatccccagtatgttcagcaaccggtgcaagagcagcttccgcgactaaccacccgtccaccaactgcgtccacggctgaggaggagctccgcatgaaacagtacttccgtcaacaggatgccttccgccaacgtcctcacaccacaaatcctcccttcgaatatactcaaagcattgcagactatgaggctcctctgccgacaaccacaactactcagaggatcaagaccaagcacaggctgaatcagtacacacctgctgccgttcctgtgaccacatcggatgtgggatataacagtgtaaatcagcagggcccacttaaccatcgccccagctataaccaagttcaaaacgagattctagaaaacagcaatgtggagtacgaaccaaatccctaccatgtgccctcggagctgcctccattgactccggatattcccggactcgttaacaatctgcaggagaaagacaagttgcaacccccaattccaaccactccattggccgaaccggaaccggaaacgcgacccaccagaagacccgtgctgcgcactcgtaagccagctgtgaccaaggttacctcctctgtttcctattcagaatccgagtccagcaacaagcagcccactcaccggatcaggaggccatacagcagccgaggaaccaccgcaccagatgcctccaccggcaacggagatggtggcgaggaatcagcagtgactcccacccgtcgtcccaccagtgcacggaacccactcatccgcaatcccaatcgcattcgctataggcccacaacggaggagcgccaaactctgaaaaccaagaccaggaaaggttcaaagaacggcaagccacaggaagatcaggacattgattaccagcgggatgtgctcaagcaaaactatccggtgttcaaggccccatccagacgacccaccagtcccaccgccattcccagttcctacgatgttcaggccaccaccgaaggacccgcatctgagtcccagcaagtctatacggtgacccctagcaacagtatcgatggtggcaacgagcagagcgtctttcccgccaatcttttggaacccatgcaaattgctcagcactaccaagagttctccaaggataactatggaccgggttacttccccaaccaagaggatcttaatccaacagaggccatcgtgcgcaacgaggtgagcccaatctacaccactctggccaccacaactccatcaaccaccacgaccacaaccactacaaccactgaggctccattgactacaacaacgcgtcgctcgccgttcgtgaggagaaactatcctcgtctgcgtacaaccacaaccacagagacgccaatcacctccaccacacccgctgaggatagaccatcgatccgttcccgtctgccacctcgtcgagtggttaaggtgcgtcagcgacagcgtcgcccaactcatcctgcctcctcttcgacagtggcgcccgaggaggaatccgaacccgttacccagaagagctatctccgcaagctgagccgctacaacaaccaagagacaaaggaaaaagaatccaccgtgtctcccatcacccatcgtcgtcggtacaagcaacccttccagctggaaggtcaggaatcccagtggtcgccatcatcggaaacagccaacagcaactcaaacacgaacagcttcaagccattgagtcccaaatacaaaacggaaacccataacttcgagagtgaaccggagattgtgaccgcaggaccaaccaatcaaccagagacctatgatattaatgttgctgctgatcttggtggatcgtcggttcagcgcaccactattatggcgcccaatctgaagccagagaaatcctttgccgagcttttagaggaagtgatgggcaaagctcccgaggagtcgaccactgaaaccaccagcactacttttagtcgcctaaacagacgtggcaagtggcagaaaaagaaccgcttatctggctcggataactcggaaaatttcgagacggctgagtcccagaatctaggacctcagctctacaatgctcttcaagcagccagcgaaaaggaggagctacccaagaccaccactccattaactccatccaccgaagcccagacagagcctttggttgtgactaccacagtggcagcccccacgacgcccgaggagtatgaggtcaccactgcccaagacgttgaggaggccaccattacctccattcttcccttgagcgaggagagcgccacacgccgcatggacacggcagcggatgtggacgatctggaagtgcaaccgagcatcttctccgaggtgaagaagcaactgcacgatctgtttgccatagaggaaagtgaaggagaagcagtgaccgccgctctagcggccgtaggcaagcgtcgccaggagtacacaagcatccgacgaaccagtccagtcactcccccggaaacaacgactttagcgcccacggatgaagccatcaccacggaagccaccgtggcggagagcaaaaaggacagcttccacaaggatctgatggagcatgtggtgtacgccacgtccacgtcgaccaaagtcacctccgaaacggagatctgctaccgcggacgatgcatccgttccgaagatctgcccgccaatcacaaactgcactga

SEQ ID NO: 37185 - protein, 307 aa, DROSOPHILA
MKRGMQLTAAWLCLLATASLAQNQESSSKWSRQLENVATSDTDSLDWVPLAQPLDGSKDRTGNGRVLTYSQTFPPSARFGDLTKTGSQFDYPFQFQRYPNGAGQALPLRQAPPPPPSTLKASGQEPTSQSFFKFEMPFHGNNEGQAQAPPTLQTGYQIQHTFGAGAPGFPSPSQLFSPPSLFGQQQSQPFGADFHSLGSQKPLAQALNKPLHQQNYIQDILPPKSLGKPLPTQASLQSVTPQVFPVDPEADTLFGSNKAAPSSAPSSSRDQDVQLLYVPYDTLYNQQRQQSGSVSNSNFEVNKFNCG

SEQ ID NO: 37186 - DNA, 3907 bp, DROSOPHILA
caggaatttgattgttcgagttcgttatggatagacttaagaatatttatatgacttggagaccccgggcggtggttcgattgctcaacatcaaggatgaacatcgcagtgaatgcatgcccataacacacacacatgtttctagtcaagatctctcacacacacacaacatgggaatgccgcggggacacaactcctggagaagcaacctaatctgcctacaatttacatacataaacctctatacacttaaattatatactgtatacactcttatgtactattcttatgtattttatacacgcaattaaaacgataagtaaatgtttcgtaatcgtatgcgacgaagtcggcgttctgtttggctctgttctgtatgcgctttgtactaggatcttgacaggaagcccccgctaaggtgtggatcacatcatccgctcggccatgctgctcgccacgttgcccacgttcttctccttctccgccggctgggcgaccttcgaggccattttccgcgcgtccaaccagtccttgggcagaccggtgccaactgcaatgattgggtggattgggattagtggagggatcgctgcacggggacgccgcttcgttttttcacgagtggtgtgccccggcagttgaagctgaaatcagttgcaatctataaagggggacacaacgatcttcagacagttctcagtacgcatttattttcagtttccgtttcacgtgactctcgatgatgggacatggaaagttaaatgctgatgcggccatttgcccgcattggtatcattggtccacaaaatgcctggccgtgtttcaatccttggcacccagtgaacggatgtgggatgaagctgcctccgggtgacaaggacttagcacttggcagataattcgtgaaaaaatgaagccaatgcgccgcttgggagtggttaaaactaaacggtacttaggctctagctcgaaggaatttcaataaaaattaattaacaacgaatgtggatcgcctcctagtccaggtcatcggctactgggttgcgcgatcgggtgaaacgttaacagaacgaaattttgtgcggcaaataggaagagagatggagtacggaaaacgcgttagaaattactcaattatgaaggctatgtctaagttttggccaatgtgattgaaaccaaaagtacaagtgttttcaacttaaaagtaaactctttttgttaatcaaaacgagagctatttacttttgtaaaccttctcggtcatgtcatcgaagccagagtcctggatgttaagcatcaagctatccgccgacaaatagaccttgttctgtgagctggcaatctgttgataggggaaaagcatttcattaattttaaatcagaagagatttaaaagattaatcataccgtgcgtgcaatgctttgagcggcacgcagcttgcgcagcttcaggtaggctgggttctgcttcacggccagacctaagtaaacatatcagttaagaagaaccagtaggtggcaataaattgggtaagcataatccctatttacatatttcaagaaggccaaaaataaacgatgaacacagaaaaacaatacagtttttccagctcacaacatactaacagccttttagtcagatgtaaaagggaaaaaatgttctagttagtgttttgtaaaaggatatcattttagcagcctcggcttctccctcagcctgaacaatcttctgctgcttctcctgcttggcgcgctccacaaagaagacagcccgctgtgcctcctgctgagccacttgtttggcctcaatggccgccgtgtattccttgccgaagctcagctcggtgagggacacatcgtccagaatgatgttgaagtcgcgggcgcgctcgaccagctccttgcggatgagtagggatacctagtaacagacaactactatatacaaactgaattaaccatggttagtatgaagatttctacctgctgacgctgggtaataagctgcgaggcattgaacttggcaatcacgctcttcagcacctcgttgcaaatggagggcagcaccttctcgtcgtagtccacgcccagctgcttgtgcagatagggcaggttcagggaatcggggcgcgacagcacacgcagcgagatgttgatcatctgcagatccttggagccagtgggcgaggatattttgcggggacgcgagcgaatgtcatagataatgggatactggaaccaggggatgcgcacgtgcagtccctcggagtaaatgtcgctctggatgccgcccagacggctgaagatgatggcgcggtgaccaccctcaactgttgaaaggagaattaatcaagtgagtgggtttgcatacatagtatagtaaatagttaaatatataacttatatgtaattactttggacttaagacccgaaagtaaacacaaatataatggagtttgttatgcaatcatgggaagatgaaatgtgggactggccaacaataacaagtaattaaagtgaggataactgataagttaatgcatgttcctcacatgcatcttattagatagagtctaataagaatattgcaaatcatattggaagttatgaaatccgggaaacagcagaaacacacacacacaaagcaacatctctatgcactctgtaatcatttgaggttatgtgcacatgccgctattgcccgtgtttatggttttatccctcaaatcggtggctttatcctatcggctttatccttaccggtgtacagggactgactgactccataggcggctgctcccacggcggccaggaccttcagtccgattcccaatcccggcggaccacctttgcccagcttgccggcaagatcgttcaatttgctctgtgccatcttgtttgtcttctgcgacgaggaatttaaaaaatatattaaatgtcggtaaacgcaaagcactctgtatagattttgtgataataaacgtatgatttttccacgtacaaaattgggaaactctcacgcacgtttggttcggtgtgaccgtatgtgacgttgtcacataatcattcgttatttaaatcgatacaaaaatgtaatatttttgctattatcggtttgtgtgcttgctaacaactatttgtattttaatttttaataaaaaactttccgagttagttaagtgtattactccattcatttgtatagtagtatttcagcaatttctttaataaattagaaaacgaattttcgaacgaattgcgcacatgtttgtttgtatagaataaggtttgatcgttggttttgataaatgagtattgcggcttgcacgcgatttcatacggcgcgtttttcacgtttggcgcgttttgagtgcgatttctgtgcggcttgatcgcgattttaggcgtattgataacggcttggtttaaaatttcaaatctttacccaaatcagttatacgaaagtaaaagaaaaaaatatatattataatataataatgaatatatgtgctagttagctttaaaattaaacatatttacataaccgtaaaagtaaattaaaataaacataaaaaagatatggcaaaaaaaaataactcatggtgcgttaccactaatcacctaacgctgtagccaaaagttataaatagatgatgaaacctgatgcctgaggctttttgtttttgttgcagcacttaaactcacatgttgtgttttttttttttttttttgtaaatttgtgacaattacaatttcaagcgaatagctccagtgtgctggagcggaaaggaatttaaatcggccggagaaattatctgtgccccttatcaaaaggtggcctctgttttcgtcatgttttgacaatctgatttgaggatttaccctctgcgcagtgtttatagattag

SEQ ID NO: 37187 - DNA, 1148 bp, DROSOPHILA
agaagacaaacaagatggcacagagcaaattgaacgatcttgccggcaagctgggcaaaggtggtccgccgggattgggaatcggactgaaggtcctggccgccgtgggagcagccgcctatggagtcagtcagtccctgtacaccgttgagggtggtcaccgcgccatcatcttcagccgtctgggcggcatccagagcgacatttactccgagggactgcacgtgcgcatcccctggttccagtatcccattatctatgacattcgctcgcgtccccgcaaaatatcctcgcccactggctccaaggatctgcagatgatcaacatctcgctgcgtgtgctgtcgcgccccgattccctgaacctgccctatctgcacaagcagctgggcgtggactacgacgagaaggtgctgccctccatttgcaacgaggtgctgaagagcgtgattgccaagttcaatgcctcgcagcttattacccagcgtcagcaggtatccctactcatccgcaaggagctggtcgagcgcgcccgcgacttcaacatcattctggacgatgtgtccctcaccgagctgagcttcggcaaggaatacacggcggccattgaggccaaacaagtggctcagcaggaggcacagcgggctgtcttctttgtggagcgcgccaagcaggagaagcagcagaagattgttcaggctgagggagaagccgaggctgctaaaatgttaggtctggccgtgaagcagaacccagcctacctgaagctgcgcaagctgcgtgccgctcaaagcattgcacgcacgattgccagctcacagaacaaggtctatttgtcggcggatagcttgatgcttaacatccaggactctggcttcgatgacatgaccgagaaggtttacaaaagtaaatagctctcgttttgattaacaaaaagagtttacttttaagttgaaaacacttgtacttttggtttcaatcacattggccaaaacttagacatagccttcataattgagtaatttctaacgcgttttccgtactccatctctcttcctatttgccgcacaaaatttcgttctgttaacgtttcacccgatcgcgcaacccagtagccgatgacctggactaggaggcgatccacattc

SEQ ID NO: 37188 - protein, 299 aa, DROSOPHILA
MAQSKLNDLAGKLGKGGPPGLGIGLKVLAAVGAAAYGVSQSLYTVEGGHRAIIFSRLGGIQSDIYSEGLHVRIPWFQYPIIYDIRSRPRKISSPTGSKDLQMINISLRVLSRPDSLNLPYLHKQLGVDYDEKVLPSICNEVLKSVIAKFNASQLITQRQQVSLLIRKELVERARDFNIILDDVSLTELSFGKEYTAAIEAKQVAQQEAQRAVFFVERAKQEKQQKIVQAEGEAEAAKMLGLAVKQNPAYLKLRKLRAAQSIARTIASSQNKVYLSADSLMLNIQDSGFDDMTEKVYKSK

SEQ ID NO: 37189 - DNA, 3870 bp, DROSOPHILA
cgccatttactcctgctgccctggctgatcaacaatggagtgctgcttgtctttggaattatcaccaatattgcaatgctggcccagatcatcggaaatacatctttcctgagcgctcttccaatcattttcgtggatgttggcctgctctgtaagtgactcaccacttcatacatacataagctctatctggaaatgggtatacacaatacacactggccgttgttgcgaaattgtggatccccattgcgcttatcgctcgacggtctgcgatcgttctataattgcgcttgggcacgatgcttatttttctccattcgctcgttttcagtgctgacctggtatctctactacggcatctactcgctcttcaagcagatccaggcatcccgtgagatccagcgcccgctgatcccacagccgacccagcagaccaactcctatcccagctacaccaagatttaagctccagtgtagcttcccgtttggccagctcttatttcatcatatcccttttcgaatgtttccaatggggcttccccgataaacccaatatttttctagctagtagcaccaaaattatatactacgttgtatttcatgcatcagagaatgaaaatctgtgtgtacatcatatatatttacattaacgcgattgtgtctatacgtatatccaaacgaaatggccaatacaagatttttcgattggctgcaaaaaaaaaaatatatattttttatataaataatcaaatggaaaattatttaggggcttggtttacgcttcttgttgtaatgtttggagatgctactattatttgtttgtaattcgaaaatgttaatacataccattccttaaaacttaacacactgtgataggctttcaaacatatatttctacacacacagagggcataaattaaatcgaatcttggggcggcattcgttgcagctacttaggtaactattgatgggccattctgctgctccggcggtctcactgtcatttgcccagacccagccacatgtagctgggatcaatgaactgggagccgcggtatccctgcggattgcgcgacaccagcgatcggatcttctgggagggcctgtagctgcgcagggcctgcaggagcttcgatgtcttccggtcgtgctcctgcttctgctcggaatcctccggagcgtcgggcggcacgggcggcaggtgcagtgggtgcgggtgtttaccctccagcatacgcgtctccgactcacccagttgcgattgctccgcgaagcgcaggttcgcttccaggcggttgaaaaagccgcccagattggtcatggctcctggaatgtagaacgaatgtcactagcaatgggttcattggttaaggattaaatccgctttaaattaaatcaaagaatccaaatcctatccaatactccattactcaccagcactgatcgagggcatatatcggagtgagtccggaacctcctttcgtttccagggcaaggtgtaggcgtaggggtacgtaagcggtggctcctcgtcgtcgggtggccagttggcgggatccctcttagccttgacttccgcaagtggaggaaccggagattgccacttgtgctgcacctgcagctgcttgctgcgatgctggaggtgccactggcgaccgaacagcgtaggatacgggtcgagatagctatctccgaattggttatccatttccgtttcactggttttcggcggggcatttccgccatcgaaagggtaaaagttgtccaaggtgcgtgacgtcatcggcgcgaccgactccctgccctcgcttccagcgaaatcccagtccggatccaacttccagtttcggtcccactccggcggaatttgacggtcacgagcagttgttggtgatgtcgctatcgccacctgtgcaccgccgaaaggtgcgtttcgtagtggacctggcggtggagaagcatatcggcagacgggcccattaattgtgtgtgctcccgcaggatttggggtagtcacttgggtacaaacagggttggcttcgccaaaactacatgacatccaatttccgctagtgccctacagattttaattagtgataggcgcaatggcggctaataaaaggtcaggtttcaatttagaacaattgccgagaaatgaaaaattgccgaaaatgtgagatagttacgataaagtttgccccatggaattgatgtcatatcttccgtttaatttcataagcagggaagaacaactaactagttgtcgtagtaaaatgtattagtctcagtttaagtttataagctatttagttttaattgttttttagattggataaaaagtagttaaacacagtatagcataattaaataactctttgtgcattacatatacttttaaattggaaattttttgatttgatttttgatttgatttacttaaacaaacatcactattattaatctcttttaatgggatcaaaagaacttcggttgattcagagacggataaattggaaaaacgaagatttctgccatttttaaatggctataacgtataatcgtagtttatgcacctattaggcatcttcaattgtgttttcaattaattaaattttaagatttttaaagagcagaatggaatgttttttttgagaaaaggctctctttttctataaattttgattttacttgtgatctatgatatacttaagattccaaattcctacaacaataatcatgatctcagctactttagctagtatctttgaaatgttttctgcccaatttcacaaactcttggaactgatggacttacctgcaaatagcaaaaccataagcagaatccgtcgcctcatcaccaggtgcgacattgtgtggctgattttcgagtaccgccttctgggtgctcttacattttacggatacaccgatgctaaatagtttgcaaacacatttcaactgatggtggctatgctctaacggaatacagctgctcccacggcgaagatcgagttccacgccggaggagtgacgactaacggccaagttgttcgcatcgtgcgcttttatagctccacgcgggcagcgcaccaaacccaactccacgcgaatcctttcggccaccccgaccacgctccacgctcgagcagcgagcacctgttgcccgacgaaaggagcaggacgacgggacagaatggatataaaggacgctagggacatgcgcaccagctggatggcagtgtcacctttgcttggtttttgaagtgcgacttgagcttcggtaattttctaatatgcacggaaatggcgaatggcgaatggcgaatggcgcacagcattgacagcaattgggagtcgagtgtccaagctggattccattccaccattgatgcgaagccaagccaataagtctcaggtgtgccaaaggacccttttttttatgcaattatcttgtcatatttcgcaatttctccagcaatggatattgctccaggtgtaagccggtcttgccacatgccattgttcgagggaacatcccaggcatccatccatccgggcatacatccagccatcccgcgtccctgcatccagctgacatgacgtcaaaggcttttgagtttggccaccgtattagcataattgggtcagtggctggcttcggtggcttccaccgtccattgtgagccaccgtgcatccatccaggagctgcaccaccttcgggccttggccgctccacgctcctaattggatttgcatgcagcttctttgtgacacgctgggcgtcctaatggtccggaggtctggtttggccagctatgctttggtttgctttggctggacgaccaccaccctgctccaatggtaaaggt

SEQ ID NO: 37190 - DNA, 891 bp, DROSOPHILA
atgtcgcacctggtgatgaggcgacggattctgcttatggttttgctatttgcaggtccactacgaaacgcacctttcggcggtgcacaggtggcgatagcgacatcaccaacaactgctcgtgaccgtcaaattccgccggagtgggaccgaaactggaagttggatccggactgggatttcgctggaagcgagggcagggagtcggtcgcgccgatgacgtcacgcaccttggacaacttttaccctttcgatggcggaaatgccccgccgaaaaccagtgaaacggaaatggataaccaattcggagatagctatctcgacccgtatcctacgctgttcggtcgccagtggcacctccagcatcgcagcaagcagctgcaggtgcagcacaagtggcaatctccggttcctccacttgcggaagtcaaggctaagagggatcccgccaactggccacccgacgacgaggagccaccgcttacgtacccctacgcctacaccttgccctggaaacgaaaggaggttccggactcactccgatatatgccctcgatcagtgctggagccatgaccaatctgggcggctttttcaaccgcctggaagcgaacctgcgcttcgcggagcaatcgcaactgggtgagtcggagacgcgtatgctggagggtaaacacccgcacccactgcacctgccgcccgtgccgcccgacgctccggaggattccgagcagaagcaggagcacgaccggaagacatcgaagctcctgcaggccctgcgcagctacaggccctcccagaagatccgatcgctggtgtcgcgcaatccgcagggataccgcggctcccagttcattgatcccagctacatgtggctgggtctgggcaaatga

SEQ ID NO: 37191 - protein, 296 aa, DROSOPHILA
MSHLVMRRRILLMVLLFAGPLRNAPFGGAQVAIATSPTTARDRQIPPEWDRNWKLDPDWDFAGSEGRESVAPMTSRTLDNFYPFDGGNAPPKTSETEMDNQFGDSYLDPYPTLFGRQWHLQHRSKQLQVQHKWQSPVPPLAEVKAKRDPANWPPDDEEPPLTYPYAYTLPWKRKEVPDSLRYMPSISAGAMTNLGGFFNRLEANLRFAEQSQLGESETRMLEGKHPHPLHLPPVPPDAPEDSEQKQEHDRKTSKLLQALRSYRPSQKIRSLVSRNPQGYRGSQFIDPSYMWLGLGK

SEQ ID NO: 37192 - DNA, 3364 bp, DROSOPHILA
aggaggtgtgcctgcccaacggaagtctagagaacctggctaccttgcccagtgcgctgtatgttccgcatgtcagacgtgtggccaggctaatggacatgaagtacaccagtcagtcaccggtgagtaattcccactctcatcgtatgcgtcatctggctaactagtccctttggctttgttccagatactgcaacgccccagcaatagacacctgatgttgcacttccagcaactgcagtcgctgcaggagctgtacgcttttttcaccacgctgggcatcagttgcccccagccgcgtaactttgccgatacggagaacgatgtggccaattgcttgaaggagatcgaagaggtattggccaatgattttctggaaaagctgcccagcataaccacgccgagatgaaaaccggctgttgcccaacggcagacgcagtcgcagatccaagcgagtgggtcacacttcgagctcaagctgaacctgaacctaggtatggagtctgccatggagtcgggcagtactggccaggctgtgcgaatactggcggccgtgcaggctaagctaactacccaaaatgccgagacgagctttacgcagtcgcaaaacatcaataacagcagcaacaataagatgaccaactttccattttatgtctaagtaagcagattggagcagaagacgatgccgagtatgatagctagctatatagatagagaactgtgtcgagagtatataattgtccgtagtgtgatcgatcgttttaaatgttgaatgtttaagaacgcggtagcccaatagccaatagcaccctgtatgtatatgtatgtaaccaatgtatttaactgttgatagttgatcccaagtcgatgtgagtaagagatgtgcgttaacgacaaactgcaatcaaataaaaaacaaagcattttattgcaaacactgagatgaacgaacggtgggctcttccccgacaatttatgtagtgtagaatgataaggactaaaccacattcatggcgcgcggtgtttgtttgctggcttcgctgtttttcagctggaggtagaaggagtacacaattcgtgcgctgaagaggatcaatactgaaagtgtagcggagaatatgtatgatctgtacatttttgttaactcaatttgatgttcatagccgatacttacgaaatgtgatgatgtaaacgagcagggcaccgaaaacgttgttcattccggtagcctcgcgatatcctccgtagtggaagataaccccgaagacggcaaacggaaaggagatggcttcaatggcagcgaagatcagccagacgaacaccagaattggcttttcctgcaattcggaaaggtagattgggtttcgttgactcaataaaacggaatgggttgtattttatttaccttcagggttcctatcaataagcaaatattggcgactactacgatggcaaatccaataaaggtaagaactgcaaggattcaagtgaatttaaatagaaattattgaacgtacatatttcattcataaaaaaagccgttacaattagtggaaagtaaacataaacttgggcttataagtgactcaatgtattccaagcaaaacgttgctgtgctcttatctttcttcccgtctgaaatttgagaacacgactgctaaatgtatcttcgtatataatgagtacatattgatgcactgatgcacttcatgtacatgtgtacatatacataaagaactaaaacataaattcttcttttatattttaaacacatttcatacatgaaatatgacaaactttttaaaacagcttagaataaggtttatagaacttctttgagacatggacaaatgcagggctttaagtgtttttatgacatatggcgttcaactgttaaaacccaataatcttttaagtttaattctgcgccatgcacagcccaaggaaattatttaattttcttttttgtgctggaaaattcaagcctgtgagaaaatggcatttcgggccacctaaaatgaattgtcagctcgaatttgtcggcgatgtcgtcatcgatggtgaggtgttgtatccaaaatggttgtgaattggaacgcgtttgtgtcgaatggattagctcattcgtttatttcgcatgtgaacatcatgaatgtattgtctctctatggaaatagcgtcagtctgggcaatcagcttctgaaaataaacaaatgccacgcctctcgcatttctcctaccgtttggagcgaatataacgttgaaagtcatgctcaatagccaatagatcgcgattcccaggcaccagctccgcaaatcggtattgcacgggccattttccaccgtcagatcgattttcattttgaaactctgtggtttacagcgaattttccaaatacaaatatggctagtatggcacttaaaccggtttgggaacacctagcgcacggaaacacaaccgcactgggcaagaatcaaataataagtgtggcgcaaatgccgatgccgctcagaagaaacggttgcgtaaactatgcaacacgaaaatacttttttttcgagcgtggaaaaactacgtctgatatgttcttaaaaaatatatgtgcactcatttactatatgaatttgtttgcatatgtttcgtcatttaagagtgaaatgaataaaatggggaattgtctttaaaataatagagagatttaatgctgtattatatatgtaatgtagctactattagcaccttgaaaaatattatgaaagtaagccgctgctgtgcagtgttaatgaatacataaataaatattttttaactatcatgccaaataataaatgcataaaaatatttaaaatataaaaatgttattaaaagaattttaaacaattagcgttaaaaagtcacattaaaagctggtgaacaagtcacagtttcgacaccaactgcttgaaccagtctggcaacgccgctgtacccaaaagcttttaattgtcagccaattgcgacttatcaagcaattgcaattttgctgcgccggcgaactgaagtaaaattgtctttatcttcgcattagcacgaaatcaagtgaatccagaatgctgtccagggtcttctgtatgcgcctgaacacctatggtgtggtcattggatggctgggcgtgattctatccttcttggccacgatcctcttgtccttggccctcggattcgtcgatgaaattgcgcagcagatcgccaagggatcggaagattctaacaagacggccaccgagattcgcagtggtaagggctaaccatcgagtgcacccacaaccaatcgtatattttttattgtatttcattgttcttgcggttattgcagtgcta

SEQ ID NO: 37193 - DNA, 453 bp, DROSOPHILA
atgaaaatcgatctgacggtggaaaatggcccgtgcaataccgatttgcggagctggtgcctgggaatcgcgatctattggctattgagcatgactttcaacgttatattcgctccaaacgttcttacctttattggatttgccatcgtagtagtcgccaatatttgcttattgataggaaccctgaaggaaaagccaattctggtgttcgtctggctgatcttcgctgccattgaagccatctcctttccgtttgccgtcttcggggttatcttccactacggaggatatcgcgaggctaccggaatgaacaacgttttcggtgccctgctcgtttacatcatcacatttctattgatcctcttcagcgcacgaattgtgtactccttctacctccagctgaaaaacagcgaagccagcaaacaaacaccgcgcgccatgaatgtggtttag

SEQ ID NO: 37194 - protein, 150 aa, DROSOPHILA
MKIDLTVENGPCNTDLRSWCLGIAIYWLLSMTFNVIFAPNVLTFIGFAIVVVANICLLIGTLKEKPILVFVWLIFAAIEAISFPFAVFGVIFHYGGYREATGMNNVFGALLVYIITFLLILFSARIVYSFYLQLKNSEASKQTPRAMNVV

SEQ ID NO: 37195 - DNA, 3026 bp, DROSOPHILA
caatttataccacgatctaggaatttgccatcaagtttcgaagacaaagaaacttcaacttagagaaactcagaaaaaaaggagtaacagtaaaagggtgacattttctgaaacacgaaaaaaatgactgatttaaagttaactgtggcactaaccagcgttaatgcggagaatatgtcgcggcacgacatgcttcagtgggtgaacaacatggtccacggccacttcaagaagatcgaagagctgtgctcaggtaagacttataaagagcataaaattgggcaatgctgctaagttctatggtcttctccaggtgctgcctactgccagatgatggagatgatctttcccaactgcattaacctgaagcgcgtcaagatgaccgccaaactagagcacgagtatctacacaatcttaggctcttccaggaagccttcaatcgcttgaagctggacaaaacggtaccaatcgatcgactgatcaagggtcgcttccaggacaactttgagttcctgcagtggttcaagaagttcttcgactcgcaggctccgggcttggagaacattaagtcgctggccaatgcgccgttggcaaagcccataaagccgcgccaattcgccaaggagcgatcaccagtcaacgccaatgatgatgcgctcaaagagctgattgatgaaatgaagaacctaagcctgaagcgggaggacatcatggaggccagcaatcagatctacaacaaactgcgcctggtcgaggatttggtcaacgacatgatcaacaacaaccagctagttgagttgtgcaaacgcattcaagcggtgctctacaaaacgatagatggtgaaatcaacgaggaacccgtcgaggttaatgaggataatggtgatgaaggcgccgaacacgcggatcccaatgacggattatattagaattctttttatttgtacttattttgttttatacaatcatttaattatttataaagaaagcattataaaatcagccgttggaatcattgtctgaggaggagtaatcccccactaagcttatgggtttttcgttcgtggctgaagatgtagtttcttccaactttttacgccgtatgccaagatcctgtacttggagctgggtattcagaaccttttgtcgcttgagtccaccaaatgtggtgactgttgctccgggaagcgctggacgcataagcagctccaaccgctgctcggattcccgttccagagctgacttcgtctgcaacttcatcagggctgccatttcgcgatcttgtgtggtctccggaaggagagcaatgtccaagctgctcttggccaacaactgtcgatccagctcctgctgaccattgatctctttcttctgctggcgaaactcggcgcgtaggcgactattggccatatagctgtcatcccagacgctcatgttgcgctccactagtttctggagcacgggcctggcatctgcccctgccttagcatccttggcttgatgctccaacttgtacatggcatcgtcgaagagacgcttttgtacctccttggtttccggtacaacttgttcgttctgcaagggatcccagcggttctcctgccgtctagcccccgaaagtataacatagtccaaattgccgggatccgtctggatctcaaagtggttgtcgcacaagtggcacttcatccggaacttaaaaaccggcgtagtgtagtacatgcccaccttggtcttctccgcattgtagcgcacgcccatgccgatgtggttcttgcatccatcacaccagatattgtagggcatctcaaagcggatgatgatgattcccaggtgaatcttgcgggcccgttcccgcagggcgtgggttccctggaacttgttgagaccgcccttcttcggatcatagtcgggcggatagtacttgttctgtcccttgcgttcacccattttttaagtggataggattacttaaatatttaaactaattacaagctcaatcttttgctgtcaaatgtaaataaacatttctgctttttttaaatcagctgtttcgggtcgctggtgatgacattatcggtggtgcggaaaacgctaaaaatagccagaaaatcatatatgaattagtcttgttattattagtcatattacaattaatatgtaataaatatgacctactatattacctgttactttaatgccaactgtttatttcaaattatttgacatataaaataaataagtaatcgataacatcaccgacggcgtgacagcttttccatctgtcccatcaccaaaataatagtttctcgtgggcatcgtcaaaactttggttggatttttaaccctttttgccacgtaaattgaattagaattagcgtccgatccaggcaaaatgataatctacacgaatgatggcaacccgctgggactgcagctgctaatgctcgccaaatttgccaagcagccggtgcaggtgcagttggttaacctaaatggtgagttctgccacggattcccttcgaattctggggaatgctctgaaaatgactcatttctgatgcaataactattgttaattgcagacgctaagtacaaggacttgctggtgctgcccactttggagctggacaacggattgcgtttgttctcgccggcggccattgccaagtaccttttcgtgggcaaggggcagcagcgcgatgaggtatgggttccgaaaattacttattggcccattgacccctgaaggttaaactaattcccgtatgtgctctctccctagtggctggaatggtctgccacgttgctggccccggctttggcccaccacatggctgtgggccacaaggcagatgcaaacgcgctgcccgtgctgaatgctctggtcaagaagctggatgacaaactgaaagctaccccctacctggctggcgacaaacccagtgccgccgacatcgccatttggtcgctccttgctcccgatggcactctcaagggagcacagaacgtggacaacttgagg

SEQ ID NO: 37196 - DNA, 1026 bp, DROSOPHILA
tttatttacatttgacagcaaaagattgagcttgtaattagtttaaatatttaagtaatcctatccacttaaaaaatgggtgaacgcaagggacagaacaagtactatccgcccgactatgatccgaagaagggcggtctcaacaagttccagggaacccacgccctgcgggaacgggcccgcaagattcacctgggaatcatcatcatccgctttgagatgccctacaatatctggtgtgatggatgcaagaaccacatcggcatgggcgtgcgctacaatgcggagaagaccaaggtgggcatgtactacactacgccggtttttaagttccggatgaagtgccacttgtgcgacaaccactttgagatccagacggatcccggcaatttggactatgttatactttcgggggctagacggcaggagaaccgctgggatcccttgcagaacgaacaagttgtaccggaaaccaaggaggtacaaaagcgtctcttcgacgatgccatgtacaagttggagcatcaagccaaggatgctaaggcaggggcagatgccaggcccgtgctccagaaactagtggagcgcaacatgagcgtctgggatgacagctatatggccaatagtcgcctacgcgccgagtttcgccagcagaagaaagagatcaatggtcagcaggagctggatcgacagttgttggccaagagcagcttggacattgctctccttccggagaccacacaagatcgcgaaatggcagccctgatgaagttgcagacgaagtcagctctggaacgggaatccgagcagcggttggagctgcttatgcgtccagcgcttcccggagcaacagtcaccacatttggtggactcaagcgacaaaaggttctgaatacccagctccaagtacaggatcttggcatacggcgtaaaaagttggaagaaactacatcttcagccacgaacgaaaaacccataagcttagtgggggattactcctcctcagacaatgattccaacggctga

SEQ ID NO: 37197 - protein, 316 aa, DROSOPHILA
MGERKGQNKYYPPDYDPKKGGLNKFQGTHALRERARKIHLGIIIIRFEMPYNIWCDGCKNHIGMGVRYNAEKTKVGMYYTTPVFKFRMKCHLCDNHFEIQTDPGNLDYVILSGARRQENRWDPLQNEQVVPETKEVQKRLFDDAMYKLEHQAKDAKAGADARPVLQKLVERNMSVWDDSYMANSRLRAEFRQQKKEINGQQELDRQLLAKSSLDIALLPETTQDREMAALMKLQTKSALERESEQRLELLMRPALPGATVTTFGGLKRQKVLNTQLQVQDLGIRRKKLEETTSSATNEKPISLVGDYSSSDNDSNG

SEQ ID NO: 37198 - DNA, 6406 bp, DROSOPHILA
catatgctgttttcattttttttttttatggccatcattaacactcaaaagcattccgaaggtttaagttgactcttggcttttatagttggtatgtagctgtcttgcagcccaaaaaccgacaaaagttgtctgtcagttttgatgtgactctggctaattgacctccaagctggtgttttcataattaagctaaaatgaagccgagcggtagtaacaaattgaaagttcacgtagatacatatttcaagatatcttgaggttcgactggttcggcatttgccaagggaaataagctacataacggctaagatacatcttttgggccaaaaagaggaagaccaccttgtgctgctcgactgatcccttaataacatacaatttcgttctgtgcactaacaaagcgacacttaaaatgccaagacggcagctgcaaacagaattgttgtggccaagtcgataaagatgcattcggctggatggtttcgtggtttctcccagttattggacccgtttctctgttcattctgttcttcttgctcacactgaatgcgcgcgcatgcgcaaaggatatggagttgtatgggcgtcgagggttgcagcaggagtggcataccgtttgccccgcgtgttctgggtaatctttgcagctgcaggactgaacaatctgcacctggcctcgcccgcttaattaatttcccagctgactcagctcgccgtcgttctttctcgtggggaggtggaaatgacaaacctctgactatgccactcactttgataagcacttactgggccatcgggcaggggacccacttcctgctgacccaagggcggcgaggagctggggatcagctgcaatggctcacttcgcgatgacacgtgcgaggcgtgaacagtgaacgcggaacatacatgaatcccctactttcttagttcctatcacattcattttaatttacttgcgctactgcacatttgacaagactcaaagcgattcgaaatgcatttggcgccatttggccgcacggtacttatatttttaaacgcatcagcgacaacaagaccgaaagtcgtcacacatccgtccatcacacattgggggccacagtgccgcacactgagcgaaaaggttgtgtgcgaaaaaaatatctctcaagaaataatataaaaataatattaaagattaaaagcactgggactttattccaactctactggtcgaataatagccaattttgttgttgcattgtgactatttctctcagtgtgcagcgaaatgatgaatggggctgttgggggcagacagagacggcgcgacagcgtcacagtgccactgaatgagacggcaatagcagacgtcaggcagacgatgcagttgcgctgccttcgcctcgatggcgttacatgatttgtagtatcagcaaacatacgtcacaacaacaaaaacaacaacaacaacaacgacaagatgtggcagcatgtgcacaaatgcaatccggttcgcttgcccgccaagctagacgagcaaaaaatgtttatttttaacaatattccacagattatcatctgtcgtcgtctgatgcacttcgatgaatgggcgagtttgttgccttgaaggctagccaagaaaatgagacttagattttagcaaattaacaaaacaacaacggactgattattagcatgatataaaaatatctcactatttacttagtcatttcatccaaatatcgccgataagccactggctcatttacattagtcagattagttattctgcaagcggattacacgcaaattcttacaaaatatgtcaatttaaattttttgaatatttggaaatattaaatgttaatgcctgtggccctgcaaaactcatacaaattgtgatccgcggagaagaatctgtttagttgagcggaaaccgcttgaaagatgaaaagacaagcctggagaaagaggaaattgtggggcataaacacccgccgacaaaaacagacaagatacacagatacagatacacgctcgaaacagcgagaatcacatatatttggcggatagcaaattacgcacttaaagtgctcgccaaatgacaggaaacgcgtcatttttacgaacttcaaattacgattttttttttttttttgtattacgtttccttgtcttccggacacttaaagttctgcatgtgtgagtgttggtttagtggctgctactaagtagcatgagaagacagactcaatatattttcgtgtatgcaattaaaactggcgcacatttcctcatttatttgtgcgagtgtattggcgggcatttccttgaaaaagggacatgggggtgtgcatcctgtgcgcagcggatatgcgaacgttgcaccgacgactcaacttcctgccattgacttttgtcaaccgaatagtaactgaaaaccatttccctttccttttccttttcctttttccatttccatccattcatccatccaccgaaaacaaagcgaagcgtgaaaaacaacgcgtgctgagcacgagctaccgatcaactcgaatgtcaatgccatatgctatatgtacatataggatacagggtatactatagttggctcccctccccgacaacacgaatcaatcacttcgaaactcaatttgggtgggtggaggtgcattcgagtcaacggaagcctcgcagacagctcccttcggcaattgctgactaatccgctctggttttccatttttccgcttttcacacgcttttcgcgcgcgtgggagtgagaaacttcggcctttattggcttctaacgtgggcggaagtgaatgcagtttgtgaatgcagtttgaaccaaatgtcaagaagattgcatgctaatttgagttaatatatcatttagttaggatcgtataataatggataagttattttagagcctatgcttcatgggtgggcttagtttattccactttaaattgaatttgaaataatgtgaaataattgaattccgcccgctgggggaccacccgaagatcgaccagacttagggattcttaatgggtcattctccaccagggggttctacttcgagggctttgttatttccaactaatggtgtctggagtgtcgctctactaaatgtttcaaattgtttatggcaaccgctgtgattcaccatttcgttttgattgccgtggtctgtaatatctgctttcacttctacacattaatcgtaacttaagattcgatggatgcattacctacaatatatacctactgctgtgatgcattcctatggtttattgctctgaatgtttgtttgtaaataagtagataaataaatatgtattcccagaagaatcaagagtaaataattttgaaaacacgtacatatgtatcagaaatggcgataaagatataccctatttccttttgccagcttgagtcacagtttcgtgggaatttctttgaagccgccaatgggctgtgtaattaaaaccactgcgtcgtctccttacgcatttccttgaacggaagctccggggagctcattccggaaaactattaaggttcccttttggcgaactgggaatctcgacgccgctcttccgccggctctttcccgttcccattgccattcttacccacattcgcattgacaccttttatgatgatccgtcggcggatgtacacatatatatatatttttattttgtttaataccaccatttcggtggctctttgttttgctcgccacattcgcagctgccaatttggctggtaattatttccgttccactctgttttgacctcatcaccaccatgtcctcctcctccttattctccttgggccggattccccctgatctctgaccatcttgtttgtaatcgcaatcgcagcttggcctgcgtttctatgtcagccacatgccgataccgccggccccgccccctatgtttcccccccattcaaatgtgaccgccgatcgatatgacagccaccgcttcgtaatgattattcagcgcttcctttcgctcgccatccgccgcgatccgctgacgccgcccattccggcagcaaggtcagatttaataacgaaatattaattcgaaaaggaagttcagcagccgataggcgaataacagataccctcatgcaaagtatagcaaaagtcaaaatatgcttagcaaacttgtttgttgttaagctggctgattttttgaagttttgtatttcatcaggaatcatatgtttatgtgtatatcattaagattataatcgctcgtaatctttttgtcaatataccctgcaatcgtgaaagagcgagggtcatcacacttgtgatgtgtacaaatcggcgtatgcgtgttattatttatattagtatgcgcttgttttgttgtttcttgccgttgtaacgattaaaacaattgccagcttgtggaaagcatttccgttgtactaaccccatcacttgcccgccaatgtgccgctttcgcccgcaaaacgtgaatcacaagccttaatcagcaattcttactccactttcagaactcaaacgttgcgaacggaagcgaaatgcaagtggaatcgagctataccaaatatgccggacgtgtgccacctttggacctcacccaggtgaatggtggccaagatttgtggggcggcaatggtggcggcaataacgcatccgccagacgccatctgcatcatccctatcaaatgctggacaagtgccgcggcggagtaaccctgatcagtgcatcatccgccatctcatctacatccaactcctccgacgacaataacaatcgactgatgagcgctgatgatggcaccaccagtctgctgcatcccttgggctccgatggtctgcctctggatccgcgcgattggacgcgagcggatgtctggaaatggctcatcaatatggccgtatccgagggattggaggtcaccgccgaactgccacagaaattccccatgaacggcaaggcattgtgcctgatgagtctcgatatgtacctgtgccgagttcccgtgggcggcaagatgctctaccgcgacttccgggtgcgactcgcccgagcaatggccctgctatcatagggattacccatatatctcacggatacccagtcctctctatggttgtacatatctctaggattcgattagttaagttctagttatgctagcttataatgcctagtccttagttctgctcgtcatttaagtattagcgataatattctgcatttcaatatggtcaaagattgcttcaagttttcaattcattttgaaagaaaagtgattggagtgaatagaataaaagattgaagttacaatgctgtcctattagttaactaagttcgcatatgatgaaaatataaaatgaaattttataactgaacaagctggtgtatttattgaaggaactcgttggtaattcactagtgaaatatattgtttgcaatatataatattatctctagctacttttaaaattgtaatcatactttgggacctaatgttctgtttatgtctttcacaatttcccgcagacgaactcacattgacaagtgaaatatacgtttgcccaattagcacatcattaagtcccaacaaatgctccgagttgaaattttggatggagccacacaccactaacacccttaaaaatatgtacacacagacaagtgcagtaaactcattgttattgttggccagaagttagtgccaacatttgtttaggcccgagccatacatagatcagcagaaagtgtttattttccaaagacttttaggctgtgtgattaatgtgggtggggaaacaggagttacgactcggtaaatagggaaaaatgctactacttaagatacttcacataaattaaaagaaaatttggtaaatatataaaaatgaccattgaaaacttattgtatatcaatagaagtaatctataaatatgcattacactttacatttttaataagatataatcatagtctagttgaatttccgaataatacaggaaattaaagcaaaaaaagcggaaacctcccggcaaatgcaacccaaatttcccatttaaaattcagctgttgcaaaaaacgcagcgcaacaattatgacaataacaataacaataacggataacgataatcagcatcggtagtcaaatagaacccggatagatacaaagatacatccgtgtgtgggcgagtgagtgcgatgacatatacatatgtatagtatagtatatatatacagattcaaagcgctccatccgcccgtgcatccgctcatttgatttgggtttttctttttgtgcctcctatgaatgggcagatacacagttgcatagatacccagatacagctacagaatcagatacatttggatgctctt

SEQ ID NO: 37199 - DNA, 890 bp, DROSOPHILA
atgcatttggcgccatttggccgcacgaactcaaacgttgcgaacggaagcgaaatgcaagtggaatcgagctataccaaatatgccggacgtgtgccacctttggacctcacccaggtgaatggtggccaagatttgtggggcggcaatggtggcggcaataacgcatccgccagacgccatctgcatcatccctatcaaatgctggacaagtgccgcggcggagtaaccctgatcagtgcatcatccgccatctcatctacatccaactcctccgacgacaataacaatcgactgatgagcgctgatgatggcaccaccagtctgctgcatcccttgggctccgatggtctgcctctggatccgcgcgattggacgcgagcggatgtctggaaatggctcatcaatatggccgtatccgagggattggaggtcaccgccgaactgccacagaaattccccatgaacggcaaggcattgtgcctgatgagtctcgatatgtacctgtgccgagttcccgtgggcggcaagatgctctaccgcgacttccgggtgcgactcgcccgagcaatggccctgctatcatagggattacccatatatctcacggatacccagtcctctctatggttgtacatatctctaggattcgattagttaagttctagttatgctagcttataatgcctagtccttagttctgctcgtcatttaagtattagcgataatattctgcatttcaatatggtcaaagattgcttcaagttttcaattcattttgaaagaaaagtgattggagtgaatagaataaaagattgaagttacaatgctgtcctattagttaactaagttcgcatatgatgaaaatataaaatgaaattttataactg

SEQ ID NO: 37200 - protein, 195 aa, DROSOPHILA
MHLAPFGRTNSNVANGSEMQVESSYTKYAGRVPPLDLTQVNGGQDLWGGNGGGNNASARRHLHHPYQMLDKCRGGVTLISASSAISSTSNSSDDNNNRLMSADDGTTSLLHPLGSDGLPLDPRDWTRADVWKWLINMAVSEGLEVTAELPQKFPMNGKALCLMSLDMYLCRVPVGGKMLYRDFRVRLARAMALLS

SEQ ID NO: 37201 - DNA, 9775 bp, DROSOPHILA
ctggcgtatcaccctggtattctggggcacctgtcgcactttctggatcaggatggtcttcggaatctcacgagcctcgtaccatccgggatttacggctttgacccacgaactggcacagcactcgaagctgctcaatagttttgccacaccgccaaaggagaccatttttcttgagaaataaaacttaaaaaatctatggaaaatatagaacaatctgaaaactggattatgttcacttgaaacttgtaaatgaaatgagtttatttgattgtctgttcatgaaagtccttttcgacgcttgcttttgtaacggaaatttctacttcctgcgcagcttggaatacgcacgaaaccaagtggcatcttggaaggaccccgtccatgaatgaatgccttccagctggccgttgattcaactttccaccagcagccacctgaatgaaaatggagccgggaatttcactacaccactaaaacggaaattgcgtaggtggagagagagagagagtaagaatgagcgagaggaccaaatgagttacgcaccaggagtcgcgtgacgtcatttcaaagtttgtgcaccactgcgagaaactaaggaatatatataagacagaatttaaacgatttaaattaatttgaaaaccatattttgaaaatacatttaagattgaaagttttatattacttgaatggacaaataaattttttttttttttttgataaaaatatgttgtttatcacaagaatgaacaaaatattgcagttctatagccttataaacaaacatttcatagcaggccgtttaccaattgtcagggtttttccaataacagatatggcaccaaaagtgcatccaaaattttcaatgaacccacaagccccaattaaaccagaaaaaaaaactattcaacggcaaagcaagccagcagaaactttcagagtcagcagttgaagaacaaaacctcaagcgaatcaataagaatccattaaatccagcatggttcggagaagggtactgactaattcggccaagcaggcttcgatgaatgcctatcagcagctgtggcagcagcagcaattcgcccgagctccattagttgccgctatgccagaatattggcattccgtgtgcaacaaatttggtggcgccatgccgcgaatggcggttttagctccgccggaagtcagtagccggaaattgagtcgtttgcgagggcagctaatgaaatcccagcgaaaaagcgcttcgattcagagcttcataccaaactacggactgcagcagcatcctcaaatgcaatttcaaaggggctatcaaaacgccagcaatggatcctatccaagtcgaagtgtttctaaggcagctctgctgacacccggttgcatcttagctgcttgtcaaaatcaaggctacggtggtgttccagcagtgggagttgcatccgcgtcgcagcagcaacatcttcagttgaatcaaggaaatttgttcaactatccgggtgcagttagtcctttgcagtggcaacaacagcagtatcaagtgcagcagcaacacaagcaatttctactgcagcagcaacagcagctgaaggcagcacctgttggcattctgaagaattcttcaagaactggagctggtcagcagctcaatggggattactttgctgccagtcctcctccaaaaacgaagaaagtgacaatcaggagcacatctcccacccccacctccacatatcaaaaacccatagtggagaaaattaaacctttgcctgatattccgccaaagccaaataagaaatccaaactaaatacactgagaaaagagcgtcagcaactagagcagttgcaactgcaacgtgagctactcaaacagcgagaatctattcagaatcaaagaaaacaattgaagcgagggcatcaaaaccaaaaggattcgtggaatcagaaaacccatctggaacctaatacatgtgcaagcttcaatttcggaaaattagcagatcgttttataaaaggcctcagttgcgattcagatacagagactcccatgtttacggcagccaatgctaaaatcaagccacttaatcaaggacatgataaaccacattcaataaacttttcctatgagggcaacacactggagaaaaaacccgagttgaaggccaagcctaaaaagttggatttgtccaacaaggagagtaagacatcatcgacagacttgcttgatcgcgtttccaaagaatttgatttggaaattgatagcagcacaattacgctgactacagagcagaatcagtcaaaaccgccatatcaaagtcgcacttctttgaccgacaaggctacgaatactagatcatcagaccctctgaaaaagtatctaaagcctggtccacaaaaagccacatcgactacgtcagcaactagtaaaggatcgcggaaaatgaacatcaacgagctgttgcgaaacgaaaaagtcaaggggctggatgacaatcccacgtggcaatcgctaatgcaactggttgctcatatgtgcgagaccaaggagagcgagaaggtcgatagggagcaaaagaatcgattgctggcaggatctggtgccgatggtcttcagaagcaatattccgtatacctaatggttacctctgatgaagaagacgacgacaacgacgatagaactttcaccaagaccaatgatgaacagaagggcattgatctcaaattgggtaaccatcaagggattcatggggggaacgagtacgtccagcggtgtagcaatgtctacgaagcggagcatccgaggtaaattatgatgatgaatgcaaatcattatttatgcacctttttattaccataggctcattcgccacaaacgctcgaggaagagattgaatccccgcctgcgtgatctttccataccctatcccaatacgcagactcagttaccaatgagaagaccactccactggcccaagccggattactccaagacacagggtcgttcgaatcgtactcgaagtccatcacgtgctcgatcctactcctcagccaagaaggttgtggccaagcgaagtcagaggtccttgagagcaacgctcgacgagaagcgaagctggcgtttgtggcaggatcttccgatgaccgccaaagctctgaataaggcttatagccgcatgctgaacctatcaggagctatccgaaactccgcggatatatagaacatctatagcttgttttgtaaactgaccaacttcagatcatcgacgaacaccaaagtgcagctttgttttatgatattttcattgaagaacaaagctgaccttttgttttcgtctttaatctgagattttattcctgctacaaataaagactgttttcggctttaaaggttaacttcgatttttatgtcatacacacacacatcaaaaatgttgggctataccgatgtttttttacacacatttcacgcataagaaatatctctaaattatttatatccaaaaatccataaaaacaacggatgttaaaactacaagaaccagtgcaaaatggctaatccatgtgttatgcccggtcaactttctggcaaatctttcttggccattgaaaatgcaactaatggtttgagctcaagcaccgacaaccctgaaatatcaatggatctagggcagagaactaagctcaagaaaagtgcttcgttcacaggtcttggatcccattttgtcggtctgacgctgaatccggaaaggagacggagggtttctggcggggattgcgagtactatcagcagccgaatttactgcgaaatccattggtcgttaggagtggtaatataccagatgatgaagagtgccatcccaattgcccttatcgaggaaattatcaagcacaaaacaattgcgagcagccatcgaatcaatattatgatcatcgctatcagcatgaacaacctgcacagaatcaatcgtgttattgtgacaatagaacaccccaacagagccatgggcaacgcacccaatcccagccaaaggatcgacatggaaatgaacaacctgcacagaatcaatcgtgttattgtgacaatagaacaccccaacagagccatgggcaacgcacccaatcccagccaaaggatcgacatggaaatgaatgtggatgcgatcaaccatcgggcagaagagcttacaggacaccctcctcgcactacatggaatacagggagtttcagcacagtcccaaacacaatcctgctatagagaaacatagaaaatatagtgaatgtcctccagagtcacaacgaaagaatcgagaattgcaaaagaagacctcagagtgcagttgtggatctccagaacgcaaaagagttcagaaaactaaacgattgcaaaaacaaccatctgaatgtagctgtgaatctgaagaaaagcaacatgttcagagtaaacgattgaagacatcatcatccgattgcagctgtggggatgaacgttcatcgagaagaccgcaagttcatagaaaaagtaccccggacaaaagttattacctaagaaaaccaattccagcagctcaaacttgttccgttcgttgccatgctcgttcccacattcaaggaccaccacctccaccggccccaaaacgaaaatgtcctgctgcaacaccgccaccggtgtgtagaaaacccacacccaagaccaagccaacgaatacgccaaaaggtaagaccaggcaatgtggtgcctgcaatcgctgttccgacgtagaaagcgatgccaatgactacgtggagcaccatcgttcccgcacggaggtacttaggaatcccctgattcaatctcgttcggagtatgatgacaatggtgttcctccctacgagagctatagcgaagagtgtcctgtccagcgaagagaacgatctcctagttgcaagcgaaccaatccagagaaccgtagtcgtaaggaaccaccaatctgttccaatgaaaccctaatggaaaagccggtgaaaagctatcgatttagttgccccgagaatggcaaatgtgcgtcatgtcgaaaactttgcccgaaatgccacaaggctttggctcaaaagaagaaaacttcttcggccaagaagtgcgcagcatcggtggcccaaaaatgctgtcccatgtgcggattactacccatgatgccgaatatttccattccggacgttggcagtgtaagataattgaggcatagctcgagttatatccttccacaaatagattttcatatcataccattaccatatataatcttttcataacagctgcactataaacactcaactgacagctaattttgtatggtttcctcccaaagggcaaccgcattatctacaagactctgggtagatgtcgaccgaggaaattgcccaagacacgatacgaattgaccatttgctgtaagaaacgctgccagggaggtcggaactcacactacatgacgggcactgtggctacgagtttgaaaaaaagggccaaggcggcaatgactggggttaatccagtggcgccaccgcgtatgtcaagtcacagacagggttagtatgttcgtggcattcagagatacattctctttaacgcaaagatctttctttgaaggtgtcagacaatccccttttccacctctgaatatgcccagtcatccagtatcgcagccgacaggacacgtcaggagtgcgagccgagcaggtcactcgtatttagaccaggatcgctctagtccatcaacttctgctcagccacgtgagagaccagctgctccgccaccatttaaaatgcgttctccttctgcgaacgtggtgcagaagtcagagaaacgggagggagaaaagtaccagcatccttcgcagcaaagaacaaggactatgcagcccgttatagagattcatagtactcccaaggaacaagccactgcatatagatcacaaccagaaccaggaccatcaaatagatcccaaagagaaccaacgaatagatcccaaacagaaccaccagcatccagtcgatctagacctgaaacccccgatctaccaacatctttgatagcacccgcttcaatggatgcggagataaccgaacccgttcgacgtggagcttcctatttgggcactgagttgaatcccttctacaggggtagttttcttagagttcgtcactcaagggattcacctcagagccgcttgagtcccattcaccagagaggggagatctcggaggtgcccaggccgccaacagttcctggaatgggtttacccgtaaagtatacgaggttaagtcagctgcaggcatgggtatttggagaccccttcgtaaagggtaaaaccaatacgggaacctggagctggcgccaaatttttggccgcaaaaagaagagtcctactaccaaggataagccagctaagacaatggacgccagtacataggcttagagtctgatgtctaaatagtaactcttttaaaaatgaaacatttcgtcaaaaacaaaattatgggccatttccgaagttcagagcagcagagaaaagatgcgggccagggaagtcaaacggatcgttcccaagatagtcaggccgaggtgtgtccaaatccacgtcctcctccccaaagatcgtgtcctggtagccagaatgaaccagagaaaatgtacgttctgaagaactgcgatcgatgtcaggactataaggtgcaaccttgcaattggaattgtaagtgtcgaaagaaaagggctccctgcacaggtcagtgcaacatttcgtatcaggatagatcgccaacgcattcccaggacagcattacagaagcggtgataccaaggaccacgtccttgtctgagccatcaaagtccttacatgaccttgcctcagatcgtcgaatgggcggcaactgtcccatatgccaattttgtggtcaagaggagatccgtcagccaggacagaatatgtgtgcacagtgcaatgagaagatccaggcagccgtagacaattaccatgtgcagtgccaaggacaatgtcaaccgatagcggggcagccgtgtccttatcaacaaaatcaaccgcaataccagccacaactacagccagctgatcagtggcaacagttgagtggaaatccatatgaaaacggtcaacagcgtcagggagaacaaccgttcaacataattgtgcttcaggattgcaacaatcattcgctgatcgatcagctaacagctgccataaaccgcggtggcggtcaagtgaatatacaaacgggagctcagcaatctgaaaataacaactactcaaataactaccccaataactattccaataactatcaaaacaatccgctatctggttatatagactacgagtacgtagaccttaatcgcaaggaatatggttacgaagcggaacgagacgatcgctacgactatggatatgatccttggcgccaggatccttactaccaacgagatggtaagttgatacagcgtgtatacttatgttagtattctatagcatattatgtttaggctacgacgacgacgggtatcagaactacggatcatgcaacagctacgattgtcccgccaaaaacagtgtcaaccagaaattagaatccccagacaccaacaatcaaactgatcagccttggaaccagtcatacgattatggccaatccaaaagttgcacctgcagctgccaattctgtcgcaaggctttcgaaaccaaggataagctggctctgctcattgcccaggctttagagatcttcattagtaataataataccaaggaagaaaagaaaagtgagcagaccaataagactaaagcaaagaaaaagaaggtggcaaagagcataggtgcggaatcaggcgaaaagactgcaccacagtccaagcaggagagttccgagcacgttggcaatttgcgaacgaaggatactccaaggtcaaaggcgaaggaaactccaaaggaaactccacagtcaaagacgaaggaaaatgcacaagtcaaagaaactcaattgggaaacgaaaagagtagtaagggaaaatttagctaccaatccacgcaaagtaacaagacgatttccatccaaagttcggcacccaaagtagccaaacatttgggacaccaattcaaggtggcagcggcacacaacgaatccagccacgatgaagatagcatggcatcccacaacaagacaccatcatttttcctgcccaactgcgaggaacatcgctgcaagcgcaattgcaatgggctttgttcgcgaaaaccgcatgattgtggtaaaggttgcaagtcgagatgtcgcggtccctgctccaaatcaggcggaggtgatgggcgtagccgcaggaagggatcgaaaaacaagcagcgatccaatcagaggcattcccgttgccagcagtgcaaccagggtgagggtcgccagtggcaggaagttagcgccaacgattgtccggcgggcatgaaaaccgggaatcgaaatgctggaggcagcggcgttgttaagaacgcactcttgggactcagtcccattgcccactatcgacccggaatgctgcagtttcccgtgaattacctactggcgggcaccaatttccggcgaaggctcgttcgcaccgccgccggcgtaacgttgcaccagaatccgtactcgaacgaggacgatgccaaggatctgcccagctttccgtgccgccagaagactagcagccccgactgtcgagcacccgttaaaaagtggctctgagctccagaacgcgtcgtcgaattatatgcattgtagcgtatcgaaggacgtagatggttatccttcgatccatacagtgcatacgttcgcccagacgcgtagtggcttatagttttctttttccaaattcttaagtagttctgattaatatttcacaaatgcaataaaccggttaggataacagcaccatcaacaactgtcgattttaaggtttttaaactatcttgaactcgtatttgcatccattctaacgtgtaaaatgggttacagtcctagccctttagtaaatttacttgtctttttctacccgcatctgcattaatccgtttatttgtctgtttgcctcgtttgcaacaatccagcaaatttccaactaatttccggatcttccggcttccgtcttccggatgtccgtacgtccgtccgtcgttggcactgccgtttccgcttcctgtggcccagattaaccgctctgagcggctcgaatcaaaagacgtggccagcaatgagccgggacaaacaattaacgccacaggcgtttcctcatcgccaccgaccaaaagtcactaatcaccggcaatattttgggagttttcaatttcgtacctgagcggaaacgtgaacgaacaatgggctcagaatcaaattgagcctgctgcagcagcttcctgcactgcatttcacactgcctcgaaatgagaaactaatttggtatccctgctgcgttgcgacttgccacatgtcctgcggagaggctgtcaggatgagtacactctggaaaaagtcgagtaaggattgtgtaatatttttcactaatttcgatatttgaagctgaaaatatcagcaacaaaattttaaattactatttaatttaaaaaatcaattttcttacaaggaataagtagcccttgttatttggtaaaaaatcaaaatataaaatatttataaaccagctaagatgataggttcggggctcagtgtataaatgttaattgcaacg

SEQ ID NO: 37202 - DNA, 5727 bp, DROSOPHILA
atggttcggagaagggtactgactaattcggccaagcaggcttcgatgaatgcctatcagcagctgtggcagcagcagcaattcgcccgagctccattagttgccgctatgccagaatattggcattccgtgtgcaacaaatttggtggcgccatgccgcgaatggcggttttagctccgccggaagtcagtagccggaaattgagtcgtttgcgagggcagctaatgaaatcccagcgaaaaagcgcttcgattcagagcttcataccaaactacggactgcagcagcatcctcaaatgcaatttcaaaggggctatcaaaacgccagcaatggatcctatccaagtcgaagtgtttctaaggcagctctgctgacacccggttgcatcttagctgcttgtcaaaatcaaggctacggtggtgttccagcagtgggagttgcatccgcgtcgcagcagcaacatcttcagttgaatcaaggaaatttgttcaactatccgggtgcagttagtcctttgcagtggcaacaacagcagtatcaagtgcagcagcaacacaagcaatttctactgcagcagcaacagcagctgaaggcagcacctgttggcattctgaagaattcttcaagaactggagctggtcagcagctcaatggggattactttgctgccagtcctcctccaaaaacgaagaaagtgacaatcaggagcacatctcccacccccacctccacatatcaaaaacccatagtggagaaaattaaacctttgcctgatattccgccaaagccaaataagaaatccaaactaaatacactgagaaaagagcgtcagcaactagagcagttgcaactgcaacatacagagactcccatgtttacggcagccaatgctaaaatcaagccacttaatcaaggacatgataaaccacattcaataaacttttcctatgagggcaacacactggagaaaaaacccgagttgaaggccaagcctaaaaagttggatttgtccaacaaggagagtaagacatcatcgacagacttgcttgatcgcgtttccaaagaatttgatttggaaattgatagcagcacaattacgctgactacagagcagaatcagtcaaaaccgccatatcaaagtcgcacttctttgaccgacaaggctacgaatactagatcatcagaccctctgaaaaagtatctaaagcctggtccacaaaaagccacatcgactacgtcagcaactagtaaaggatcgcggaaaatgaacatcaacgagctgttgcgaaacgaaaaagtcaaggggctggatgacaatcccacgtggcaatcgctaatgcaactggttgctcatatgtgcgagaccaaggagagcgagaaggtcgatagggagcaaaagaatcgattgctggcaggatctggtgccgatggtcttcagaagcaatattccgtatacctaatggttacctctgatgaagaagacgacgacaacgacgatagaactttcaccaagaccaatgatgaacagaagggcattgatctcaaattgggtaaccatcaagggattcatggggggaacgagtacgtccagcggtgtagcaatgtctacgaagcggagcatccgaggctcattcgccacaaacgctcgaggaagagattgaatccccgcctgcgtgatctttccataccctatcccaatacgcagactcagttaccaatgagaagaccactccactggcccaagccggattactccaagacacagggtcgttcgaatcgtactcgaagtccatcacgtgctcgatcctactcctcagccaagaaggttgtggccaagcgaagtcagaggtccttgagagcaacgctcgacgagaagcgaagctggcgtcttggatcccattttgtcggtctgacgctgaatccggaaaggagacggagggtttctggcggggattgcgagtactatcagcagccgaatttactgcgaaatccattggtcgttaggagtgaacaccccaacagagccatgggcaacgcacccaatcccagccaaaggatcgacatggaaatgaacaacctgcacagaatcaatcgtgttattgtgacaatagaacaccccaacagagccatgggcaacgcacccaatcccagccaaaggatcgacatggaaatgaatgtggatgcgatcaaccatcgggcagaagagcttacaggacaccctcctcgcactacatggaatacagggacagctcaaacttgttccgttcgttgccatgctcgttcccacattcaaggaccaccacctccaccggccccaaaacgaaaatgtcctgctgcaacaccgccaccggtgtgtagaaaacccacacccaagaccaagccaacgaatacgccaaaaggtaagaccaggcaatgtggtgcctgcaatcgctgttccgacgtagaaagcgatgccaatgactacgtggagcaccatcgttcccgcacggaggtacttaggaatcccctgattcaatctcgttcggagtatgatgacaatggtgttcctccctacgagagctatagcgaagagtgtcctgtccagcgaagagaacgatctcctagttgcaagcgaaccaatccagagaaccgtagtcgtaaggaaccaccaatctgttccaatgaaaccctaatggaaaagccggtgaaaagctatcgatttagttgccccgagaatggcaaatgtgcgtcatgtcgaaaactttgcccgaaatgccacaaggctttggctcaaaagaagaaaacttcttcggccaagaagtgcgcagcatcggtggcccaaaaatgctgtcccatgtgcggattactacccatgatgccgaatatttccattccggacgttggcagtggcaaccgcattatctacaagactctgggtagatgtcgaccgaggaaattgcccaagacacgatacgaattgaccatttgctgtaagaaacgctgccagggaggtcggaactcacactacatgacgggcactgtggctacgagtttgaaaaaaagggccaaggcggcaatgactggggttaatccagtggcgccaccgcgtgtcagacaatccccttttccacctctgaatatgcccagtcatccagtatcgcagccgacaggacacgtcaggagtgcgagccgagcaggtcactcgtatttagaccaggatcgctctagtccatcaacttctgctcagccacgtgagagaccagctgctccgccaccatttaaaatgcgttctccttctgcgaacgtggtgcagaagtcagagaaacgggagggagaaaagtaccagcatccttcgcagcaaagaacaaggactatgcagcccgttatagagattcatagtactcccaaggaacaagccactgcatatagatcacaaccagaaccaggaccatcaaatagatcccaaagagaaccaacgaatagatcccaaacagaaccaccagcatccagtcgatctagacctgaaacccccgatctaccaacatctttgatagcacccgcttcaatggatgcggagataaccgaacccgttcgacgtggagcttcctatttgggcactgagttgaatcccttctacaggggtagttttcttagagttcgtcactcaagggattcacctcagagccgcttgagtcccattcaccagagaggggagatctcggaggtgcccaggccgccaacagttcctggaatgggtttacccgtaaagtatacgaggttaagtcagctgcaggcatgggtatttggagaccccttcgtaaagggtaaaaccaatacgggaacctggagctggcgccaaatttttggccgcaaaaagaagagtcctactaccaaggataagccagctaagacaatggacgccaatcgtcgaatgggcggcaactgtcccatatgccaattttgtggtcaagaggagatccgtcagccaggacagaatatgtgtgcacagtgcaatgagaagatccaggcagccgtagacaattaccatgtgcagtgccaaggacaatgtcaaccgatagcggggcagccgtgtccttatcaacaaaatcaaccgcaataccagccacaactacagccagctgatcagtggcaacagttgagtggaaatccatatgaaaacggtcaacagcgtcagggagaacaaccgttcaacataattgtgcttcaggattgcaacaatcattcgctgatcgatcagctaacagctgccataaaccgcggtggcggtcaagtgaatatacaaacgggagctcagcaatctgaaaataacaactactcaaataactaccccaataactattccaataactatcaaaacaatccgctatctggttatatagactacgagtacgtagaccttaatcgcaaggaatatggttacgaagcggaacgagacgatcgctacgactatggatatgatccttggcgccaggatccttactaccaacgagatggctacgacgacgacgggtatcagaactacggatcatgcaacagctacgattgtcccgccaaaaacagtgtcaaccagaaattagaatccccagacaccaacaatcaaactgatcagccttggaaccagtcatacgattatggccaatccaaaagttgcacctgcagctgccaattctgtcgcaaggctttcgaaaccaaggataagctggctctgctcattgcccaggctttagagatcttcattagtaataataataccaaggaagaaaagaaaagtgagcagaccaataagactaaagcaaagaaaaagaaggtggcaaagagcataggtgcggaatcaggcgaaaagactgcaccacagtccaagcaggagagttccgagcacgttggcaatttgcgaacgaaggatactccaaggtcaaaggcgaaggaaactccaaaggaaactccacagtcaaagacgaaggaaaatgcacaagtcaaagaaactcaattgggaaacgaaaagagtagtaagggaaaatttagctaccaatccacgcaaagtaacaagacgatttccatccaaagttcggcacccaaagtagccaaacatttgggacaccaattcaaggtggcagcggcacacaacgaatccagccacgatgaagatagcatggcatcccacaacaagacaccatcatttttcctgcccaactgcgaggaacatcgctgcaagcgcaattgcaatgggctttgttcgcgaaaaccgcatgattgtggtaaaggttgcaagtcgagatgtcgcggtccctgctccaaatcaggcggaggtgatgggcgtagccgcaggaagggatcgaaaaacaagcagcgatccaatcagaggcattcccgttgccagcagtgcaaccagggtgagggtcgccagtggcaggaagttagcgccaacgattgtccggcgggcatgaaaaccgggaatcgaaatgctggaggcagcggcgttgttaagaacgcactcttgggactcagtcccattgcccactatcgacccggaatgctgcagtttcccgtgaattacctactggcgggcaccaatttccggcgaaggctcgttcgcaccgccgccggcgtaacgttgcaccagaatccgtactcgaacgaggacgatgccaaggatctgcccagctttccgtgccgccagaagactagcagccccgactgtcgagcacccgttaaaaagtggctctga

SEQ ID NO: 37203 - protein, 1908 aa, DROSOPHILA
MVRRRVLTNSAKQASMNAYQQLWQQQQFARAPLVAAMPEYWHSVCNKFGGAMPRMAVLAPPEVSSRKLSRLRGQLMKSQRKSASIQSFIPNYGLQQHPQMQFQRGYQNASNGSYPSRSVSKAALLTPGCILAACQNQGYGGVPAVGVASASQQQHLQLNQGNLFNYPGAVSPLQWQQQQYQVQQQHKQFLLQQQQQLKAAPVGILKNSSRTGAGQQLNGDYFAASPPPKTKKVTIRSTSPTPTSTYQKPIVEKIKPLPDIPPKPNKKSKLNTLRKERQQLEQLQLQHTETPMFTAANAKIKPLNQGHDKPHSINFSYEGNTLEKKPELKAKPKKLDLSNKESKTSSTDLLDRVSKEFDLEIDSSTITLTTEQNQSKPPYQSRTSLTDKATNTRSSDPLKKYLKPGPQKATSTTSATSKGSRKMNINELLRNEKVKGLDDNPTWQSLMQLVAHMCETKESEKVDREQKNRLLAGSGADGLQKQYSVYLMVTSDEEDDDNDDRTFTKTNDEQKGIDLKLGNHQGIHGGNEYVQRCSNVYEAEHPRLIRHKRSRKRLNPRLRDLSIPYPNTQTQLPMRRPLHWPKPDYSKTQGRSNRTRSPSRARSYSSAKKVVAKRSQRSLRATLDEKRSWRLGSHFVGLTLNPERRRRVSGGDCEYYQQPNLLRNPLVVRSEHPNRAMGNAPNPSQRIDMEMNNLHRINRVIVTIEHPNRAMGNAPNPSQRIDMEMNVDAINHRAEELTGHPPRTTWNTGTAQTCSVRCHARSHIQGPPPPPAPKRKCPAATPPPVCRKPTPKTKPTNTPKGKTRQCGACNRCSDVESDANDYVEHHRSRTEVLRNPLIQSRSEYDDNGVPPYESYSEECPVQRRERSPSCKRTNPENRSRKEPPICSNETLMEKPVKSYRFSCPENGKCASCRKLCPKCHKALAQKKKTSSAKKCAASVAQKCCPMCGLLPMMPNISIPDVGSGNRIIYKTLGRCRPRKLPKTRYELTICCKKRCQGGRNSHYMTGTVATSLKKRAKAAMTGVNPVAPPRVRQSPFPPLNMPSHPVSQPTGHVRSASRAGHSYLDQDRSSPSTSAQPRERPAAPPPFKMRSPSANVVQKSEKREGEKYQHPSQQRTRTMQPVIEIHSTPKEQATAYRSQPEPGPSNRSQREPTNRSQTEPPASSRSRPETPDLPTSLIAPASMDAEITEPVRRGASYLGTELNPFYRGSFLRVRHSRDSPQSRLSPIHQRGEISEVPRPPTVPGMGLPVKYTRLSQLQAWVFGDPFVKGKTNTGTWSWRQIFGRKKKSPTTKDKPAKTMDANRRMGGNCPICQFCGQEEIRQPGQNMCAQCNEKIQAAVDNYHVQCQGQCQPIAGQPCPYQQNQPQYQPQLQPADQWQQLSGNPYENGQQRQGEQPFNIIVLQDCNNHSLIDQLTAAINRGGGQVNIQTGAQQSENNNYSNNYPNNYSNNYQNNPLSGYIDYEYVDLNRKEYGYEAERDDRYDYGYDPWRQDPYYQRDGYDDDGYQNYGSCNSYDCPAKNSVNQKLESPDTNNQTDQPWNQSYDYGQSKSCTCSCQFCRKAFETKDKLALLIAQALEIFISNNNTKEEKKSEQTNKTKAKKKKVAKSIGAESGEKTAPQSKQESSEHVGNLRTKDTPRSKAKETPKETPQSKTKENAQVKETQLGNEKSSKGKFSYQSTQSNKTISIQSSAPKVAKHLGHQFKVAAAHNESSHDEDSMASHNKTPSFFLPNCEEHRCKRNCNGLCSRKPHDCGKGCKSRCRGPCSKSGGGDGRSRRKGSKNKQRSNQRHSRCQQCNQGEGRQWQEVSANDCPAGMKTGNRNAGGSGVVKNALLGLSPIAHYRPGMLQFPVNYLLAGTNFRRRLVRTAAGVTLHQNPYSNEDDAKDLPSFPCRQKTSSPDCRAPVKKWL

SEQ ID NO: 37204 - DNA, 4402 bp, DROSOPHILA
agcgttacatagttaatcgcagtttcgaaatacccaacgacagggtataagaccttaacaaaaaagatgtctggtagtgtggaggcggtgggcgtggaatgtttaatgcgatttgccacacgtaactcagtctggggagactgttgaattacttaggatacagaagcccacatcgtgttctacttttgtgctttattgagccaggtgatatacaaagttatttgccatgatttgggtccaaaatgcacagcattgtcacggggtccgttaagcaatctacaaaatgtttaagtaattaggtacattagttaactaacattttgttgttactaaccagcagtcacaaatgagctgcacagagctgcaattaatgcggaaacaaagagtaatagcttcatgttgtgattgctttaataaaaccttttacattaatgccatttatgaaaaacaaacaagtattttcttatcagtttgaaatgggagattcccaataacaaagccgcgattagaataaaaatgacagagagctttgcaaactaagataatctcagttcacgtctctcacgatttaataccaattcatcacacacctatgtgcctaaaaataaaaacaaaaagaaaaaacaataaaaaagataataaaataatatatttaataaagacactaactttataaatactcagaaaaatattaaaaattaaaattctttcaatataatgccatagcagtactattctgcattaacatttaactgtctaaattattattcacttaataatataataataatataataatatttctatttaatttaaaataaaaagttgctaaacgcgcaccgttcaaaaaatgattgtgtggcggtattggatatcgataacaatattggtagtcagctgttaaatgagggaaacatttttcgttgcccaacacaccttaacttatcgatatacgaaaaaaacgataaatcttcagcaacaacaagttcacaacatttagtttatttatttatttagactagtggtaaaaaaaagttctacaaaatggctgaaaccaaagccaatcccttcgacatggacagctccagcttcgatgcggaaaagtatctggaaaggttgctcaaggtaagaacaacaaaatagtgaagtaataatcattaacttatgcactttttgttctggctgttactcacaaataaaggattgctccttaaagcaaataatggatacggaggcggcggtggtcaaggacacacagacattgcactctgatatgcagacgctggtctacgagaattacaacaaattcatctccgccacggatacaattcgccggatgaaagatgacttcaagcagatggaaacggatgtgaacctactgatgaccaagatgcaatccataacgacttttagtgagcaaataaccggaacgctgcagggcaccagatcgcaactatgtcgcctgtccgagaaacactcgctcctcaaaaggctgcagtttctctcaactctgccagctaaactgaagtccctcatcgaggaacagaactacgcacaagctgtccaggactacctgcatgcccagaaggtgttcgcccagtacggtcgacagccgtccttcgatggaatccagcgagattgcgacgccatcatggcagatctcaaggagcaattgcgaagtgactttcaaagggctgggaacacggcccaatccttgacggaaattggagagctactcctgcagctggacgaaaagacttcggatctggcaagcgaaatgctgacttgcgctggcaaacgactgcacgagcaaatcgtcatgctgcaggatcaaacagagcgtgatatgctggagtttgtggacatgggcatcgatggtttcctcaacgatctggcactggtagtgacttcctactttgacatgtttgtggccaagcactacgagcatgagcggtaaattgaacaatattttgtataatcttaattgagttttattatccattccattttcagcgatgactttcaggagaacgccctgcaggagctaaatgtcttcctcaatcagaacatcgaaaagtatctgacactcgtccaggatcgtgttgagtccgacattggctacggcgatacccaggtaatgctacgcgctctggatcgacttcatcggcgccttcaggccatgcgaaatatctgccgcggcttggaggtccaacgcaacacagtatctatcattatttcggctgcccaccaactatgcgatgcccatgccaaaaacctcaaagatcactttgccgacagtttgagtgcggttcgtctgtcgctggtttctgccaagagcgatgcagctgctggtctcaatctcggtgatctgataagcaacctttatgtgtccatggtggagaaaataaagggtgtactgcaggacttgcttatattcctgcgcaccgactggtcgtttaacatcaaggcggaacacaagggcgccctgtgcgtagagggcattcgggagaacctactcattggcttcctacgtcatattgccaaggtgatgtgtggtttcggagatgcctccagctccagtccacccaatctactgctggtgctgtcgaaaacgtgtctggaactcgagcaacagggcgttcacatactggtgagctttctattgcaactatttttgattccctaacaaactaaatcctcagattgctctggttgatgacctgtacgaaatcgactcggagaacagtgcaacgcttacccacgaaactgagatatgtgctgaaatgcgggagacggcacagtcactattggacgcctatgtgcggctgcagggcaccaatatctcgcaaatgttacgcaagagcgtggaaacaagggattggcttaactgcctggaaccacgatccgttcgtgcggtgatgaagcgtgtggtggaggaactcggcagcatcgagacggtggtggccagtctgtacgaggcaaacactaatgcaacgtcaggattccgcaccacagcgagcagtgactctagccgaaaaacatatttcagtaactttgcttccacctcaaagccacagtatcgttccaattggtcaaactacacgccttcgcagctggaatccagctatgtgtccaacatacatcgcttgttttcggagcgagtggaaatctttacttcagtagagttcaccaaggcctcaattataatgggaattattaaaattggtctaaaagtaagtgagtttatgaaatgaaggtggctatttacgtgatttatgtttctagacccttttggaatgcgtgaggctgagaacttttagcaaattcggacttcagcagattcaggtggatgctcattatctgcaaatgaacctatggcgatttgtaagcgatgaaaagtgagttagtttcgaaaactgaaagatatgataaactaaacacacttgtttggcagtctggtgaacttcctgctggacgagattcttggctcagctgtgcaaaggtgcttggagtccgttttaatggagcccaatgctgtggaaattatttgtgaacggggttagtatttgtttccacaacataaagcaacattccacttaaaatctccgtctattttgttaaacgctgctagcttaaggatctaaaaataaacaccctgtttctaatttagatagttatttaaaatgtctaggaaattgacttcattttttttttgttagaaaaatctttcaaattccaattctgccattttttaactgtgctggttacgggtacaccaaatgtaacagaaatcattttcaatctgtggtatcggcactgagacacagagtgaactcgatggtatctcccttaatatcctcctcggtatttgtcagcagaatgctgtgggattccccatcttcgcccgttgagatggtcaacacgctgggtgtctcctcctcgatggcttttcgtttctcggtgcgtgccttccttgcctcctcgaactctttgggatgacacttcctacgatgcgtgtgctgattcgcattggagttaaatgttttcgggcagtgaggacacttgtaaagcacctcgcccgtatgcatggtcatgtgttccctcagtgtgatggcctttttgaaggctttattgcacacactacattcgtgcttcctatccgtgagatgcacatatcgctggtgactcagcatggcactcctattgggcgaaacctttccacacagatcgcaagtggcagcagtgccattatgtcgccgcacatgcttcttgagactgtgcttgttcttatgccaggatccgcagatgtcgcactgaaccttgggctccgtgacaccagcgtgctccagctgatgtcgctggaaggcagctcgtccacgtataacctgggcgcagatgtcgc

SEQ ID NO: 37205 - DNA, 2087 bp, DROSOPHILA
tttatttatttatttagactagtggtaaaaaaaagttctacaaaatggctgaaaccaaagccaatcccttcgacatggacagctccagcttcgatgcggaaaagtatctggaaaggttgctcaagatggatacggaggcggcggtggtcaaggacacacagacattgcactctgatatgcagacgctggtctacgagaattacaacaaattcatctccgccacggatacaattcgccggatgaaagatgacttcaagcagatggaaacggatgtgaacctactgatgaccaagatgcaatccataacgacttttagtgagcaaataaccggaacgctgcagggcaccagatcgcaactatgtcgcctgtccgagaaacactcgctcctcaaaaggctgcagtttctctcaactctgccagctaaactgaagtccctcatcgaggaacagaactacgcacaagctgtccaggactacctgcatgcccagaaggtgttcgcccagtacggtcgacagccgtccttcgatggaatccagcgagattgcgacgccatcatggcagatctcaaggagcaattgcgaagtgactttcaaagggctgggaacacggcccaatccttgacggaaattggagagctactcctgcagctggacgaaaagacttcggatctggcaagcgaaatgctgacttgcgctggcaaacgactgcacgagcaaatcgtcatgctgcaggatcaaacagagcgtgatatgctggagtttgtggacatgggcatcgatggtttcctcaacgatctggcactggtagtgacttcctactttgacatgtttgtggccaagcactacgagcatgagcgcgatgactttcaggagaacgccctgcaggagctaaatgtcttcctcaatcagaacatcgaaaagtatctgacactcgtccaggatcgtgttgagtccgacattggctacggcgatacccaggtaatgctacgcgctctggatcgacttcatcggcgccttcaggccatgcgaaatatctgccgcggcttggaggtccaacgcaacacagtatctatcattatttcggctgcccaccaactatgcgatgcccatgccaaaaacctcaaagatcactttgccgacagtttgagtgcggttcgtctgtcgctggtttctgccaagagcgatgcagctgctggtctcaatctcggtgatctgataagcaacctttatgtgtccatggtggagaaaataaagggtgtactgcaggacttgcttatattcctgcgcaccgactggtcgtttaacatcaaggcggaacacaagggcgccctgtgcgtagagggcattcgggagaacctactcattggcttcctacgtcatattgccaaggtgatgtgtggtttcggagatgcctccagctccagtccacccaatctactgctggtgctgtcgaaaacgtgtctggaactcgagcaacagggcgttcacatactgattgctctggttgatgacctgtacgaaatcgactcggagaacagtgcaacgcttacccacgaaactgagatatgtgctgaaatgcgggagacggcacagtcactattggacgcctatgtgcggctgcagggcaccaatatctcgcaaatgttacgcaagagcgtggaaacaagggattggcttaactgcctggaaccacgatccgttcgtgcggtgatgaagcgtgtggtggaggaactcggcagcatcgagacggtggtggccagtctgtacgaggcaaacactaatgcaacgtcaggattccgcaccacagcgagcagtgactctagccgaaaaacatatttcagtaactttgcttccacctcaaagccacagtatcgttccaattggtcaaactacacgccttcgcagctggaatccagctatgtgtccaacatacatcgcttgttttcggagcgagtggaaatctttacttcagtagagttcaccaaggcctcaattataatgggaattattaaaattggtctaaaaattcaggtggatgctcattatctgcaaatgaacctatggcgatttgtaagcgatgaaaagtga

SEQ ID NO: 37206 - protein, 653 aa, DROSOPHILA
MDTEAAVVKDTQTLHSDMQTLVYENYNKFISATDTIRRMKDDFKQMETDVNLLMTKMQSITTFSEQITGTLQGTRSQLCRLSEKHSLLKRLQFLSTLPAKLKSLIEEQNYAQAVQDYLHAQKVFAQYGRQPSFDGIQRDCDAIMADLKEQLRSDFQRAGNTAQSLTEIGELLLQLDEKTSDLASEMLTCAGKRLHEQIVMLQDQTERDMLEFVDMGIDGFLNDLALVVTSYFDMFVAKHYEHERDDFQENALQELNVFLNQNIEKYLTLVQDRVESDIGYGDTQVMLRALDRLHRRLQAMRNICRGLEVQRNTVSIIISAAHQLCDAHAKNLKDHFADSLSAVRLSLVSAKSDAAAGLNLGDLISNLYVSMVEKIKGVLQDLLIFLRTDWSFNIKAEHKGALCVEGIRENLLIGFLRHIAKVMCGFGDASSSSPPNLLLVLSKTCLELEQQGVHILIALVDDLYEIDSENSATLTHETEICAEMRETAQSLLDAYVRLQGTNISQMLRKSVETRDWLNCLEPRSVRAVMKRVVEELGSIETVVASLYEANTNATSGFRTTASSDSSRKTYFSNFASTSKPQYRSNWSNYTPSQLESSYVSNIHRLFSERVEIFTSVEFTKASIIMGIIKIGLKIQVDAHYLQMNLWRFVSDEK

SEQ ID NO: 37207 - DNA, 4312 bp, DROSOPHILA
ttagagtcaattaccgtggattgcaatgcccacgcagtgaagctaaagccagaggcaatcagcattatcaaaggcttttaattgtcataaatctgcgaaagttgttaaaaacccatttaaaattgtcaccgtaatagcacactcaagcggctcagtggcatttaaccaactatctgccacatcccatcgcattccatccctttccctcctccgccaactgatgcgttttattttcttggctcgatggcttggttgctccatctttttgccaagttcagttgcagcctgccagagatgttaattagaaaactcttgaaaattattaaaaactttccaaagctgtcagacaggcgagagctgaagagatagtagtggtaaaatagaacttcaaatagttgccagctcggtggaaaatgtttttaagaaaattttctagctcctttttgatggcttctcaaagtatatttcacttgagaaattacttttaaaatgaaggcggcagagtttaatattgtttgtgagctggcataaatccgtactttaatttaattaaatataatcaaagatctctgctgcctttccagattaactcagccggcttccgtgtttcaaatttcacaacttgactcaatttgcgttgtctgaattacattacagcatgttgacatctctcctatgcctcaaccctttacaaactggcttatcgtccagctcgaataatatatagaacttctctctaatggatctgtatacaaattgcctctgtttctgaacttgattcggattcagtctacggcatctgcatgccacttagcaccttttattagtgccaattaagactgatttcacgatgcgttcacgacgagattacagaccccagactgccccaaactagataatcaaccgcagagaatttgtggcgcgcgattctgacactgaatccgagcatccaagttttcaggtacatatctcgattgcggttagttaaacgcggcatcgcaaagtgaacagttctcgtcatgacgcagctagagatttccaagaagtcggaaaaaccagcggaaaaaccggcggagcaatggggaaatggactcgaatttcttttctcctgcatttcattatccgtgggattggggaatatctggcgttttccctacattgccttccagaatggcggcggtacctttgtgataccgtacctgattgccctcctggtaattggacggcctgtctactatctggagatatccctgggccagttcacgggtcgcggcgtggtcaaggccttcgatatggctcccctgctcaagggcgtggcattgggtcaagtcctggccacagccgcctccatcacatactactccagcattatggctttgactctacgattctggctggcctccttcggctccgagctgccatggagcaggtgctgggagagctggggcaccgattgccacgacggcaatgctcaaaatagcagtggaaaaatgtcaccggcacagctgtactttgagcaagtacctccacttttaaatcattcaagtagttgttgacagcattttattaaactaattaagacaagcagaggatttttagagaacattttcttggcagacatattatacattaatgccatcacaaattcatatagactaggctttattttctaaattgttataaatgattttatgcttgtgctctacctttccagacgtgagatccttcatgaggtgcccaacatagacaacggactgagtctgcccaactggcaactggtggcctgtttggcgattgcttggctggtcatcggaggagtcctcattcgcggcattaagagcagtggcaaggcggcctatttcctgggcgtatttccctatgtggtgctgctcatcctgctcttgagagccgttaccctgccaggagccatcgatggcattatatacttcttcaagccacagtggcgagagctgctgaatccactcgtttggtatgcagccgtaacacaggtcttcttttccctggccatctgtttcggcactttgatcacctatgccagctacaacaacttcaaccgcaacgtatacaagtgagtttattggcttaagataagatacggaatgaaagcttagaatgcatattactttaacaatttcattacgaaatctaaagctaagccaagagatttattcgagcaataagattactaaccgccacaccccacagtgacattgtgataatcaccaccatggactcctgttcatccataattgctggctgcattacctttggaattctgggcaatctggcacgcgagactggcaacccggatattggcagtgtggtgaagggcggcgcgggattggccttcatctcgtatccggaggccattgccaagttcgagtatgtgccacaggtaaggtatcgagaagagccagcgccatgggcgccctaaagcacaactacctaaagatgttcgcggtccttttcttcctcatgctattcgtcttaggcattggcagcaccgtgggcatgggatcatgcatcctgcgcgtcattcgggatcaattcggattacgctccccgcccatttggaaactggccagcggcctgactgttttaggcttctcggtgagcatcgtttacatgaccccgggcggtcagtttatcttgaatctagtggatttctacggtgtctccttcaccgctttgatcctggccattggcgaattggtggctgttgcatggatttacggtgggtttatatatccaacgtgggataagctattgttcaaagtcctttttgtttcacttttttaggagttaatcgcttttgcgaggacatcaagtttatgatgggcattgaaaccggttggtactggcgcctctgctggcgtttcattacacctggtttgatgaccgccgtgctcatctacatgctgctcgatatgtccgctctggagtacaaaggtgttggctatcccaccttggcacacggtaaggccacgtcttcctgcacttcaattttattgaagggtttatattgtatccgtgttctcttctctccccactaacagtttttggctgttttttggccaccttggggctgattcaactacccggctgggccatctatgccatctataaaaagcgtggccataacggcagcttctggcaggtatgtacacccccccccacccctcctttccaggggctttatatccatttcccgtcttttagagaatacgtgccgcttgcaagccgtcggacacttggggaccggccaacgttcagctggatgccaccatatagaaaattagctcggtacccaacactgcgtatacgtaatggctccagtagtcaggggcattattatttgatatggtctagatgaaaatgggtagaataaagtgaaatatatggggctcgtggagccaaaaacaaaagcgggcttattctggcggaacaatttaactgcccgaaggagttgagctggcgaatggaggaagtcgaggaggaggagctgctgcaagcacttttaattaccccagggcagagctccagttgggcgtggcagctgcactccttctcagttgtgtttgtgttagtccgcttggcatgtcagtcatgtcagcaatgcggaaatgcgcaaatactaaatgaaaacaagtagcagatgttacttttccttacgacgaatcttataatactctttcatatgaaaatgatttctttaaaaaattgcacaagttcccatttggatgatttatatatatttttaaagaaatacttaagaatacgaatatttaatattcatttattgtacaaattaaaattttacaatcagatgtaaaaaacgaaatgttattcggaaagttctacgttttccattaaattggccacaaattgcaatatccttttgtaaggatacaaagtgctgcagcgcagacaagcgggatgacttggaaaaggatgaaaaaatggggactagagcacagcagggcactgtaaataaaacatttggttagctgctgttcgacacattcgcattcatctggcgggtggagcgaggtcgcaaatcagaatgtctgtggcatgtgacaaagttgaaaagtaaatatgcaagagggcaaaaaaatggtggcatggtgtgtagaaggggaatgggatttcaggaagaggatacaggcgctcctcactttttggcagtccgctgcaatgccccacacatatgacagcgcatttatttactacaccatttttgttgtactatgtgcccgtttgttggcggaaaaaagtgacagtgttaaat

SEQ ID NO: 37208 - DNA, 1615 bp, DROSOPHILA
aaagtgaacagttctcgtcatgacgcagctagagatttccaagaagtcggaaaaaccagcggaaaaaccggcggagcaatggggaaatggactcgaatttcttttctcctgcatttcattatccgtgggattggggaatatctggcgttttccctacattgccttccagaatggcggcggtacctttgtgataccgtacctgattgccctcctggtaattggacggcctgtctactatctggagatatccctgggccagttcacgggtcgcggcgtggtcaaggccttcgatatggctcccctgctcaagggcgtggcattgggtcaagtcctggccacagccgcctccatcacatactactccagcattatggctttgactctacgattctggctggcctccttcggctccgagctgccatggagcaggtgctgggagagctggggcaccgattgccacgacggcaatgctcaaaatagcagtggaaaaatgtcaccggcacagctgtactttgaacgtgagatccttcatgaggtgcccaacatagacaacggactgagtctgcccaactggcaactggtggcctgtttggcgattgcttggctggtcatcggaggagtcctcattcgcggcattaagagcagtggcaaggcggcctatttcctgggcgtatttccctatgtggtgctgctcatcctgctcttgagagccgttaccctgccaggagccatcgatggcattatatacttcttcaagccacagtggcgagagctgctgaatccactcgtttgtgacattgtgataatcaccaccatggactcctgttcatccataattgctggctgcattacctttggaattctgggcaatctggcacgcgagactggcaacccggatattggcagtgtggtgaagggcggcgcgggattggccttcatctcgtatccggaggccattgccaagttcgagtatgtgccacagatgttcgcggtccttttcttcctcatgctattcgtcttaggcattggcagcaccgtgggcatgggatcatgcatcctgcgcgtcattcgggatcaattcggattacgctccccgcccatttggaaactggccagcggcctgactgttttaggcttctcggtgagcatcgtttacatgaccccgggcggtcagtttatcttgaatctagtggatttctacggtgtctccttcaccgctttgatcctggccattggcgaattggtggctgttgcatggatttacggagttaatcgcttttgcgaggacatcaagtttatgatgggcattgaaaccggttggtactggcgcctctgctggcgtttcattacacctggtttgatgaccgccgtgctcatctacatgctgctcgatatgtccgctctggagtacaaaggtgttggctatcccaccttggcacacgtttttggctgttttttggccaccttggggctgattcaactacccggctgggccatctatgccatctataaaaagcgtggccataacggcagcttctggcagagaatacgtgccgcttgcaagccgtcggacacttggggaccggccaacgttcagctggatgccaccatatag

SEQ ID NO: 37209 - protein, 133 aa, DROSOPHILA
MGKWTRISFLLHFIIRGIGEYLAFSLHCLPEWRRYLCDTVPDCPPGNWTACLLSGDIPGPVHGSRRGQGLRYGSPAQGRGIGSSPGHSRLHHILLQHYGFDSTILAGLLRLRAAMEQVLGELGHRLPRRQCSK

SEQ ID NO: 37210 - DNA, 5872 bp, DROSOPHILA
tcaggacttgccctgccgttttgcatttgcagttgggcaaataatgtttcacaacacactgcacacggttaaacttttcctgcttttatatccccagctagttgcggcacacacacgcgagatgaatggggtttttcagcgggcgcaaatagaggagcatgaacggagtccttccagaaattcgcgtgggaaacgggcggagcgggaagtccctttgattttacacagaaacgcgcgtttcgagtgagcgggacggagaagcgctccgcaatgccgtccgctgccgtggagaattttcgcgcaactgaatgcttgtcgagagcttttccgcgcttgctgggcttcgagagctttttgcgccgagcgaaaacgaaattgagtgcaattcggtcgagtggttgctcaaaagaaccgaaaggacgaagggtccttcaaacaggataaacaagccaggtaaacacgattgtcattggcgacaggctttaaaatctatagcgacaagcttcgctttgctgatcctatattcatggcaaattcatttaatttaatctccttaaataagaattacttaacatttaacattaacgttaattgaaaagtaaaatgggtagagtataacttacacttaattatgtgtactttcacagagttaataaaagtactaatttcgaaatatttgaatatttggttattcagactgatcagttttaaaatttttaaatcgaaataccagctagttgtaaatttccaatcataattgggagatcttaaatgcagatctgcaatagcagataaccatcgtcacttagacttcctataaacaatacctttgcaagattataataataagagaggcattcggtgagacctcaaacgagagataacgcttttgacagttgactcgactgctcgttttggagccgaatcaaagccgattgcccggcttaagtcgattgcggttcgagaactcgcgatttcagaaccactgatcagtcagtcgggagttgtgcagccggtagatcgtttctccaggatttcaaggcagatttggaagaaagttctgccaaagtgttttttattatatccaaaaatcttctagtaactgcattttttgggcaaactatcggctggtacgagagtttaaaagaaggcctatagaattgcacaaaatagcgtgagaaaggcaatcgaaaagaccggtaagtgagaattccgcataagtcggtttgtgcggccgctccgctgattcgcgatcgccattatgtcaggaaaacgaaactaccgttatcagctcgattccccccagtgccttgcactttatactttcgctctgcttcccctacttttccttcgccccctttcacatcgtattcctcactcgccgaagagcagacttctgcacttccatctcgttacactggctaacagggtttcgctacgattcattcggagtgcggcatgtgtgtggcagaatgtttttaattttgcattttatgagagaggaagatacactttgatcccgagaacaaatttttgtgataattttattatttttgttattttattgagaattcgcgtattttctgggcgatgcaataagcgctaaaaatatcaaataattgagtgttatgcttgtgtaactttatattatacgccagatttctttcatcgcgccaagaatgagaatggatgctatcaatttcgaaagtaatttatgtgttcacaagtgcgagcaaacgatgggcaagcctagtgctcgcgataggtattatttcaaatcaccaataacctaactagtaacctcacccacacaacgattgctccgagacggagatctcccgtaatcaacgattggaactattccgccggcttgaatcgtacaaagttcggattgtctaattataaaatacttaatttgttttgatttttgttgctgattctgcagctaggtctacttaatttcatttgccgttagtcattgtcggcggaaggcattagagctatacgtacatatagcgactataagttttgccagacggcagcaacaaaaaacaaaagcaatcctccatccgaaactcaaacaagtgcgaagtaccgatccgctccgataagcgatccactttcggttcctctggcagacgacctcggatcgtcaggtttattaataaggcattaccgtattcttcgctcgttcagcacctaatcacgcggcaatcccaaatttatggcagctctagtaattgccgagaattaaattgccattaagtcgaattatagacaagattgcatattaaagccacaatgtgcactaaaaaagtgcatatattgacatataacagcgaaaaattatacagatgaaacgtcctagcagatataccgcactacttacagttgcagttgcttatctcacttgaatacatccaataaaatttgctttttagaatcagcaagatggcacaggagacgaagaccgtggcgacagccaaagaccagaaccaacgagaccatatcgacgaggaagaagtcatcgaactccacgagtcacgcagcttttacgatcgggttcgcgaacaggcggagcgatttgctagcacacgagttggccaattcgtgatcgaacgggctgataaagcgctggccatgatcgaggatactgccaagtggagtcttccgcaaggtgagcaaatatcaaatattatatcctaaaattaatatgaaaaccttaactaaaaccttaacctaactaaatttgcctccctcttgtatatagacaagtcttctgctcccttggaacgccccctgccttgggctccattcctgatgctcatcgtcctgctgcggctcacacgcatttggttatcggttggcgccctgatgatcggcaatggtccaatatctcctacggatatggtatactttatacagactagacgccgcaagctgcgggccattcgggttcatggcctaaaggtgatgagacggcgccagcaggaggtgtcctatggcagtggcaagggtatgacccagaagctcaatcagtggttttcccgagccatgtgccgtccaggagttcagcaggatagcagcagtcgccgggtgtttgtccgccattcggagcaggtcagtttgaggctttgaaaatttcgattaactaataaatgtatctccaaattgattgtacagggtttaagcaatttcgtagttaagcgccctcgagaggaggactgcaatgccgatgccgacctgaccatcgaccaaatgctggccaagtatgccaacgagaattccgaagatgactccgactttgtgcccaatgaggaggaggaggaggaggaaagcagcagcagcagcggggaaagcgaatccgaatccggctccagcgaaggaataagcagcggcgaggtggatgaggttgtcagccaggtgggttacacaatagcctcttactagtgctccaattaatcaaaatgataccttaagcccaagcagaagtcagctggagcggtggtggaaaacggagtgcacaaggccgaggagaaggaaaatgataagggaaaactgaacataacgacaaccagcaatggcaacaacgacaaggagcaggcggatgttggtaatggacattgaacattattaagactctcgtgcgtagccccctaagtctaggttaactccaagtatcgattatcgaattaagcgttgatgaaaactgaacttgaaacgttgtcatgaaatacaatacaataccgatacaacaatacacttagtcatttccgtagatcatccattcatttgcaggcccgaaaacgaaaaattcaaaattagccaccaagccacttgtgagtttggccccctcgtttcatttccttcccgttgccctgacctcgaatctctctctgtttctcccccattcccaaccgaatgataacgatcgcagccgctgcccagccggatgaggagtggaaatcttcgccaggacacatgagcgcagccgtgatgaatacccgactgtacaacaatactgccgctgcaggtaactcacgcgagaatcgctccacgtcgtcccaattaacattttaacgttagtattctgtctctgtttctgttactccgtgcatgtgttcaaacacaacagtcaccactgatcctgatccagaacctgacactcagcctgaacccgaattcccatccgaacctacatcccagtcccaaccctcaaccgaagaaacagatgacgatgcagaggatagttgcagctccagtggcagtaatcaaaccgggataactgtctaccaggccgatgaaacccagccagatacccaagctgaacagatccttgagattgccgccacgttaactgattcacatctatccaactatcccactgttgacaccctaactcctgccacctcctccgaagacatattctatagccctattggtgtgtgctcttccatcttagtctcttctgcttgctaacttgccgacataatatttttaagcatttttaatatcttaaatacttatcattccccatttaggttcacccacttgcttcaatactagcctaggaacccaggctctcctcaagagggccagcattcaatccgtcctgggcaagtaattaaagagcattacctgtttgtaaactggctaatatcactgtgttcctcagcccactccacgcccacgacggagatgagggatcaacccattgaagaggcaaacaactcggtgccccaaacacctgagaccgagaaaactcagccccaaactcccaaggaagtccataatcagaatcagcagcaaaatcaacagcagcgccaacgcaatcatccccaccaacgttatcgtggacgcaatcggcgctagtccttggaaggatatccttgtcatatcgtttgaatttcctcctagccagctagccgttcttctattttttttacattcccatattgttagtgaatactgcgagtaaatctctgaacttaaccgatagtctgtacttgagcttaggataaacatatcacattaagtcaccgactggttccaatttaaagcgaatgtcaccgcagggtgataagataatggtgctttcatattcaatcggagtttcgggcagccagctgaccttgtagcttcgcaagagtcgcaccagcagcgtttcgatctccagctcggcaatccttttgccaatacaggttcgaggtccaaagccaaagggcaggtatacgaaggggttacgggttcgggccgctggacaagcctggatatccggagctaagtcggacttaagccagcgttccggtatgaactcagagctctgagcaaagtatttatcgtcgttggacagctccaggacacccatcagaactccagtgccacgtggcacctgatagcccgatagcactagatccttgggtgttatgcgaaaatttcccggcgtaatagatgtgatgcgcagaccctccttgatgcaggctctcagataaggcatgtttttggtattttgatccgtcaacgagtccttggtggtgggcaatatacggagtagctcccgacgcagtttctcttgctttgatggattgcgagccaagtgatagaggatagtcagacaagctgatgaagtctaaaagaaggcatttagtattgaatcgtaccaaatatattaataatcataccgtatcaattccagccataagcatgtccataaccattgtcacagccaccttcttgttgtgttccagcaattgctccagaacgcattttgtcttaccgtcatcatttttaccaaagcctctcattgccgtctctatataatttgaggtaatatcggtaatattgtcgtaggttttgagaaacttcttgaagc

SEQ ID NO: 37211 - DNA, 1757 bp, DROSOPHILA
ggagttgtgcagccggtagatcgtttctccaggatttcaaggcagatttggaagaaagttctgccaaagtgttttttattatatccaaaaatcttctagtaactgcattttttgggcaaactatcggctggtacgagagtttaaaagaaggcctatagaattgcacaaaatagcgtgagaaaggcaatcgaaaagaccgaatcagcaagatggcacaggagacgaagaccgtggcgacagccaaagaccagaaccaacgagaccatatcgacgaggaagaagtcatcgaactccacgagtcacgcagcttttacgatcgggttcgcgaacaggcggagcgatttgctagcacacgagttggccaattcgtgatcgaacgggctgataaagcgctggccatgatcgaggatactgccaagtggagtcttccgcaagacaagtcttctgctcccttggaacgccccctgccttgggctccattcctgatgctcatcgtcctgctgcggctcacacgcatttggttatcggttggcgccctgatgatcggcaatggtccaatatctcctacggatatggtatactttatacagactagacgccgcaagctgcgggccattcgggttcatggcctaaaggtgatgagacggcgccagcaggaggtgtcctatggcagtggcaagggtatgacccagaagctcaatcagtggttttcccgagccatgtgccgtccaggagttcagcaggatagcagcagtcgccgggtgtttgtccgccattcggagcagggtttaagcaatttcgtagttaagcgccctcgagaggaggactgcaatgccgatgccgacctgaccatcgaccaaatgctggccaagtatgccaacgagaattccgaagatgactccgactttgtgcccaatgaggaggaggaggaggaggaaagcagcagcagcagcggggaaagcgaatccgaatccggctccagcgaaggaataagcagcggcgaggtggatgaggttgtcagccagcccaagcagaagtcagctggagcggtggtggaaaacggagtgcacaaggccgaggagaaggaaaatgataagggaaaactgaacataacgacaaccagcaatggcaacaacgacaaggagcaggcggatgttgccgctgcccagccggatgaggagtggaaatcttcgccaggacacatgagcgcagccgtgatgaatacccgactgtacaacaatactgccgctgcagtcaccactgatcctgatccagaacctgacactcagcctgaacccgaattcccatccgaacctacatcccagtcccaaccctcaaccgaagaaacagatgacgatgcagaggatagttgcagctccagtggcagtaatcaaaccgggataactgtctaccaggccgatgaaacccagccagatacccaagctgaacagatccttgagattgccgccacgttaactgattcacatctatccaactatcccactgttgacaccctaactcctgccacctcctccgaagacatattctatagccctattgcccactccacgcccacgacggagatgagggatcaacccattgaagaggcaaacaactcggtgccccaaacacctgagaccgagaaaactcagccccaaactcccaaggaagtccataatcagaatcagcagcaaaatcaacagcagcgccaacgcaatcatccccaccaacgttatcgtggacgcaatcggcgctag

SEQ ID NO: 37212 - protein, 515 aa, DROSOPHILA
MAQETKTVATAKDQNQRDHIDEEEVIELHESRSFYDRVREQAERFASTRVGQFVIERADKALAMIEDTAKWSLPQDKSSAPLERPLPWAPFLMLIVLLRLTRIWLSVGALMIGNGPISPTDMVYFIQTRRRKLRAIRVHGLKVMRRRQQEVSYGSGKGMTQKLNQWFSRAMCRPGVQQDSSSRRVFVRHSEQGLSNFVVKRPREEDCNADADLTIDQMLAKYANENSEDDSDFVPNEEEEEEESSSSSGESESESGSSEGISSGEVDEVVSQPKQKSAGAVVENGVHKAEEKENDKGKLNITTTSNGNNDKEQADVAAAQPDEEWKSSPGHMSAAVMNTRLYNNTAAAVTTDPDPEPDTQPEPEFPSEPTSQSQPSTEETDDDAEDSCSSSGSNQTGITVYQADETQPDTQAEQILEIAATLTDSHLSNYPTVDTLTPATSSEDIFYSPIAHSTPTTEMRDQPIEEANNSVPQTPETEKTQPQTPKEVHNQNQQQNQQQRQRNHPHQRYRGRNRR

SEQ ID NO: 37213 - DNA, 3286 bp, DROSOPHILA
ttttcagttattaggctataaaattatggtagattaaggtatcactggtatctctgtttgtgaagcgaaataagcccttgaagtgagtgtaaaatgaaacatcagtttggaaattgctcgtgtgaatttagttatgcacgatatttcacgcaattgaagccattcgcatgttgcccttcattcattcattcagttgaggaaagaggcatcgaatgaagattgcttcgaagggataaattatgttttagttttttaagtttaataaattcaatcgttctagatgctttactttaattttcacttgaattgaaactgcacaaccagcgtaaaagcttacagttttggagcctctggtctgggcactcaacgtcaaaccgacacacccacaaatttctatacaccccccgtcaaacacacacacaagcccccacatacgccgaaggtcaatgaaagtaaataaaatcgaaagttttgcccagattgataagcgaaaccagcggcacgtgtcgctcacatataacataaatcaaataaaagcattggaaagaccagagctgaaaagcttttgccggcgtcactggaactcaagataaaatatatgtataatgtgctaaccatatggttgatagctagcagagctacttgttgagaacttgttttgatctagcagagttgtcgcgacttcagaagaattatatattatattttattatattattatattatatatattgatatatatttaagttttttaaagatttttaaaatatataaaaagttaatattattacttattgtttaacatatcgaacttttccaaataaataaataaataattaatagatataaagatttgtttggaaatggttttactatattaattcaatgtattaattaattaatattaattagtgtagccgacaaccctcgagcggccgctggaatgagctgaaaataagcgaccttccaacagcagggagcagtgtgcttctgacagcggtccgatcacgtagaacttttgcagtttcagccgtatccccttagatttcttacaccaacaggtgggtgaaatctggtggctagttgcctatttgaagtgattacataacactgtagaacttttcgcagacatgtcgctccgtgtgatgtcccccgctatgctgaatgcctggagccagaccctcgtgagggccatgtccacccagggcggagccaagaacatcggcttcgtgggtctgggcaacatgggtgccaacatggccagcaatctaatcaaggccggccacaagctgcatgtcttcgatatctccaagcccgcctgcgatggtctggccgccaagggagccaccgtctacgccaagacctcggagctggccaagaactcggactttgtgatcaccatgctgccgaacaatgccattgtggatgcctcctacgatgagatgactgccgatggcgtcaacaaggacaccatcttcattgactcgtcgacgatctcgccggatttggtcaagtcgttgcagaagaagatcagcgccaagggagctcggtttatcgatgcccccgtttccggcggagttcccggcgccgagcaggccaccctcaccttcatggtgggcggcaccgaggcggagtacaatgccgtcaaggccgtcctagagtgcatgggcaagaagatcacccactgcggcgtctatggcatgggccaggccgccaagctgtgcaacaacatgatgctggccatctcgatgatcggtgtttcggaggccatgaatctggcggtgcgccagggtctcgatgccaatgtcttcgccgagatcatcaactcctccaccggacgctgctgggcctcggagatctacaaccctgtgcccggagtctgccccagtgccccagccaacagggactacgccggcggtttctcctcggctctgatcaccaaggatctgggtctggcctccggagtggccaacgcttccaactcacccatcccgctgggatctctggcgcacaaggtctaccagtcgctgtgcgataagggtctgggcaacaaggacttctccgtggtgtacgacctgatgaagaaggagaagttcagcgtttaggttactcacagactacaggttgtggtggccacaaccacgtcatgtccacatccaaaccagtcctgcatttaaatatagcactaagttccctctatttcgatttctattgtgactgttccctgttctatgcaaataatacgtacatatattaaagacgtatcgtattgagtgaaaaagttccatgctgttgcgtaatcgtggggctggtctgattaggtctgggaatcgtctgacgaacggaactccgagtgctgataagcacctacaaaaaagcatctgggttgctatattttattgccacttatgagacccctgcaaatacaattcctgattaggggttatctccagcactcgtggcattagattccacatggagatcgtttttaattcataaagcttgccaggtaaacagagcatagagtcgagcaaaacaaacaacattgaaagatcccaatggaaattatggcgtggttatcaaaagctcacggattgagaagcactggcggaatgtttcgcaaagtaattttatgtgggtagcactaaaacttacagtttgaatggctctttgttgacatactttttgagatgggtacaatctaataagaaaacatatatagatataaggatttgcatattaaattctcacagctttagtaactatgtttaaatattaatatttgtttaccgaaaaaatggggattcgttttataaaacgtagagataagtagtggaaccactctgataagccatatcaaagaggggtgtttatttaagtggctagttcgacactcacacatcccagcttttatcttctaataattttctgccacagaaagcttaattggcaagtaaacagaggaccgagcaaaacaaacaactgttttgtggcaactgtagaatctgcatagaacccagacagttacagctctacagttttagcatcactccgcacagtggtcaatgtatttttcaaagcgacatattttgagcgaaatccaaaaatatttttatttttacaatcatatatatatatatatttaaaaataacaaacttaacttaggtgctaattaattaattgagttggtatgtatgtatataaaaactttgttgttgctctttttgtggggtataaaatagttcaactatctaaaatgtatcaaatcgatcaatcggagtgggt

SEQ ID NO: 37214 - DNA, 1219 bp, DROSOPHILA
tccgatcacgtagaacttttgcagtttcagccgtatccccttagatttcttacaccaacagacatgtcgctccgtgtgatgtcccccgctatgctgaatgcctggagccagaccctcgtgagggccatgtccacccagggcggagccaagaacatcggcttcgtgggtctgggcaacatgggtgccaacatggccagcaatctaatcaaggccggccacaagctgcatgtcttcgatatctccaagcccgcctgcgatggtctggccgccaagggagccaccgtctacgccaagacctcggagctggccaagaactcggactttgtgatcaccatgctgccgaacaatgccattgtggatgcctcctacgatgagatgactgccgatggcgtcaacaaggacaccatcttcattgactcgtcgacgatctcgccggatttggtcaagtcgttgcagaagaagatcagcgccaagggagctcggtttatcgatgcccccgtttccggcggagttcccggcgccgagcaggccaccctcaccttcatggtgggcggcaccgaggcggagtacaatgccgtcaaggccgtcctagagtgcatgggcaagaagatcacccactgcggcgtctatggcatgggccaggccgccaagctgtgcaacaacatgatgctggccatctcgatgatcggtgtttcggaggccatgaatctggcggtgcgccagggtctcgatgccaatgtcttcgccgagatcatcaactcctccaccggacgctgctgggcctcggagatctacaaccctgtgcccggagtctgccccagtgccccagccaacagggactacgccggcggtttctcctcggctctgatcaccaaggatctgggtctggcctccggagtggccaacgcttccaactcacccatcccgctgggatctctggcgcacaaggtctaccagtcgctgtgcgataagggtctgggcaacaaggacttctccgtggtgtacgacctgatgaagaaggagaagttcagcgtttaggttactcacagactacaggttgtggtggccacaaccacgtcatgtccacatccaaaccagtcctgcatttaaatatagcactaagttccctctatttcgatttctattgtgactgttccctgttctatgcaaataatacgtacatatattaaagacgtatcgtattgagtgaaaaagttcc

SEQ ID NO: 37215 - protein, 324 aa, DROSOPHILA
MSLRVMSPAMLNAWSQTLVRAMSTQGGAKNIGFVGLGNMGANMASNLIKAGHKLHVFDISKPACDGLAAKGATVYAKTSELAKNSDFVITMLPNNAIVDASYDEMTADGVNKDTIFIDSSTISPDLVKSLQKKISAKGARFIDAPVSGGVPGAEQATLTFMVGGTEAEYNAVKAVLECMGKKITHCGVYGMGQAAKLCNNMMLAISMIGVSEAMNLAVRQGLDANVFAEIINSSTGRCWASEIYNPVPGVCPSAPANRDYAGGFSSALITKDLGLASGVANASNSPIPLGSLAHKVYQSLCDKGLGNKDFSVVYDLMKKEKFSV

SEQ ID NO: 37216 - DNA, 3810 bp, DROSOPHILA
ctgccgccttctacttcttgggcaatcttctcttcgtcatatttggacgcacggaggtgcaatggtgggactccccacgggacaataaggaggatgcggagcagggcacgcctctggcgcccaatggccaggtcaaatagagcctgggatggcatgttcataccgcatccagaatcatccgggctgttgtttcttagattcgtaggcgtagttagttagttagacaccagacaagctgaaagttaactttagtgacgatcgcgtgcttccattagcgatattatacggtaattgcttagtcctaaggcagcgtaaattattattgtttgcagtatttccataatgtacataatccaaaaaaagaaagaaagaaagaaacacaaactatcaatcaaaccaattaaacgtgcaacttgagaatacgttcagtgtaaatagggacaaagcccgcggcgagctgcagcatcaactctagtaattgttatgttttagttttaagttaggcattagcgaaaacttgtgatgaaaaaagtaaactaaaaaaggcaaaaaatgaataatgaagacaacactagccatgaataaagcagctcacttcgcagctgtgaaagagtcaaaatgtaacgaaatcatttgtgttttatttgaactggggtttgaatttgatagtccgacacttgttgctatcgattgaattgcactatcaaccctaatggaactatcgaatagtagcgttgaattatgagatttcttcactagttggttttggttatgttagtatcttattgattttaataataatagtaataataattagaaagacaggcttttatgcttgttatgaacattttgtttaacaatatacaagttttaaactgcagtccaccctaatctatcgttgcacttgttgaagcaatagtgtcgatagtgccgcctctatctaagtgggcagcagctggcacttgttgttgtcatcagctgtgttatgtttagacgctagttccatccattcccagctgcccctagcaagtatccaacgcatcacacaagttggctacgtggaagacactgcacctgcaatatggtgctgggatgcctgccatgctgcaatcacaacggctaccagcagatcgggaacacgggtgggtggtgacatgaccttttggcctttgttaccgcatccgctttgttaattacgcgcaccttttgcaggtccacggttcggagtgcgtcatctgcagtgcatccttgtgttcttcggactggccgtggcctactcccttcgcgttaatctctccgtggccattgtggccatgacggatcgcaatgccagcaatccggattttcctgtatgtatgcagataagagcgcagaatgagtcaacaattattttcgcttgcattatttaatgaggaccataatttaaatttaaatcaacttaaaatttcgtaggaattcgactggaatgagagtacaaagtcgtacctgcttagtagcttcttctggggctacgtggtcacccaaatacctggaggttacttatccgccatttacggtgccaagtacatgctcttctacggcgttcttatctgctcctgtttggcattgctaacaccgttttgcgccgtaaacggtggctggacagtggtggtggtgctccgtgcggtgcaaggactctgccagggcgtcattttcccctcgacacatacgttcctatcgaagtgggcgccggctgaggaacgtggacgactggtgggctacacgtactctggctcccagtttggcaccgtcgtaatgctgtcagttagcggatacattgcctcatcctcactgggctggcccagcactttttacatacccggatgcgttggtatcgtttggtcattcgtgtggctatacctatgttccagtacgccggcgcaacatccaacgataacgccaaatgagcgaaggttcattgaatcttctggacaggcgaggagaccatcggatgcaggacgcgaggaacagccacgtccaccgactccatggtggcgcatcttcacttccgtaccttttctagtgctcgtcctggcgcactgtgctaacaattggggcttctggactttgcttacggagattcccacctttatgaaaaacgttctcggcatggacattaagaataatggtccgctttccgcgctaccctacttcgctatgatcctgcttacctgtgttttcatctggctgtcagacacactgaaacaaagaggaacagttatccccctgggattctccaggaagttcttcaacacgctgggaatgtggcttcccatgctcgcacttatcggactgggatacattaccgagggtgaggcgaatgtccggctggccattggattactaaccgctgcggtggccaccaattcggccacttatctgggcttccatgtaaaccacatcgatttgtcaccgaactatgcgggtacactaatgggcattacaaattgtgcggccaattttatgagcatactggcacccctgatagtaggactaatagtctgggatgaggtaggaaatgcgaccttttaatctttaatggttttttaaatgattttcgttatcctttccagacaaatccggcgcaatggcgaattgtattcttcttcaccgcgtttgtttacttcattgggaatctactgtttatgcttttcggacgcacaagggttcaaccgtggaatagtcgccccacaacgagaactccgtcgcctggaggtggtggagagcgggatgaaggtactgaggatcgaggtccgctcattggcgcataagaaataacaaaaaacgtggcctaaggattggttgtagatgtgaaacatttgtaccttgaaggcgaagcattccttggaattgatgaatcgcaattagtatcgtattactagttatacacgcaacacacatttatgtctacatatatgcgaaatatatatacatatatatacaatttacgtataaagcattgaagcactcatagttttaatttttcgtttcgtttttattggtatttgtatttgcattgtttgtacacaatgatgtacatatggtagacttatatgctggctatgtggtatcctgacgtaatgctatctctaaggtctacatactaatggttctaactggaaatatcaagggttttcaaaagagcgctcaatgcaggtaaagtttcttaatagaaatttcatttgtggttattgttatcttattcaaaattcgttttaaaaaaatgtatggaattatcttcactcttcgatatttcattattcttttaaagtgcttatttttaacatatttttaattaaagctaagtaattacagcggatacggttttgtattttgggccaatgcagctggaggagctatcctccatcgtcctggaccccgtgaaccccatccgtatcccctctgcccctatgtacatgatgaatcttttcaatttccgctgccggaggagtgtgctcagtgcagtttgtgattggcgggcagatcttcggaacggatgcatcgtccgcggtagcagatctccgtttcggaggtgactttggtcgacgtggacgtggcgtacaccacatgctccatcagatccttgtggaagctgtcctttttgctctccgccacggtggcttccgtggtgatggcttcatccgtgggcgctaaagtcgttgtttccgggggagtgactggactggttcgtcggatgcttgtgtactcctggcgacgcttgcctacggccgctagagcggcggtcactgcttctccttcactttcctctat

SEQ ID NO: 37217 - DNA, 1575 bp, DROSOPHILA
ttccatccattcccagctgcccctagcaagtatccaacgcatcacacaagttggctacgtggaagacactgcacctgcaatatggtgctgggatgcctgccatgctgcaatcacaacggctaccagcagatcgggaacacgggtccacggttcggagtgcgtcatctgcagtgcatccttgtgttcttcggactggccgtggcctactcccttcgcgttaatctctccgtggccattgtggccatgacggatcgcaatgccagcaatccggattttcctgaattcgactggaatgagagtacaaagtcgtacctgcttagtagcttcttctggggctacgtggtcacccaaatacctggaggttacttatccgccatttacggtgccaagtacatgctcttctacggcgttcttatctgctcctgtttggcattgctaacaccgttttgcgccgtaaacggtggctggacagtggtggtggtgctccgtgcggtgcaaggactctgccagggcgtcattttcccctcgacacatacgttcctatcgaagtgggcgccggctgaggaacgtggacgactggtgggctacacgtactctggctcccagtttggcaccgtcgtaatgctgtcagttagcggatacattgcctcatcctcactgggctggcccagcactttttacatacccggatgcgttggtatcgtttggtcattcgtgtggctatacctatgttccagtacgccggcgcaacatccaacgataacgccaaatgagcgaaggttcattgaatcttctggacaggcgaggagaccatcggatgcaggacgcgaggaacagccacgtccaccgactccatggtggcgcatcttcacttccgtaccttttctagtgctcgtcctggcgcactgtgctaacaattggggcttctggactttgcttacggagattcccacctttatgaaaaacgttctcggcatggacattaagaataatggtccgctttccgcgctaccctacttcgctatgatcctgcttacctgtgttttcatctggctgtcagacacactgaaacaaagaggaacagttatccccctgggattctccaggaagttcttcaacacgctgggaatgtggcttcccatgctcgcacttatcggactgggatacattaccgagggtgaggcgaatgtccggctggccattggattactaaccgctgcggtggccaccaattcggccacttatctgggcttccatgtaaaccacatcgatttgtcaccgaactatgcgggtacactaatgggcattacaaattgtgcggccaattttatgagcatactggcacccctgatagtaggactaatagtctgggatgagacaaatccggcgcaatggcgaattgtattcttcttcaccgcgtttgtttacttcattgggaatctactgtttatgcttttcggacgcacaagggttcaaccgtggaatagtcgccccacaacgagaactccgtcgcctggaggtggtggagagcgggatgaaggtactgaggatcgaggtccgctcattggcgcataa

SEQ ID NO: 37218 - protein, 497 aa, DROSOPHILA
MVLGCLPCCNHNGYQQIGNTGPRFGVRHLQCILVFFGLAVAYSLRVNLSVAIVAMTDRNASNPDFPEFDWNESTKSYLLSSFFWGYVVTQIPGGYLSAIYGAKYMLFYGVLICSCLALLTPFCAVNGGWTVVVVLRAVQGLCQGVIFPSTHTFLSKWAPAEERGRLVGYTYSGSQFGTVVMLSVSGYIASSSLGWPSTFYIPGCVGIVWSFVWLYLCSSTPAQHPTITPNERRFIESSGQARRPSDAGREEQPRPPTPWWRIFTSVPFLVLVLAHCANNWGFWTLLTEIPTFMKNVLGMDIKNNGPLSALPYFAMILLTCVFIWLSDTLKQRGTVIPLGFSRKFFNTLGMWLPMLALIGLGYITEGEANVRLAIGLLTAAVATNSATYLGFHVNHIDLSPNYAGTLMGITNCAANFMSILAPLIVGLIVWDETNPAQWRIVFFFTAFVYFIGNLLFMLFGRTRVQPWNSRPTTRTPSPGGGGERDEGTEDRGPLIGA

SEQ ID NO: 37219 - DNA, 7125 bp, DROSOPHILA
gtggggatcgccggtggtcggcttatttacttagtcgaaaatcaaagtctgaagtgtcgggcgctgataagcataaataatttgtttaaaacatttcattttcagcaattatattttgataagacgtgtgtgtgtgcgagaaaagcaataagaacaataaactagagtaccataaaaacaagtgaagtaattaaagtgggagaaaccgggcaaaatttcgtgtcgacttgaaatgaaaattgcattgatcaaagggtccgtgcatgaagggtgtccatcgatcaagcagcgccttgtaatggatcgtctcgaggctgggttatgtcattagccggccagggcacacagagagtgttctcagaattcagatggaatggcactaggatgaggctacttcattcttatcaggggaacgcgatgacctcgcctgaggtttttgtggcacgttatcttcggttgacgggcgatgttgtttacctaggataccgcaggttgcagtccattcatgcctctagtcggaatttgtatctggaagataccagattcgccgaacagagggcgcactctccctctctctctctctctgtttcagaaagagaaagagagaagctgagcaaacgatctgtgactaatgttacagcgcgctgcaggcacaatacccagaaatccgaggtccgcggagcggatggcggtaaccacttggcctgaactgataaccatgtgctggtcttggtgttgtttacttactcccgttcgttcgccggttcacccagagagaaatccacatagaagcacacacacacacacacacatgcacagatgtgcgcggtgtatctgtgagtgccagcgtgttcggtttgactgatagcggaattggaactcacgcgatacagcacgcgctctctccggcgatttgcgagtgttggtgagagcggctgggtccgagttcgatcatatttataaaagaatcgaccaccgccagctactcaagcagtcgcagtcgttcgccagaacgttcaatacccgctcgtccgctgaacaactagtatacgcagagttttgaaaagacctacggtcagaatcaatttctggatccgtaatcgtttcgcttttcgctattcgaactaatagggaaaaaacgcgcaaagaaaatcgcgtgcacacacatgtgcggcaacttcatgacggaaccggaaaacgctgcgtgagaaatcgaaaaattccagtgacccaaacgcgaacggtaacgtttcgaaagagaagcaacaaaagtcaaataagatatatcagatatatacatacactcaacccgcgccgcacacatgacaactgcattgaccatggtgaaaacgggtggtaaatacgccaacggtgagtagaacacgcccccaccggagatccactaggcccacctccaaagctccatctcccatcgccgatctctgccagccagccacatgcatcatataacaactgtccaaagcacgtgtcttatgtaagcgtcgcgatcgttcgacttgatccgagctcgtgttgccggaaaccgcttaattggttctctaacagcactcccatattccatctcgatctctatctgagtcgccagctcgctccatttctagaatcactaccttttgtttttgtttgttgttttgttgaaatgtgcaactgctgaattgttgaactggaagcgatgcttcagcgattcagaaatatgtatctgaaataattttgcagctgtacagacagcagacgacctccactgcaccgaaatgcatcctccgagatacaattaaattttttcctcaatttatttacgtgcgttgctgttttctttgatttttagttacgctgacaaacaaaataaaatcacattttagcacttttgggtgataaaaataaacaaaaacgaagaaaaacaagaaaatagagatagaatagagcggtggcagtggcagtatatctgcgccaatgaaattaagaattttaaatagatccccccatgtgccgggcatgtgggggagggtggtggcatcgggatgggcaatagacagtttagtcagctgataagccataaacccaaagacaaattcccgactgtaaactggtccgcccatctgtacactttacacgttccaagtgcatgtgcgtctctcatcacttggcttttcgcagggcccaacggtaaacataatggttgcttgggtgggtgttgatatagcgggaaaaacgacgctgtaagcggcgattatcttatcacagctcggatgcctccgtccgcgcctggaaaactcggcggcggttccagttttatcggggccccagctatcggttatcaatgcggcacacttgactcacttagtgctgtgtgtccttcgattgtcccgccccactaatgggcagaaatgtcggtgactgtaccatcggaccgtaggaccgaccgaccggcaatcaatcaaaatatacgcgaatatactataaatggccaccaataaacactccaagcaagctggtgctctgcctttatggcggctcataaatgctgattgatttggctcgtcgacatgtatatattcgcccgaaaattagtttgcaatcgttattgtgatcgttgtctgattcttttcctgggcctctccgccgcgagacaaaaagctctatatcttggccataaatttgatggggcattacgcctaaggggaagaagacattgcgcaaataaatttaaaaacgtgtcagataaagcgttctcactcgaccacgagtcatcgcatttaacacgatacaatcgcaccgaaagagacggcgcgtttgcggtcgaaagagagggggcgagcgacagagagaaagagagagagagagatatatatagatagagggagcgccactgaacaagaggaaatggaagtggaagagagagctcaaagttcggtcagtttggttttcggacagcaattcaaatgtgaaattactggaaacacagtaaaactcgtatagcttgaatcaccatttaaggtcttattcaggagaaaatatttatggaagttaagctgtaccaaaaagtcttagcaagacttggtttttttttatcagctaaagttgttatcaaaacttaatttttagaaatttttttatttcgaaattcggagtatgatcgtttattatttcacgtgatagttacaaaaatttatgaaatatcacattttaaatattcaaactgtagagactttcgactgtagctgtaattaatggtttgcaatcaaaccccagctcggggttcaatagaccccagtgccgtgtaaggccgcgttgcaaggttgccagtggtgaggcggtgttgcaatgtgcaccaccctgccaccgcctaccggctgtcagcccacactcctatttataaagactaagccatttatggcgagccaaagtcgggtttaaaaatagccaaatgcacgaaaacaaatccgcgtaaggcagagaccaggccaggaaagagctaaccatgtgtgtgtacaatgtatgatggcatatgccgcggccgagggatcgtcgtcacgtgaggatcggccgatcgatcggccggttgccccgaaacaggtagtgtgtttgtgcgtttgtgcacatgtaccttatactctatacttttgaggtggggtacatatagtacagcaccgtctcgctgcattttacacgacaataacaaagaggaggtctcacaaagtccaatgctcgattctcagtgttcgcagccaagttttggtcgagtgggtgtctctgtatatgtacatatgtgatgttaccacccatctctctctggcccgctggcaagtgcgtgcgtgaacaagattttgacatagtcaaagtgttttataaataaacgcgccccacatacttacatggctaccagtttggggcttacggagcggccaactcgcagagaaagagagattgagagagacagtgagctccgcgctcgttgattttgataaggcgccgcgagagagcgagacggagtaaaagcgccacatgtgaagcacgccccaacccctcaccaaccgtcaccaatgctccccacttcgtagaccctatggcataaccaactgatccgatctctctttcctattacagagaaattcttcggggtgaggcatgtgcagtgcatcctgtgcttcttctgcctcgcgatgagctacgcttggcgggtgaacctcagtgtggccctggtggccatgacggacaacagcacctccctagctcagaacaacaccaataccggagtggcgccaagcgaacccggttttgatttctttaattccgaggtaagtgccggaagctcccaaacaaccgatctctaatgattcgaaactctccaaacgatctgaaacttcgtattcaaatgtattttgagttgttactcatgcaatttttataatcattacaacaaaatattacattaaatcacatacacatactatgtggtttttgaggtttatcgtttgaacttgaagttcgctttttcaagcatatgtttcctatgttttggaggtttctagagctattcacccgtaccctatcttaccagtactattctattcacagcgctactacaacttcacccagaaggagaagggcaacctgcaggccagtttcttctttggctacatcgtgacccaagtgccaggtggttatatcgcccagcgctatggagccaagaccatgctgatgtacggattgggtatagccgctttgatcacgatgctctcgccgatgtccctgcaattcggatgggtcgcccttgccgtgatgcgattcgtgatgggcctggcccagggtgcagtacatccggccacgcatgcgcttttggccaagtggtcgcccgcggatgagcgaggaatgctgggaacactctgctactcgggcgcccagttcggaacggtggtgatgctggccactagcggtttcattgccgactccgtcttgggctggccgagtatcttctatttgggcggagcatgcggctttatttggatggttttctggtacctattctcggccagcacgccggaggaacaccgtctgatttcgcccggagagctgaagtacattacggattcgcggagcgatggcaagatgcaatccgccgagaaactggcacccacgccctggaaggccatctttagttccctgcccttcctgtctctgctggtggtgcactgcacccacattttcggttactggctgctgctcatgcagattcccacgtacatgaagaagatctaccacgtggacatcaagaagggtgcgctgctctcctccctaccctacatggtgatgctgctcctcagcttctttttcgtctggctatccaaagtgctccaaaagaaggaaggcatgtctctgtccttcaaccgcaagattttcaacagcattggccattggatacctatgctctcgctgatcgcgctaggttatgtgccggcggataatgctccactggcggtaacactgctcaccctaacggtgggaatcagcggagccacctatctgggcttccaggtgaaccacatcgatctgtccccgaattacgccggaaccctgatgggcattacgaattgtgcggcaaacgtgatgagtggaatcgcaccagtgatcgtgggacagattgtcgtcgatgaggtgagttgattggccctgatatggcagtgaatcccaattaactctcgtttttatctttagacaagcgtaactgagtggcgattggtgttcctgctggctgccgccttctacttcttgggcaatcttctcttcgtcatatttggacgcacggaggtgcaatggtgggactccccacgggacaataaggaggatgcggagcagggcacgcctctggcgcccaatggccaggtcaaatagagcctgggatggcatgttcataccgcatccagaatcatccgggctgttgtttcttagattcgtaggcgtagttagttagttagacaccagacaagctgaaagttaactttagtgacgatcgcgtgcttccattagcgatattatacggtaattgcttagtcctaaggcagcgtaaattattattgtttgcagtatttccataatgtacataatccaaaaaaagaaagaaagaaagaaacacaaactatcaatcaaaccaattaaacgtgcaacttgagaatacgttcagtgtaaatagggacaaagcccgcggcgagctgcagcatcaactctagtaattgttatgttttagttttaagttaggcattagcgaaaacttgtgatgaaaaaagtaaactaaaaaaggcaaaaaatgaataatgaagacaacactagccatgaataaagcagctcacttcgcagctgtgaaagagtcaaaatgtaacgaaatcatttgtgttttatttgaactggggtttgaatttgatagtccgacacttgttgctatcgattgaattgcactatcaaccctaatggaactatcgaatagtagcgttgaattatgagatttcttcactagttggttttggttatgttagtatcttattgattttaataataatagtaataataattagaaagacaggcttttatgcttgttatgaacattttgtttaacaatatacaagttttaaactgcagtccaccctaatctatcgttgcacttgttgaagcaatagtgtcgatagtgccgcctctatctaagtgggcagcagctggcacttgttgttgtcatcagctgtgttatgtttagacgctagttccatccattcccagctgcccctagcaagtatccaacgcatcacacaagttggctacgtggaagacactgcacctgcaatatggtgctgggatgcctgccatgctgcaatcacaacggctaccagcagatcgggaacacgggtgggtggtgacatgaccttttggcctttgttaccgcatccgctttgttaattacgcgcaccttttgcaggtccacggttcggagtgcgtcatctgcagtgcatccttgtgttcttcggactggccgtggcctactcccttcgcgttaatctctccgtggccattgtggccatgacggatcgcaatgccagcaatccggattttcctgtatgt

SEQ ID NO: 37220 - DNA, 2031 bp, DROSOPHILA
tcgttcgccagaacgttcaatacccgctcgtccgctgaacaactagtatacgcagagttttgaaaagacctacggtcagaatcaatttctggatccgtaatcgtttcgcttttcgctattcgaactaatagggaaaaaacgcgcaaagaaaatcgcgtgcacacacatgtgcggcaacttcatgacggaaccggaaaacgctgcgtgagaaatcgaaaaattccagtgacccaaacgcgaacggtaacgtttcgaaagagaagcaacaaaagtcaaataagatatatcagatatatacatacactcaacccgcgccgcacacatgacaactgcattgaccatggtgaaaacgggtggtaaatacgccaacgagaaattcttcggggtgaggcatgtgcagtgcatcctgtgcttcttctgcctcgcgatgagctacgcttggcgggtgaacctcagtgtggccctggtggccatgacggacaacagcacctccctagctcagaacaacaccaataccggagtggcgccaagcgaacccggttttgatttctttaattccgagcgctactacaacttcacccagaaggagaagggcaacctgcaggccagtttcttctttggctacatcgtgacccaagtgccaggtggttatatcgcccagcgctatggagccaagaccatgctgatgtacggattgggtatagccgctttgatcacgatgctctcgccgatgtccctgcaattcggatgggtcgcccttgccgtgatgcgattcgtgatgggcctggcccagggtgcagtacatccggccacgcatgcgcttttggccaagtggtcgcccgcggatgagcgaggaatgctgggaacactctgctactcgggcgcccagttcggaacggtggtgatgctggccactagcggtttcattgccgactccgtcttgggctggccgagtatcttctatttgggcggagcatgcggctttatttggatggttttctggtacctattctcggccagcacgccggaggaacaccgtctgatttcgcccggagagctgaagtacattacggattcgcggagcgatggcaagatgcaatccgccgagaaactggcacccacgccctggaaggccatctttagttccctgcccttcctgtctctgctggtggtgcactgcacccacattttcggttactggctgctgctcatgcagattcccacgtacatgaagaagatctaccacgtggacatcaagaagggtgcgctgctctcctccctaccctacatggtgatgctgctcctcagcttctttttcgtctggctatccaaagtgctccaaaagaaggaaggcatgtctctgtccttcaaccgcaagattttcaacagcattggccattggatacctatgctctcgctgatcgcgctaggttatgtgccggcggataatgctccactggcggtaacactgctcaccctaacggtgggaatcagcggagccacctatctgggcttccaggtgaaccacatcgatctgtccccgaattacgccggaaccctgatgggcattacgaattgtgcggcaaacgtgatgagtggaatcgcaccagtgatcgtgggacagattgtcgtcgatgagacaagcgtaactgagtggcgattggtgttcctgctggctgccgccttctacttcttgggcaatcttctcttcgtcatatttggacgcacggaggtgcaatggtgggactccccacgggacaataaggaggatgcggagcagggcacgcctctggcgcccaatggccaggtcaaatagagcctgggatggcatgttcataccgcatccagaatcatccgggctgttgtttcttagattcgtaggcgtagttagttagttagacaccagacaagctgaaagttaactttagtgacgatcgcgtgcttccattagcgatattatacggtaattgcttagtcctaaggcagcgtaaattattattgtttgcagtatttccataatgtacataatcc

SEQ ID NO: 37221 - protein, 462 aa, DROSOPHILA
MSYAWRVNLSVALVAMTDNSTSLAQNNTNTGVAPSEPGFDFFNSERYYNFTQKEKGNLQASFFFGYIVTQVPGGYIAQRYGAKTMLMYGLGIAALITMLSPMSLQFGWVALAVMRFVMGLAQGAVHPATHALLAKWSPADERGMLGTLCYSGAQFGTVVMLATSGFIADSVLGWPSIFYLGGACGFIWMVFWYLFSASTPEEHRLISPGELKYITDSRSDGKMQSAEKLAPTPWKAIFSSLPFLSLLVVHCTHIFGYWLLLMQIPTYMKKIYHVDIKKGALLSSLPYMVMLLLSFFFVWLSKVLQKKEGMSLSFNRKIFNSIGHWIPMLSLIALGYVPADNAPLAVTLLTLTVGISGATYLGFQVNHIDLSPNYAGTLMGITNCAANVMSGIAPVIVGQIVVDETSVTEWRLVFLLAAAFYFLGNLLFVIFGRTEVQWWDSPRDNKEDAEQGTPLAPNGQVK

SEQ ID NO: 37222 - DNA, 8638 bp, DROSOPHILA
ttgtctttaaaacaaacaacacaatcgccatatagcgacaatagatgggatcccaaacgaattccattggagcagccaggcatgaactatgcataactaagaatttcaatcgacacctgctgactgggcggcagccgagaacatttctaattgtgcccctttggatggatgaaagtgaaagtgccctaatgtcaagagcactgcactccactctaatctcggccaggaatttccagatagtttgatagatcgttaagcgcgaagttccgtggcatccacgagtacggcaagtgatcgcttaaccagtttttaagctacgccactctgagctcttttttttattcgtattttcgtatttttcgtattttattttttgttgatcggggtttcccttgacgcccaataattcaatctgtgtttaccaaaaaagtttcattcactcgcaaagctgaagacccccagttagccggctgtaaattttccattggcccatttcggtgcggctggtggattgcatgccgttcgcatcgccctcgggattgataccatagaatatatcattatgtcaagatcaacaaatgagcctcctttgattgggtgcgaggtccggccacttgacttgggcgcgatgtctttcccatctacgcgtacatatgtacacttcgtacacggagtccctgacaagtcgggtaatctaaagatgacttcgataagattcgattttacggatatctctgccacaacgcccaccccacgggctgtccacgaaccgggcaagtggtctggttctggggaatttctctgtccgccggattttgcagtggagagtgcttttcatggagtgcctgctgactagctggcccgttggctagttggctgaaatctccggtgacgtattttggagcgtgcgagcacggagcgtgtttgagtggcgatcgatcgttagcagcgtataaatggagtcgccgcgccgactcagcgttcagtcggtgtgaaagcgcagcgtcgtcgagagcggtactcaagtactctaactgaaactgaactgaatagttaacaacatcctattgaaacgaccctatcgaaatcgggaagaaacgaaagcgattgcatcggttgtgaatatgttgacatttgcttcgatcgctggcaaatatttaattaccacgccgcattaagaacggcccaagcgaaaaagtgttagaacaatacaaacggaccacccaccaaaacaacactgccaaacacgcgtttagaaagtaatttattcgagagagtaaaagctaaaagccagtagtcatcatgaaactcatgtgttgcggtggcagcaatggaaccatggacatggaagccaaaaactctaacaaagaggatgaggccgtgggcaaacgtaagtggagcaacgcaccatggttagataacaccaatgggtcggtcggtccttattttattgctggtgggaggaaataaccaatttgacaagtgggttgcgacaagggaggcggttttactttccagaaataataataatggccaatagtctaatttatttgaaaacccacaaaaagccacagagcgagaattttagttggaaagtgatttaacgatgtgttgcatcataaaaagttatataaaactaatagtgttgacttttgagtcttttttcagtgatttgcaaaagccaaagcgataggctcgaacataaaacatcgtttgccgaaagttttccaaacctgaagtgctgttcgattacgacgaacaattaattttgaagtgcggtcagtttgctaatttcacaaaatgtgattaaatcttaagtggcagtgacggttaattatttgcttttgttattcaccttatttcactttttcgttctaactgcatcaagtgttttcatggtgccaaaatgtgtttcgctcgatgggtgttagtcactgagctcattattattataattattattatggtcgaaaacagaggctagtcattaaatctgaattagtttagttgggatgaaagtggactgtccacagaactaatccgataaatcgaagagacaggaagtggctttgcaaatataaatcatcaaagtttgtatgcaaatcgcgacccagggcaaaagtaagaacaaacagctcattattattataattattattatggtcgaaaacagaggctagtcattaaatctgaattagtttagttgggatgaaagtggactgtccacagaactaatccgataaatcgaagagacaggaagtggctttgcaaatataaatcatcaaagtttgtatgcaaatcgcgacccagggcaaaagtaagaacaaacacacacacacaaagcgaatcgaatcacttcattttgtgctctttttgtttgggtggcagccaaccgggcgtatgtggaattttgagataaacaaacaaaacagaatagatcacaaagaatgctccaatatgcggggacaggctgtctgaggcgaatccagtttagtgccggcaactaatgagcaactattgcacaaatactgctactaaacaacagcaaacatcggctacggatttagattcagattcagattcagattgagattgagagatacgattctttgaacaattagagtcggccgcgtatatggcgaaaacataaatctcgcatatttcctattatgttcctgctttgactaaacgactcggctgtcgagggggaagtgaatatggatatttgatgatatcttggagccaagcctttagggataacgcacgtggctaattaaatatgcacatttaacgctaataaatcgaatatctttatttagagctgcgtgcaattatcgggcgccaagtggccggcatgcaaattcattagcacttgacaaaatgcggggaactcttccgtcagagcataaattacacatgaacgctcgaaatgaacagccaagtttggattacttgtaattgcatatttaaataatttcactaaatattcaaattggcaaggcaggcgccatggcgcccgctaaataacgcaaaaaacctcataacgagacgaggctgacaccgcaagtcgggtcacaaatcacgggtagaacggaaggttatggagctgataggccaacaaaggcactggaaaaaatgtatgaccaaatgcacaagtatttaaaaaaataaatacaataatgttttacagtctatttccacttttcgatgcttaagctagttgttttacaaccaaataccacttcttctagtaccgtgtggcattcattagaattcagccatttgacatagacatacatttccaataccaacctatggaatatccatttcaatttcaattcaattcaatttcaaatgcaaatttgttacttattatttttcgtctgcattgtgggtggttctatcgcttggaaaaaactcgctccgccagtttttgctgtgcgttcgtctgtacccaaccaaaaaacccggctaaaatgcaggcttatcagccgtccatccatccattcgcccaatcaaccatccatccgcacggcggcacaaggtggccaagtgagtggaccttgtctggggcaagttgtgacatcttgccacttgacggccattatcccacgaacagcaacgacacccggctatcaaaggaaaccctatctagaatgtcatcgagtggcgctcgctatctggtcaatgtgaaactgaagtgcctggacatttgaaagtcgttggtcttaacgtcttcggagcggagtttccacctgtcacattcgccatatccttatcagccatatgatagtggcaataagacccctaaggctctgatgtgtttaccccagaagcgtgtccagcggtcttcattcattgagtgactgaacatcagtgtgggaaatggaactcaattaaaatgcataattctattttactattccgtaattacgattctaattgcgtgacttgtggttagcaaaagctttaatgttttgctgccagttctttatagccattacctaccgtagtaaacaataacattgcagctttggtcagctttggcttttggcgcttgagcttttggcgctgaatgcaaagcttcgctatgtggaatacgatccaatttccaaccgctttcaagttcaaagctatcggaaaacgatttgaaaatagcggctaggcaataaatcgcagataatttaggatctgtgataggatcgtaacattcggtgaccgtgtgatcagcataatgcctaaattggttacatcaaaagctggagattaggtggaaccccttcagggtttgaaaatgggtttgtgttttggggtggtggaggtgggggtgcaactgccacgcgctcttacactgtcaacaaatcagagcgacagccaacgtcacagatacagatacagatacagctgtagccgcgagctgtagctcaaccaaatacagataggcttacccacatagccacacgactactgggcgatgctggttagatgatctgactatttgcgtaaagcacctgctgatgctccgccaagaagccatcagttagtgagcaggctccaagccgaacggtagtgcctttgccttaaattccacacactacatattcatagttactaactaaaccaaatccaagtatggttaccactgtgaagaatcgtcgctttgaggatgaaggtgggtcctgatttaaggggttttacaaagaacttaaaagacattaagcttagttaaggaaagaagtacctttaggtgattcttaaaacataaagtcatatctttttgtatgcaatatgcaattaaataaataactgccatccaatttttgtttcataaagcatgaaaactcacattacaacccgatttctaaatttatttataattgaaagtaatatattttttacgactattttcaaactttttaaatcgactgcaaaataattccaacattgccacagcttctttccccttgctcgaaaaatatatatttactataaacagctctaaacaggcaaaaaattgcgttgaactcttatcagcgatgataacagaatatccataaaagacgagcccccaaattcagttagaatgcatagaagcgaaaatggggattaattcgggatttttaaatagctcggtgtaaagcggttgtaactgcttttttatggcccactcacagctagttaatctctgtcagcaaactcgagattaaacaaacaccgaacattagcccacaactacaatacatagagatatagttttatatctcagtaacttggggccaaagggttggaaagtgggtggtggttaggtggttcggaggcgcagacatagccgctgaagtgtggccgacaattgggcgccatatctatgaatggaatttttttcgtaatccagaaaccagaaacagaagccgcccccccccccaaaatgcaaatagaaaggcaaataattgtatatccagtgcttgtctggctgataagggatgataaatttaggcgtaaattacgcctgaaatggtagaaataactactatagcatgtagtctctcagttataaatccattcagttgggggcccgatctcggatctgtgggccttagaatgaccgtgtcttggccacaagcgacctacaggtgacctacagagacagccccacagtcataacatttaggtacatgtgcctctgataatgcggctgataatgcgactgattaggaatgctaatcgatgggtgattgcccattgactgggctgaagatcaatataggtgtcagattaccgaaacttacctaatcgattgcgttctgattcctttcagactccggcttgggtgtccgtcacttccaggtcttactgctattctttgcccttacggtggcctatggctgccgagtcaacctctccgtggctgtggtggccatgaccgatgccgcctccgtcaatcccgattttcccgtaagtacatatatggcgaagtcagtaatgaagttagcagaatactaaattactattgctttccaggagtataattggtcggagaagacgaaatccctgctgctgagcagcttcttctggggctatgtgatcacccaggtgccagctggtcaattggctcgcaaatatggcggcaaagtgatgatcctgtcgggactggccatctgctcgatcctgaacatcctgacacccatttgcgcaaagatcggaggctggcagctggtctgcgccctacgagtggtggaaggtctgtgccagggcgtggtctttccctcaacccacacgatcctctcccaatgggcaccgcccaaggagcgtgccacgttgggaacctgtgcctactcgggtaaccagttcggaacgattctcatgctggccaccagtggagtgattgcagcctcgccaatcggctggcccagcatcttctatatctctggaggaatcggatgcgtgtggtcggtggtgtacttcttcttcggcgcaggatcgccacaagagtgcaagtccatttcggcggaggagaagaagctgatcgagatgtcgcaggccgacgaggtgagcggtggccaggaacagccgaaggagcagttgcccacgccctggctgagcttcttcacttcacccgctttcctcgtcctgatcgtctcacactcggtgcacaactggggtttctggaccctgctcaccgagatccccagctacatgaagaacatcctgggcaaggacatcaagtcgaatgctcttctctcctcgctgccctacgtctgcatgttcgccatgtcctttgtattctcgtcgatatccgcacagttgaacaaccgcaactgcatttcaaggtctacgagcaggaagctcttcaactccattggtctgtggattcctatggtcaccttggttggccttggctatgtgaacccagatcagtcggaactggctgtggtcctactctgtttcaccgtgggcatgaatggagcgacctacctgggcttcaacacgaaccacatcgatctgtcgcccaacttcgctggcatcctcatgggcatcaccaacggcgtggccaacattatgagcatcattgctccgctgatcgtcggattcattgtcacaaatgaggtgagttcacaatcgatttgtaatcattatatccttgcctgatatccttgtcaggataattattttattgaatgccttgactaaacccccaatctcctgctacctttttccagcacgatcccgagcagtggcgcattgtgttcttcattgcagccggattctacctggtgggcaatactctgtacgtgatcttcggcaaggcgaatgtccagccctggaacgatcctccggcgaagcctcgtcgcaactccacgccccaggtggagtcgcagcactagatgaagctttgagcttgggtttatttaaatggttaccgaaactactagtcagctagttccgctctccttcaaatccaaaactatcaatcctatttgcagccaggtgcaatgcattctcgcattcgccgtgtatatttgtaaattgtatttgttaactgtgactatttcgtatttgcattccactcgtcttaagttttagtttgttaatactatgtgataagaatacccatgcaaaaaataagaaaacaaaaattacaaaaaaaaaaaaaacaataaaaagagcatgagcaacatgtgaaaagaaaaccgcagagatgtttgattcccacatgtggtgggtctttaatgtgggtgggaactgctcgattttgaaggtcaggtaaattaaaattattcgttcatctattttgagtaaagtgctcaagatcaatcataatcttagaaatgtttccaacactttcgttttgcattctctgaagttttttaactatgatattttattgtttttggaaacggtcttatgatcagctcaagtaaaaatgtttagttcctaattctgaggatttctttgtgcaaaatcaatagttacctatactaatagcaggccccaactaaatagcaaacttttgaattgaaaaaatattctaaattatgaaaatctgcttactttaacattttcgtctacttatactagtaattgcttgacgattttctgaatgaaggagcaaacaatgaaactttggatttggtttacaaaacgccccaaaaagtatgctttaaaagtagagatcgttgtggagaaatcttgtacagtgtaagctgcatatacatgtagaatacatgtagaattagctcatgtaaacagaagttaccaggtgatcaacctcaacgtctttatcattaggtacgtaaatctgatgttttggttatggaataaaatttgctttcaataaaaaaaaatcacgtgctgagaacgacctgtacattccaacgctttgctgacgcagcaaagattgcagacttgaaaacgcagatttgagttaaatactttatactctagactccgccagcagataaagttggatcacaaaacaaagacgagctggcaaatcaattttgcaatcacttaatccctatttcgagcgtatctctcacatttgagtgccgtgcacattttatagcttcgaactcggcgggcgaatgaaaagtgggggacaaggcggcttgggttgcgggatggggggcaaattccactg

SEQ ID NO: 37223 - DNA, 2034 bp, DROSOPHILA
cagcgtcgtcgagagcggtactcaagtactctaactgaaactgaactgaatagttaacaacatcctattgaaacgaccctatcgaaatcgggaagaaacgaaagcgattgcatcggttgtgaatatgttgacatttgcttcgatcgctggcaaatatttaattaccacgccgcattaagaacggcccaagcgaaaaagtgttagaacaatacaaacggaccacccaccaaaacaacactgccaaacacgcgtttagaaagtaatttattcgagagagtaaaagctaaaagccagtagtcatcatgaaactcatgtgttgcggtggcagcaatggaaccatggacatggaagccaaaaactctaacaaagaggatgaggccgtgggcaaacactccggcttgggtgtccgtcacttccaggtcttactgctattctttgcccttacggtggcctatggctgccgagtcaacctctccgtggctgtggtggccatgaccgatgccgcctccgtcaatcccgattttcccgagtataattggtcggagaagacgaaatccctgctgctgagcagcttcttctggggctatgtgatcacccaggtgccagctggtcaattggctcgcaaatatggcggcaaagtgatgatcctgtcgggactggccatctgctcgatcctgaacatcctgacacccatttgcgcaaagatcggaggctggcagctggtctgcgccctacgagtggtggaaggtctgtgccagggcgtggtctttccctcaacccacacgatcctctcccaatgggcaccgcccaaggagcgtgccacgttgggaacctgtgcctactcgggtaaccagttcggaacgattctcatgctggccaccagtggagtgattgcagcctcgccaatcggctggcccagcatcttctatatctctggaggaatcggatgcgtgtggtcggtggtgtacttcttcttcggcgcaggatcgccacaagagtgcaagtccatttcggcggaggagaagaagctgatcgagatgtcgcaggccgacgaggtgagcggtggccaggaacagccgaaggagcagttgcccacgccctggctgagcttcttcacttcacccgctttcctcgtcctgatcgtctcacactcggtgcacaactggggtttctggaccctgctcaccgagatccccagctacatgaagaacatcctgggcaaggacatcaagtcgaatgctcttctctcctcgctgccctacgtctgcatgttcgccatgtcctttgtattctcgtcgatatccgcacagttgaacaaccgcaactgcatttcaaggtctacgagcaggaagctcttcaactccattggtctgtggattcctatggtcaccttggttggccttggctatgtgaacccagatcagtcggaactggctgtggtcctactctgtttcaccgtgggcatgaatggagcgacctacctgggcttcaacacgaaccacatcgatctgtcgcccaacttcgctggcatcctcatgggcatcaccaacggcgtggccaacattatgagcatcattgctccgctgatcgtcggattcattgtcacaaatgagcacgatcccgagcagtggcgcattgtgttcttcattgcagccggattctacctggtgggcaatactctgtacgtgatcttcggcaaggcgaatgtccagccctggaacgatcctccggcgaagcctcgtcgcaactccacgccccaggtggagtcgcagcactagatgaagctttgagcttgggtttatttaaatggttaccgaaactactagtcagctagttccgctctccttcaaatccaaaactatcaatcctatttgcagccaggtgcaatgcattctcgcattcgccgtgtatatttgtaaattgtatttgttaactgtgactatttcgtatttgcattccactcgtcttaagttttagtttgttaatactatgtgataagaatacccatgcaaaaaataagaaaacaaaaattac

SEQ ID NO: 37224 - protein, 491 aa, DROSOPHILA
MKLMCCGGSNGTMDMEAKNSNKEDEAVGKHSGLGVRHFQVLLLFFALTVAYGCRVNLSVAVVAMTDAASVNPDFPEYNWSEKTKSLLLSSFFWGYVITQVPAGQLARKYGGKVMILSGLAICSILNILTPICAKIGGWQLVCALRVVEGLCQGVVFPSTHTILSQWAPPKERATLGTCAYSGNQFGTILMLATSGVIAASPIGWPSIFYISGGIGCVWSVVYFFFGAGSPQECKSISAEEKKLIEMSQADEVSGGQEQPKEQLPTPWLSFFTSPAFLVLIVSHSVHNWGFWTLLTEIPSYMKNILGKDIKSNALLSSLPYVCMFAMSFVFSSISAQLNNRNCISRSTSRKLFNSIGLWIPMVTLVGLGYVNPDQSELAVVLLCFTVGMNGATYLGFNTNHIDLSPNFAGILMGITNGVANIMSIIAPLIVGFIVTNEHDPEQWRIVFFIAAGFYLVGNTLYVIFGKANVQPWNDPPAKPRRNSTPQVESQH

SEQ ID NO: 37225 - DNA, 5130 bp, DROSOPHILA
aacgaaattcgactcaagaaagctttaaatactttataatccacttgcaacagtcattgtattgcatcgaaataaacattttcaaattacccgtcacataaatatttataaatttttttctgctgcattattacttttctttccgtacacaaatctcgtggcttttttgtttcgccagtaaaatggctgacaaaatgcgcaagttgcatgcgacaagcaatttggcgaggccacatcctggcccatttcctgggtccttcaaaggctcccacgcataaccacttcacatcccgacaaaagcagtaaacaatggttgagtgaagggaggcggcacttaacccagtttttagtttcattcagatgctttctacactttgacatgccaaaaagcccgaatgatatcatatccagccaaccaccaatccctctatccgtctgacccaaattcgaagctattctctgccatgcgggtggccacaacaattgtccacagtattgatttttgctccatccatttcagctgaagttggagctgaactgccaataaaaaagactgaaacgaaccgaactgaagacaccaaccaaggaccaaaacgaggaaatgttttagaagcaagctgcagcccagagagataagggaagtgccgcactagtcccccatcattagcataaacagcgaccagacgaagtcgcaatgtttctgcccgtgaaatccaatcagtaagtacacggaaaataattctaatatacagataaataatcatatatacttggtataagaaactttgtactttgttttcaatgcctaaagtttaatatttgttgtgcttgtgaatttaagtgacgacttggtgctccatgttcgctccattcaacccccaaaaatgccagcccccttaaactgacatgaacataaacatgtagcataaacaacgcctggctttacagcagtggagcagttcctgtttctgtttttgtcgacaccttgtcgccgccattaccattatgttaacaagacggcgaactcaatttacgaactcatcaaattctcgttgcagttccggcgaggcgagtggcaacaacgaagatgtcaccaccaccagcaacaattccacacagacgcccagcgatctgagcccaccgggacccaatgaagaggtactgccccaggcgcatcaccagaatccgggccactgcatcgcctcctttgcagccatcaaccagatgaggaacaatgcgcaggtgagggaaaaaatacgccaagaaaatctcatcatttcgaaattcaaacaaattatgttcatggccagatcaatttcttcatcaaaaatcagcaatgccataacacagggttcaaactcatatatagcattaattgacagatcttgatattgccgtactaattgcataaggcgtgaacataattaaaatatttatttagaatgggcgcgtgattggggtcgtcgcaagtccgacttgacgctggcccacatggcgcatacataatgtctttcgcgcgtttctctttcattttgggcagtcggcaacattaattgcgaccgatgccgcccctctctcacaaagttcagctgggtgaggctattagagcaaattgccattttagtagcccagcgggtggatggatgagttggccttaaccagaagaagcgcgccatgatgtaagcgacactttgccattcaaaagtgcctccactaactatcgggttcattgactgcgggcgccctgtcaaaagttattgatggagagtccttctaaggattccaaactgggcgtgggagtgaggaatttggagtgcaaattgagcacgtagtcgagcattaatcggatttgtaaagcgaccctttggccgcgtcagcactcccaggtctcaacagccttcccaacttcattctcaatcgttctcctgcccgtttcagctatgcgatgtgcgcctggaagtgggcggcgacaccatcaatgcccatcgagtggttctggcctccgtatcgccctatttctatgcgatgttcaacggtgagtgcacttctataacaaaaagcaatcctttcctggaacttctagttcagctggtaatcccatcgatattggatataaatccaactactaaagcaatatgtaaactgatacataccgatctcatttaccagacgacatgctggagcgcactcagggattagtccggctgcacgacgtggacagctcagcgctgcggcagctgatcgattacacctacaccggcgagatcacgatcaccgagcagaacgtacaggtgctgctgcccgcgtccggactgctgcagatgcactcggtgcgggatgcctgctgtaagttcttgctgcgccagctgcatccttccaactgcttgggcatacgcagcttcgcagatgcccactcctgcaaggagctgcacacgcggtcgcataagtacgccctgcagaacttccagcaggttgtgggtaccgaggagttcctgctgctgccgttcgaggaggttcgcgagctgatctccaacagccagctgaacatcagctccgaggagcgagtctttgccgccgtcatcaattgggtgaaacatgacctgcccacacgaagactccacattgccgagttgatgtcaaacgtcagactgccgctggtgagcagggatttcctcatgagctgcgtggaaacggagaccctcatgcgcgatgactccgagtgcaaggagctgctgctggaagccatgaagtaccatttgcttccggagcagcgcagcataatgggcagccagcgaacccaggagcgtcgtccggagggcatgaaaccctacgtatttgcggtgggaggaggcagtctcttcgccattcacaacgagtgcgaggtgtacaatccgcgctctaactcttggagtccagtggcaccaatgttgtggcgacgatctcgatccggagtaacatccctgcacaagcagttgtatgtggtcggcggctacgatggagtcagtgatctggccacggcggagagctacaatcctctgaccaacaagtggagcaacatcaccccaatgggtacgaaacgtagctgtctgggcatctgctcctacgatgccttgatctacgtttgtggcggttacgatggcgcctcctgtctgagcagcatggagcgctatgatccgctcacaggcatctggagctcctgtccggcgatgagcacaaggagaaggtactgccgactggctgtgctggaaaattgcatctacagtctgggcggcttcgattcaaccaactaccagtcgagcgtggagcggtttgatcccagagtgggtcgctggcaaccggtgccaagcatgtcggcacgcaggagcagctgcggcgtcgcctccaccgacgggcatctgtattgcattggtggtaatgatggcaccatgtgcatgtccagcggagagcgattcagtttgcgcaggaacagctgggaacccatcgcagcaatgcactcgcgaaggtaaggatacctcataaatagtccaacttcattcccttttttaataattcggttcttttccagatccacccatgaagtggttgaggtggagggtgccctcttcgccttgggcggcaacgatggcagctcttcgctcaactccgtggagcgatacgatacgcggctaaacaagtggagcgtggtcaacgccatggtggctcgacgcagctccgtcggcgccgccgtcttggagtgcttccatctggagcgtggactggtgcagacgacgaacttatgacccttggccagcataaccgagtccttcgccgcagctgcagcgagcggcactagcaatggcaacagcaccattaacggaatcggttccggtggagtcataccttcgtcatcgggcgtgggaggcactctaaccgttccgagccgagcggaggctgctgcctttacggccaacattgctctgagtagttccgcgccatcggctagctccacgctgcgtcgtcatcggagggacacacccggtctggccgagagccgcagggccaacagcaatgccagcagcagtggcagcgagagcggaagtaccagcggggccagcggatccggaggaggaaagccaccggcgacggcctgatcctggtccatgtcgcgtcgcttctaagccacctaacaattacaaattaactcacatacaaagctaaccccacgcgcctaatgcaggaatttgattgttcgagttcgttatggatagacttaagaatatttatatgacttggagaccccgggcggtggttcgattgctcaacatcaaggatgaacatcgcagtgaatgcatgcccataacacacacacatgtttctagtcaagatctctcacacacacacaacatgggaatgccgcggggacacaactcctggagaagcaacctaatctgcctacaatttacatacataaacctctatacacttaaattatatactgtatacactcttatgtactattcttatgtattttatacacgcaattaaaacgataagtaaatgtttcgtaatcgtatgcgacgaagtcggcgttctgtttggctctgttctgtatgcgctttgtactaggatcttgacaggaagcccccgctaaggtgtggatcacatcatccgctcggccatgctgctcgccacgttgcccacgttcttctccttctccgccggctgggcgaccttcgaggccattttccgcgcgtccaaccagtccttgggcagaccggtgccaactgcaatgattgggtggattgggattagtggagggatcgctgcacggggacgccgcttcgttttttcacgagtggtgtgccccggcagttgaagctgaaatcagttgcaatctataaagggggacacaacgatcttcagacagttctcagtacgcatttattttcagtttccgtttcacgtgactctcgatgatgggacatggaaagttaaatgctgatgcggccatttgcccgcattggtatcattggtccacaaaatgcctggccgtgtttcaatccttggcacccagtgaacggatgtgggatgaagctgcctccgggtgacaaggacttagcacttggcagataattcgtgaaaaaatgaagc

SEQ ID NO: 37226 - DNA, 2308 bp, DROSOPHILA
ccattatgttaacaagacggcgaactcaatttacgaactcatcaaattctcgttgcagttccggcgaggcgagtggcaacaacgaagatgtcaccaccaccagcaacaattccacacagacgcccagcgatctgagcccaccgggacccaatgaagaggtactgccccaggcgcatcaccagaatccgggccactgcatcgcctcctttgcagccatcaaccagatgaggaacaatgcgcagctatgcgatgtgcgcctggaagtgggcggcgacaccatcaatgcccatcgagtggttctggcctccgtatcgccctatttctatgcgatgttcaacggtgagtgcacttctataacaaaaagcaatcctttcctggaacttctagttcagctggtaatcccatcgatattggatataaatccaactactaaagcaatatgtaaactgatacataccgatctcatttaccagacgacatgctggagcgcactcagggattagtccggctgcacgacgtggacagctcagcgctgcggcagctgatcgattacacctacaccggcgagatcacgatcaccgagcagaacgtacaggtgctgctgcccgcgtccggactgctgcagatgcactcggtgcgggatgcctgctgtaagttcttgctgcgccagctgcatccttccaactgcttgggcatacgcagcttcgcagatgcccactcctgcaaggagctgcacacgcggtcgcataagtacgccctgcagaacttccagcaggttgtgggtaccgaggagttcctgctgctgccgttcgaggaggttcgcgagctgatctccaacagccagctgaacatcagctccgaggagcgagtctttgccgccgtcatcaattgggtgaaacatgacctgcccacacgaagactccacattgccgagttgatgtcaaacgtcagactgccgctggtgagcagggatttcctcatgagctgcgtggaaacggagaccctcatgcgcgatgactccgagtgcaaggagctgctgctggaagccatgaagtaccatttgcttccggagcagcgcagcataatgggcagccagcgaacccaggagcgtcgtccggagggcatgaaaccctacgtatttgcggtgggaggaggcagtctcttcgccattcacaacgagtgcgaggtgtacaatccgcgctctaactcttggagtccagtggcaccaatgttgtggcgacgatctcgatccggagtaacatccctgcacaagcagttgtatgtggtcggcggctacgatggagtcagtgatctggccacggcggagagctacaatcctctgaccaacaagtggagcaacatcaccccaatgggtacgaaacgtagctgtctgggcatctgctcctacgatgccttgatctacgtttgtggcggttacgatggcgcctcctgtctgagcagcatggagcgctatgatccgctcacaggcatctggagctcctgtccggcgatgagcacaaggagaaggtactgccgactggctgtgctggaaaattgcatctacagtctgggcggcttcgattcaaccaactaccagtcgagcgtggagcggtttgatcccagagtgggtcgctggcaaccggtgccaagcatgtcggcacgcaggagcagctgcggcgtcgcctccaccgacgggcatctgtattgcattggtggtaatgatggcaccatgtgcatgtccagcggagagcgattcagtttgcgcaggaacagctgggaacccatcgcagcaatgcactcgcgaagatccacccatgaagtggttgaggtggagggtgccctcttcgccttgggcggcaacgatggcagctcttcgctcaactccgtggagcgatacgatacgcggctaaacaagtggagcgtggtcaacgccatggtggctcgacgcagctccgtcggcgccgccgtcttggagtgcttccatctggagcctgcagcgagcggcactagcaatggcaacagcaccattaacggaatcggttccggtggagtcataccttcgtcatcgggcgtgggaggcactctaaccgttccgagccgagcggaggctgctgcctttacggccaacattgctctgagtagttccgcgccatcggctagctccacgctgcgtcgtcatcggagggacacacccggtctggccgagagccgcagggccaacagcaatgccagcagcagtggcagcgagagcggaagtaccagcggggccagcggatccggaggaggaaagccaccggcgacggcctga

SEQ ID NO: 37227 - protein, 165 aa, DROSOPHILA
MLTRRRTQFTNSSNSRCSSGEASGNNEDVTTTSNNSTQTPSDLSPPGPNEEVLPQAHHQNPGHCIASFAAINQMRNNAQLCDVRLEVGGDTINAHRVVLASVSPYFYAMFNGECTSITKSNPFLELLVQLVIPSILDINPTTKAICKLIHTDLIYQTTCWSALRD

SEQ ID NO: 37228 - DNA, 3153 bp, DROSOPHILA
aatggcatttcgggccacctaaaatgaattgtcagctcgaatttgtcggcgatgtcgtcatcgatggtgaggtgttgtatccaaaatggttgtgaattggaacgcgtttgtgtcgaatggattagctcattcgtttatttcgcatgtgaacatcatgaatgtattgtctctctatggaaatagcgtcagtctgggcaatcagcttctgaaaataaacaaatgccacgcctctcgcatttctcctaccgtttggagcgaatataacgttgaaagtcatgctcaatagccaatagatcgcgattcccaggcaccagctccgcaaatcggtattgcacgggccattttccaccgtcagatcgattttcattttgaaactctgtggtttacagcgaattttccaaatacaaatatggctagtatggcacttaaaccggtttgggaacacctagcgcacggaaacacaaccgcactgggcaagaatcaaataataagtgtggcgcaaatgccgatgccgctcagaagaaacggttgcgtaaactatgcaacacgaaaatacttttttttcgagcgtggaaaaactacgtctgatatgttcttaaaaaatatatgtgcactcatttactatatgaatttgtttgcatatgtttcgtcatttaagagtgaaatgaataaaatggggaattgtctttaaaataatagagagatttaatgctgtattatatatgtaatgtagctactattagcaccttgaaaaatattatgaaagtaagccgctgctgtgcagtgttaatgaatacataaataaatattttttaactatcatgccaaataataaatgcataaaaatatttaaaatataaaaatgttattaaaagaattttaaacaattagcgttaaaaagtcacattaaaagctggtgaacaagtcacagtttcgacaccaactgcttgaaccagtctggcaacgccgctgtacccaaaagcttttaattgtcagccaattgcgacttatcaagcaattgcaattttgctgcgccggcgaactgaagtaaaattgtctttatcttcgcattagcacgaaatcaagtgaatccagaatgctgtccagggtcttctgtatgcgcctgaacacctatggtgtggtcattggatggctgggcgtgattctatccttcttggccacgatcctcttgtccttggccctcggattcgtcgatgaaattgcgcagcagatcgccaagggatcggaagattctaacaagacggccaccgagattcgcagtggtaagggctaaccatcgagtgcacccacaaccaatcgtatattttttattgtatttcattgttcttgcggttattgcagtgctaatcatcgttttcagtgtttacctggcgctcaaggtgattaatcttctggcttcggccatgttggttgcaggtaccgttaaggtaagtctagtatcaatatgcaatctgtacaatcgcgtatatatgtgtctactatagtacatatctagagttagacctttttaaaagcccactattctgtaaaaaaaaccggcaagtttctttgcaaatacatatgtacatacaccatactaactagagatagagatggttctaatagcgtttgcctttcaggaacgccatttactcctgctgccctggctgatcaacaatggagtgctgcttgtctttggaattatcaccaatattgcaatgctggcccagatcatcggaaatacatctttcctgagcgctcttccaatcattttcgtggatgttggcctgctctgtaagtgactcaccacttcatacatacataagctctatctggaaatgggtatacacaatacacactggccgttgttgcgaaattgtggatccccattgcgcttatcgctcgacggtctgcgatcgttctataattgcgcttgggcacgatgcttatttttctccattcgctcgttttcagtgctgacctggtatctctactacggcatctactcgctcttcaagcagatccaggcatcccgtgagatccagcgcccgctgatcccacagccgacccagcagaccaactcctatcccagctacaccaagatttaagctccagtgtagcttcccgtttggccagctcttatttcatcatatcccttttcgaatgtttccaatggggcttccccgataaacccaatatttttctagctagtagcaccaaaattatatactacgttgtatttcatgcatcagagaatgaaaatctgtgtgtacatcatatatatttacattaacgcgattgtgtctatacgtatatccaaacgaaatggccaatacaagatttttcgattggctgcaaaaaaaaaaatatatattttttatataaataatcaaatggaaaattatttaggggcttggtttacgcttcttgttgtaatgtttggagatgctactattatttgtttgtaattcgaaaatgttaatacataccattccttaaaacttaacacactgtgataggctttcaaacatatatttctacacacacagagggcataaattaaatcgaatcttggggcggcattcgttgcagctacttaggtaactattgatgggccattctgctgctccggcggtctcactgtcatttgcccagacccagccacatgtagctgggatcaatgaactgggagccgcggtatccctgcggattgcgcgacaccagcgatcggatcttctgggagggcctgtagctgcgcagggcctgcaggagcttcgatgtcttccggtcgtgctcctgcttctgctcggaatcctccggagcgtcgggcggcacgggcggcaggtgcagtgggtgcgggtgtttaccctccagcatacgcgtctccgactcacccagttgcgattgctccgcgaagcgcaggttcgcttccaggcggttgaaaaagccgcccagattggtcatggctcctggaatgtagaacgaatgtcactagcaatgggttcattggttaaggattaaatccgctttaaattaaatcaaagaatccaaatcctatccaatactccattactcaccagcactgatcgagggcatatatcggagtgagtccggaacctcctttcgtttccagggcaaggtgtaggcgtaggg

SEQ ID NO: 37229 - DNA, 702 bp, DROSOPHILA
ttgcgacttatcaagcaattgcaattttgctgcgccggcgaactgaagtaaaattgtctttatcttcgcattagcacgaaatcaagtgaatccagaatgctgtccagggtcttctgtatgcgcctgaacacctatggtgtggtcattggatggctgggcgtgattctatccttcttggccacgatcctcttgtccttggccctcggattcgtcgatgaaattgcgcagcagatcgccaagggatcggaagattctaacaagacggccaccgagattcgcagtgtgctaatcatcgttttcagtgtttacctggcgctcaaggtgattaatcttctggcttcggccatgttggttgcaggtaccgttaaggaacgccatttactcctgctgccctggctgatcaacaatggagtgctgcttgtctttggaattatcaccaatattgcaatgctggcccagatcatcggaaatacatctttcctgagcgctcttccaatcattttcgtggatgttggcctgctcttgctgacctggtatctctactacggcatctactcgctcttcaagcagatccaggcatcccgtgagatccagcgcccgctgatcccacagccgacccagcagaccaactcctatcccagctacaccaagatttaagctccagtgtagcttcccgtttggccagctcttatttcatcatat

SEQ ID NO: 37230 - protein, 179 aa, DROSOPHILA
MRLNTYGVVIGWLGVILSFLATILLSLALGFVDEIAQQIAKGSEDSNKTATEIRSVLIIVFSVYLALKVINLLASAMLVAGTVKERHLLLLPWLINNGVLLVFGIITNIAMLAQIIGNTSFLSALPIIFVDVGLLLLTWYLYYGIYSLFKQIQASREIQRPLIPQPTQQTNSYPSYTKI

SEQ ID NO: 37231 - DNA, 10769 bp, DROSOPHILA
actttcaatggaattgaattttaaatttcgattttagattacagtactagctatcgataagcattgtttacttatgtgtcacagtgattttttcagtatggtaagtgcagttttatagtacattttttggttgcttagcagttaaattatttttaaaattaaatgaaatttgcagttttgttttgaaattcgccaacacttggttatcgcggattaggaatatcggtgaagaagtcacggttatcaatcgaagggccatcgctagcgagttacagcaaaaaaatttgccatgtaaatgcaacacgaaaacaaaagtgcaatattaagaaatgtaaaatgtgctagaactgaaaaacattcgctgtggtaaggggagaagtagttgaaacccgttgagtgatttgtgaaaagttgaaacaacgaatgggcgacaaaaacaaagtttgtctgtcccgtcacgagcccccaccccttccaacctgctttcatgaaaacagcagaatattcgtcatcagctggtcccctctcttctttgctctaactgcacttcactggtgagagaaggagaaagaaagagagagagttgaaatttattcaaaaattaatttattttgttcctgccacgcgacatcactttcaacccgattttgcagtcaagcgcgtcgaggcttccaatatatatacactcaatgtagggtcaattgacagaccctccaattaggcgaaagaatcgccagtttttcacaggtgcttcggctgccacactgctccaatatgcaaagcattaaacttttagtgaactaaaaaaagaaaatcacccatttgtgtgggggagttggaattcaaggacgcagcgccgcgggcaacaagtgtttgctaattgattgccattgattattcacagagagctctgccacaaagccaacccatcaagaaatcatcgaactcaagcaaaaagcaacatttagagccagctagcccactggcaaaagacgtcgccatggaatccgcggacgcactcgtcgaggagcagaagcttatggccgaggccaagtaccgcacatatatgaccaatatcgacaaggcgctgcgcaatttcgagtactccagcgaatgggcggatttgatatcggctctgggcaagctcagcaaggtataacactcatggttccatctgtggcaatacagataaacgtcggagcaactgactcacagcagtttccgggaacccattgaattccaaaagccttatctcgacttgtttttaatttgtgccctcctctttcgacaggcgatatcgagcaatacgcagtaccaggtcataccccggcgactcaagatagccaagcgattggcccaatgcatgcatcccgccctgccctccggggtgcatctgaaagccctggagacctattcggtgatattcagcaaaacaggaccggagcgcctggccacggagtttatatataggtcagtgaacgagataacttcgtttgttttcttaacaatatgtattttttgcctgcagcgctgggctatttccgctccttggatatgcggccatgaatgtacgacccgccttgttggccatctatgaaacctatttcgtacccctgggtgacaaactgaggcccgctctaagcggtttcttgaacggagtgctacctggctacgactgcggtctggatcacttcgagcgaattagcgctttactaaaacaagtctgcaatgccgtcaatcccatgcacttttacacagttctttgggaatcggtggccaacaatgcggcaattcgactgccggccatcacctacctgctggagcatttcaacaagcgattggacatgcaggagcagatctacattatggggcacaacagagagatcatgatgtcagctttgtgtgtctgcctaaatgactccttgatcctggtccagcgaaacaccctggagttcctactgctcggttttcccatgcatacggtgctgctctccgaggatgatttagtgaaactagtcaccaatggactcaatactatactgcggcgggacatgtcgctgaatagaagattgttcagctggcttttgggcagcgaggtggccaaaaactcaccaacctatgataccttatcgttggacacctcaaacgccccattggaggaggaaccggaaccttattttgtcaagcattcgcgtcacattctaatcaaagctttaatcaccaccctgcgactgagcttggagtgtgctcccatggacctaaagccctacagaatcatgctttcccttcttgataaggcagagattggcagcgccgtacttgactatgtgcttcatgacattattcgggctatgtatatctcgagtggcaacgcagaggctttaaaatctgccaatctgctgtttgccacattcgacccagcatatatctggagctacatgacgaacatgtttgagaaagcctgccagcaggcgaactccatgcaagaaaaatcccaggcgggtgaaacctccggaaaatatgcatgcgacgtaggatctggagatccgtgtgtactagagatctgcgtgctgacagaattcctattggaaaccgtttcgcttgagatgtacacggaaaccacaagggtgtatctacccaaggtgttcctggccatcactcaacttctatccttacacatggatcacatcagcagcaacgagatcacggcgtcgctaaaactctgcatgaagatcgtctcgagggtgcagcccatgataacgtaagtgaaaaatgagaaacaaaggcctatcaggcgatccctattaaccaccttatctctttgttttcgatgcagaagtcccataaaactgaataagctgatagagcagagcggtggctcatcgtcggatgaaaagattacgatgaattcggctagcgatgccggtaagaccgaggccggagcgcagggtaattccctagagaagagcaagtccgactctagattaaatcagtttgccgaaaatacgctgcacagtgcagatcccaacgatgaagaactcatccatcgttcagcatccaatcagagcgtggggcgtcaaagtcccaacaaaaagaaggccaaatcaatatctcgactttctgagttggataaagatgtgagtaactggtataaagatatgtcagaatctcttatttatcgtttcgtaaatacagatcagtgcctcagacactggccagcaatcatcctcagatctggacactccgcggagcatcaagaagctcaaggcaaaagccaaggtaccatttataaggagccccaagaaacagagacctaaggatatggtattaattcaatcaaatacatcagctgaagtgtcagatggacctagcgcagaagaacccaaaagtgctccacccgatcagacgccgcagtttcaattggatgaggagagccgggctacccaacagcgtggattctcgattcttgagaagtgcatacgacagtatgagatctttttcgaagtttacttgtcacgcaaactccttcatatcgaatcggaaccaaaggaatgctctgttaaggttcagctacagcgaactacaagcaccatccatacttccaatctgttcatggctgagcaggtgctggatcacgagtgcccagtgagggagtcacaaatcgagcgactgtttaacttgctacgcgttgacattgtgccgcgttccaaacagctacagcgattgctcaatcgatctttgccgctgcccgccagtgcaagtgagctaagcagcgatagcgaagcgcaggaagaaaagcaacagagcctgctcattgatggacagacccagcgcagtgtgcaacaactagctgagctccagctgagtccttctctccgaggagctgttaaactggcggccactctactggtcgagatgtcaacctttcccaactgcaacaaacacgttgtgctggacaaaaatggtgagttgttaagactctttaagagactgttgaatttattctttattccgcttcagagcctgagttgcccaactggttgaaggtcctatgcctggtggcatgctttgcccagagtgacaaggagctgcaagtggcttctataaccacattattcgatctaataaggtaagcgaaattatacttcaatgaagagattactataacccattaatgacttcagcctactgcgctcccaaatcgagcacacgaccagtccaggagtcaccttcgtagtaatgctgccgcttttgaagttcgggcatgtcagctatatggagcagcacacgcgcgtctttcaattggtgagctccattctgtgggattacctaggcaccgcaggcatagatcctgctcaaatagcagccctccttcatcagctacacagctgcctcgaaagcggtctggtagaaacggtcattggcaatcgaatgcagtcgcaacatttgcttcaaatgcaatcacaatcacgctcagacttgggaaaggctgccatacgtaactttcaaatggaacggctggcggaagctcagctgctctgtccaacggagtccactgagagattaagagagagtcaggcccgaagcttcaaaaagttcgaacttctatggcatctgggcagagacaagcagacggcgcgcggcttcgagaaaactctgttgaaagtgctggataccctcgcattaccacactacatgtccgagcgcacgtttgtgaccaactggctgcaggcatcgctcctgcgtggggatcttgctcgactgacgaagcctctctacaagatcctactttcggccagctccaagcgcgtaggcatcgttcacatgcagcagttgtaccgtgaatcggagacggaggttacacctgctttcgagcgggatgtatacgccatcagttcggagcaaggcaatgtaaagtaccatcacatggagacatccagtggaaataagaaaaagagtcccattcgaaacttccctaagaagatctttggagtgacattaagtggaggaaaagccaacaaggtatccaattttgttagcgacaaatctacggtcgccacttgctctgaggcaacccaggatatgaacaccataggtctgataatcaatccactcgagaatgccaacgactttgacgacgaaacggacctggaggagccccgcattgagatcccacacaaggaaaccccgctggagcagaaactagccagcgcaatggacgagagtgagcagccatcacaggagcaacccgcgaatcaaccggataacagtcttcaatatgatcaggatatcacagaccattcggacagcagcgattttgagtcggactctgagctgcgcgaaacgagcatagaaaaggaagacagcatcactgtcagttccagtgcaggagttagtgatgatgtcaagcgctttgtgggcgactgtgaaagtgtcactgacgctttgactcagcacgaaaagatcaaaagccgcaagacctatcgtttaaccagggagaaaaccccaggagaaaacagtctcaactcgctcgagcaaaaagatcacgatagtatttctgaactgcaggcagatgcgcttcctgctgatgaatatttccgggaagacaagaagctgggaaagcgtaagaaggtgctcacatctggggaaaagaaacgtctgagttgcatttcaaagacctccacggacagcaacatcagtggctcccatgtagaacaaccggagcaggaggaagaaacagaacccggaaccgaatccaccattaatgtagaagacaagcgacgaaacctcagcttggagaccagcaagcttcagcccgatatgcagaaaaccctagaaaagggcaaacagaatgtggagattctgcggcaaaataatgcagctgctgcagctgcagcggctgcggcagcagaggagcagatcagtgtgcgcagctccatgaagagcaccgtttctctgacagatgcggctcacctgtaccacaaccacttgctgatttacttggctatttacgacacccgtcaaacgttgtatgccctgcaaacacttcgcaacatcatttgctgcgacaaacgcaccttcctttgcttgtccatcaccacatccttttcgagcgcaagtctaaagcagttgctcgtgcgccatcgaaagagcatctccggcaaaggatttgatgggagtgtagggaactccgagtatgcccagggatatcgcggttgtatgcaactggagctgctggtcacgctctgtttgttctacgcgcgtggatactttcagaaagaatcgctagatgcccagcggcagtctccaacactgcaggatattgtaaataatcgaaggattcagctggagagcattgaactgctgaccctgatctgctcggaactcatagagattgtcaagggcatgggccgtggtctggccaactatattgccgatttgttggcacgcgctaagctccagaaggtcatgttgcactgcctaaacagctctgtgtgcagttatggtcttaaaggcaacactaacagtgggagctatgcggagcaggtgctcagcttcaatgatcctcaggatgatcagctgcatgcagactgcttccagcttcaactgctacgtttgcttttggctgtaatccgactagagcacgaggttcatcagctccgccaggatacgccgcccgcagctggggaggactcagcaggcaatgcgtcgcccactcgcttagcagaaggagcgacggccaatgtgaagtaccttcccaattgtctgattagccagcagccgatgttcctggccgcagtgttgggtgcactgcagcaagaacgattgcgtcacttgcaccgcaactggactgatttggtaacctcctcgctcaattgcttctcctttggctcactcacgaatattgtgatcagcgtagtgcatcaactgtgcagcaatcttgaccgcatttccaagatgggtctaccacagcagcgccactttcctccggattatgtggtatcccaactggaggctttaaccatcttgtgtcactactgtttactagacaatacgcagcagacggcgctctcacatctgtttaaccaagcttacccgcagaccagctcgtcggcgcaaagttccagcacgggtcagttgctcaacagcatcgttcattcgttcctctcggccagcgaatcctccacttcagcgcctgctccacggaatccccaattgcaggctgctcgcaatgcggtcctatcgcatcttccaaggataatgagcagcgtggctgccatatgggacagcgagctgggacaactgcgaccggttcgccagcagcttctagagttcctatctccggtgtccctgcatcacgggtccaacttccttgcggccgtggctgtcacctggcagcagcggggaatcgcaaccaatatgaacggtttaagcatcgcagagcagttccaaaggaattccgtgctgcaggcatgtcctgcccaactatctttggtttcactagtatccagcatacgtgtaatgcccatggactccttcgtaatgacattgcaccatgttgtgcgctcacctccgccaattcaccggccacctgcccagctaagcattgaggtgagtgctctggagctcttctacttctacatgaagtcggctccagctcctcaattagcggatgcctggagctcgctgctggccctcatccgcgatggcttgaatctgacaccaccggcgcagtttgcattgcttatgctactcaacgagtttgtccagcgctgcccgcagatgccattccaggacaagaaggaagtgcgtgagctgcacgatgtcacctctcgattggtggactctctctctagcgtggctggatcctgtctagagcagaccacctggttgcgtcgcaacctggccgtgaaagaggataccgatgggctagccaaggataatagtgttggaggcggaggtctacagcaatattcgttgcaggctcagagtgttctggcagcaatactctcaaatctactggacgtggcctatggttcccaggagaaggacaaggtggtgaacatagtgacgccgctgctgtacaatattactccgtatttgaagaaccacactgctcggaatgttccctttttctacgcctgctctgccctgttggctagcttaagtggctaccagtacaccaggaaggcttggcgaaaggatatgctggatctactgctggacaacgccttcttccagatgcatctctcgtgcctgcccttctggcgcatgatcatggatagcctgatgacctacgacaacaccacgttccgagagctgatgacccgcgtctccctctcgcaggcgggcagtctgaacatattcacctcccgggatcaggagtatgagcagcgggccatgttgctcaagcgactcgcctttgttatctattgcagcgagtttgaccagcacaacaagtacatgccagacatccagggtaagttaacgaaatgttcctcctttgttagatgctaagcaattaataacaaactttacccttttagtatgtaaaaatataattactatttatagcttagtaccatctctttggggaattaactaacatcagcactaacattttcaattcccttagaacaattggccaacagtctgcggctggttcccatgggtccttccgtgcaagcggccgttttcctgtgcttccgtgtgctgcttcttcgcatgtcacccgaccacgtcacctcgctgtggcccataatcatagcggaaatggtacaggtgtttctacaaatggaacaagagctcaaatcggagagcgaagagaggaagtaagtcgaacacgaatgaaaaaaagtagtcaaactaatagtatcattattggcagccaacaactgcgcctgccttctgggattgacgtgtcctggtccgctgcttctggagctagcaatggttacaattcccaaacaccgatgcagcactggcgatctgtgcaattggaggcctgcaagctgcttgaattgggatgtgtgctgcccgcaaccaaactgccacatttccagatgtatcgatgggcctttgtgggcaccgagttcgatgttcacgaggaggaggtgtgcctgcccaacggaagtctagagaacctggctaccttgcccagtgcgctgtatgttccgcatgtcagacgtgtggccaggctaatggacatgaagtacaccagtcagtcaccggtgagtaattcccactctcatcgtatgcgtcatctggctaactagtccctttggctttgttccagatactgcaacgccccagcaatagacacctgatgttgcacttccagcaactgcagtcgctgcaggagctgtacgcttttttcaccacgctgggcatcagttgcccccagccgcgtaactttgccgatacggagaacgatgtggccaattgcttgaaggagatcgaagaggtattggccaatgattttctggaaaagctgcccagcataaccacgccgagatgaaaaccggctgttgcccaacggcagacgcagtcgcagatccaagcgagtgggtcacacttcgagctcaagctgaacctgaacctaggtatggagtctgccatggagtcgggcagtactggccaggctgtgcgaatactggcggccgtgcaggctaagctaactacccaaaatgccgagacgagctttacgcagtcgcaaaacatcaataacagcagcaacaataagatgaccaactttccattttatgtctaagtaagcagattggagcagaagacgatgccgagtatgatagctagctatatagatagagaactgtgtcgagagtatataattgtccgtagtgtgatcgatcgttttaaatgttgaatgtttaagaacgcggtagcccaatagccaatagcaccctgtatgtatatgtatgtaaccaatgtatttaactgttgatagttgatcccaagtcgatgtgagtaagagatgtgcgttaacgacaaactgcaatcaaataaaaaacaaagcattttattgcaaacactgagatgaacgaacggtgggctcttccccgacaatttatgtagtgtagaatgataaggactaaaccacattcatggcgcgcggtgtttgtttgctggcttcgctgtttttcagctggaggtagaaggagtacacaattcgtgcgctgaagaggatcaatactgaaagtgtagcggagaatatgtatgatctgtacatttttgttaactcaatttgatgttcatagccgatacttacgaaatgtgatgatgtaaacgagcagggcaccgaaaacgttgttcattccggtagcctcgcgatatcctccgtagtggaagataaccccgaagacggcaaacggaaaggagatggcttcaatggcagcgaagatcagccagacgaacaccagaattggcttttcctgcaattcggaaaggtagattgggtttcgttgactcaataaaacggaatgggttgtattttatttaccttcagggttcctatcaataagcaaatattggcgactactacgatggcaaatccaataaaggtaagaactgcaaggattcaagtgaatttaaatagaaattattgaacgtacatatttcattcataaaaaaagccgttacaattagtggaaagtaaacataaacttgggcttataagtgactcaatgtattccaagcaaaacgttgctgtgctcttatctttcttcccgtctgaaatttgagaacacgactgc

SEQ ID NO: 37232 - DNA, 8052 bp, DROSOPHILA
atggaatccgcggacgcactcgtcgaggagcagaagcttatggccgaggccaagtaccgcacatatatgaccaatatcgacaaggcgctgcgcaatttcgagtactccagcgaatgggcggatttgatatcggctctgggcaagctcagcaaggcgatatcgagcaatacgcagtaccaggtcataccccggcgactcaagatagccaagcgattggcccaatgcatgcatcccgccctgccctccggggtgcatctgaaagccctggagacctattcggtgatattcagcaaaacaggaccggagcgcctggccacggagtttatatatagcgctgggctatttccgctccttggatatgcggccatgaatgtacgacccgccttgttggccatctatgaaacctatttcgtacccctgggtgacaaactgaggcccgctctaagcggtttcttgaacggagtgctacctggctacgactgcggtctggatcacttcgagcgaattagcgctttactaaaacaagtctgcaatgccgtcaatcccatgcacttttacacagttctttgggaatcggtggccaacaatgcggcaattcgactgccggccatcacctacctgctggagcatttcaacaagcgattggacatgcaggagcagatctacattatggggcacaacagagagatcatgatgtcagctttgtgtgtctgcctaaatgactccttgatcctggtccagcgaaacaccctggagttcctactgctcggttttcccatgcatacggtgctgctctccgaggatgatttagtgaaactagtcaccaatggactcaatactatactgcggcgggacatgtcgctgaatagaagattgttcagctggcttttgggcagcgaggtggccaaaaactcaccaacctatgataccttatcgttggacacctcaaacgccccattggaggaggaaccggaaccttattttgtcaagcattcgcgtcacattctaatcaaagctttaatcaccaccctgcgactgagcttggagtgtgctcccatggacctaaagccctacagaatcatgctttcccttcttgataaggcagagattggcagcgccgtacttgactatgtgcttcatgacattattcgggctatgtatatctcgagtggcaacgcagaggctttaaaatctgccaatctgctgtttgccacattcgacccagcatatatctggagctacatgacgaacatgtttgagaaagcctgccagcaggcgaactccatgcaagaaaaatcccaggcgggtgaaacctccggaaaatatgcatgcgacgtaggatctggagatccgtgtgtactagagatctgcgtgctgacagaattcctattggaaaccgtttcgcttgagatgtacacggaaaccacaagggtgtatctacccaaggtgttcctggccatcactcaacttctatccttacacatggatcacatcagcagcaacgagatcacggcgtcgctaaaactctgcatgaagatcgtctcgagggtgcagcccatgataacaagtcccataaaactgaataagctgatagagcagagcggtggctcatcgtcggatgaaaagattacgatgaattcggctagcgatgccggtaagaccgaggccggagcgcagggtaattccctagagaagagcaagtccgactctagattaaatcagtttgccgaaaatacgctgcacagtgcagatcccaacgatgaagaactcatccatcgttcagcatccaatcagagcgtggggcgtcaaagtcccaacaaaaagaaggccaaatcaatatctcgactttctgagttggataaagatatcagtgcctcagacactggccagcaatcatcctcagatctggacactccgcggagcatcaagaagctcaaggcaaaagccaaggtaccatttataaggagccccaagaaacagagacctaaggatatggtattaattcaatcaaatacatcagctgaagtgtcagatggacctagcgcagaagaacccaaaagtgctccacccgatcagacgccgcagtttcaattggatgaggagagccgggctacccaacagcgtggattctcgattcttgagaagtgcatacgacagtatgagatctttttcgaagtttacttgtcacgcaaactccttcatatcgaatcggaaccaaaggaatgctctgttaaggttcagctacagcgaactacaagcaccatccatacttccaatctgttcatggctgagcaggtgctggatcacgagtgcccagtgagggagtcacaaatcgagcgactgtttaacttgctacgcgttgacattgtgccgcgttccaaacagctacagcgattgctcaatcgatctttgccgctgcccgccagtgcaagtgagctaagcagcgatagcgaagcgcaggaagaaaagcaacagagcctgctcattgatggacagacccagcgcagtgtgcaacaactagctgagctccagctgagtccttctctccgaggagctgttaaactggcggccactctactggtcgagatgtcaacctttcccaactgcaacaaacacgttgtgctggacaaaaatgagcctgagttgcccaactggttgaaggtcctatgcctggtggcatgctttgcccagagtgacaaggagctgcaagtggcttctataaccacattattcgatctaataagcctactgcgctcccaaatcgagcacacgaccagtccaggagtcaccttcgtagtaatgctgccgcttttgaagttcgggcatgtcagctatatggagcagcacacgcgcgtctttcaattggtgagctccattctgtgggattacctaggcaccgcaggcatagatcctgctcaaatagcagccctccttcatcagctacacagctgcctcgaaagcggtctggtagaaacggtcattggcaatcgaatgcagtcgcaacatttgcttcaaatgcaatcacaatcacgctcagacttgggaaaggctgccatacgtaactttcaaatggaacggctggcggaagctcagctgctctgtccaacggagtccactgagagattaagagagagtcaggcccgaagcttcaaaaagttcgaacttctatggcatctgggcagagacaagcagacggcgcgcggcttcgagaaaactctgttgaaagtgctggataccctcgcattaccacactacatgtccgagcgcacgtttgtgaccaactggctgcaggcatcgctcctgcgtggggatcttgctcgactgacgaagcctctctacaagatcctactttcggccagctccaagcgcgtaggcatcgttcacatgcagcagttgtaccgtgaatcggagacggaggttacacctgctttcgagcgggatgtatacgccatcagttcggagcaaggcaatgtaaagtaccatcacatggagacatccagtggaaataagaaaaagagtcccattcgaaacttccctaagaagatctttggagtgacattaagtggaggaaaagccaacaaggtatccaattttgttagcgacaaatctacggtcgccacttgctctgaggcaacccaggatatgaacaccataggtctgataatcaatccactcgagaatgccaacgactttgacgacgaaacggacctggaggagccccgcattgagatcccacacaaggaaaccccgctggagcagaaactagccagcgcaatggacgagagtgagcagccatcacaggagcaacccgcgaatcaaccggataacagtcttcaatatgatcaggatatcacagaccattcggacagcagcgattttgagtcggactctgagctgcgcgaaacgagcatagaaaaggaagacagcatcactgtcagttccagtgcaggagttagtgatgatgtcaagcgctttgtgggcgactgtgaaagtgtcactgacgctttgactcagcacgaaaagatcaaaagccgcaagacctatcgtttaaccagggagaaaaccccaggagaaaacagtctcaactcgctcgagcaaaaagatcacgatagtatttctgaactgcaggcagatgcgcttcctgctgatgaatatttccgggaagacaagaagctgggaaagcgtaagaaggtgctcacatctggggaaaagaaacgtctgagttgcatttcaaagacctccacggacagcaacatcagtggctcccatgtagaacaaccggagcaggaggaagaaacagaacccggaaccgaatccaccattaatgtagaagacaagcgacgaaacctcagcttggagaccagcaagcttcagcccgatatgcagaaaaccctagaaaagggcaaacagaatgtggagattctgcggcaaaataatgcagctgctgcagctgcagcggctgcggcagcagaggagcagatcagtgtgcgcagctccatgaagagcaccgtttctctgacagatgcggctcacctgtaccacaaccacttgctgatttacttggctatttacgacacccgtcaaacgttgtatgccctgcaaacacttcgcaacatcatttgctgcgacaaacgcaccttcctttgcttgtccatcaccacatccttttcgagcgcaagtctaaagcagttgctcgtgcgccatcgaaagagcatctccggcaaaggatttgatgggagtgtagggaactccgagtatgcccagggatatcgcggttgtatgcaactggagctgctggtcacgctctgtttgttctacgcgcgtggatactttcagaaagaatcgctagatgcccagcggcagtctccaacactgcaggatattgtaaataatcgaaggattcagctggagagcattgaactgctgaccctgatctgctcggaactcatagagattgtcaagggcatgggccgtggtctggccaactatattgccgatttgttggcacgcgctaagctccagaaggtcatgttgcactgcctaaacagctctgtgtgcagttatggtcttaaaggcaacactaacagtgggagctatgcggagcaggtgctcagcttcaatgatcctcaggatgatcagctgcatgcagactgcttccagcttcaactgctacgtttgcttttggctgtaatccgactagagcacgaggttcatcagctccgccaggatacgccgcccgcagctggggaggactcagcaggcaatgcgtcgcccactcgcttagcagaaggagcgacggccaatgtgaagtaccttcccaattgtctgattagccagcagccgatgttcctggccgcagtgttgggtgcactgcagcaagaacgattgcgtcacttgcaccgcaactggactgatttggtaacctcctcgctcaattgcttctcctttggctcactcacgaatattgtgatcagcgtagtgcatcaactgtgcagcaatcttgaccgcatttccaagatgggtctaccacagcagcgccactttcctccggattatgtggtatcccaactggaggctttaaccatcttgtgtcactactgtttactagacaatacgcagcagacggcgctctcacatctgtttaaccaagcttacccgcagaccagctcgtcggcgcaaagttccagcacgggtcagttgctcaacagcatcgttcattcgttcctctcggccagcgaatcctccacttcagcgcctgctccacggaatccccaattgcaggctgctcgcaatgcggtcctatcgcatcttccaaggataatgagcagcgtggctgccatatgggacagcgagctgggacaactgcgaccggttcgccagcagcttctagagttcctatctccggtgtccctgcatcacgggtccaacttccttgcggccgtggctgtcacctggcagcagcggggaatcgcaaccaatatgaacggtttaagcatcgcagagcagttccaaaggaattccgtgctgcaggcatgtcctgcccaactatctttggtttcactagtatccagcatacgtgtaatgcccatggactccttcgtaatgacattgcaccatgttgtgcgctcacctccgccaattcaccggccacctgcccagctaagcattgaggtgagtgctctggagctcttctacttctacatgaagtcggctccagctcctcaattagcggatgcctggagctcgctgctggccctcatccgcgatggcttgaatctgacaccaccggcgcagtttgcattgcttatgctactcaacgagtttgtccagcgctgcccgcagatgccattccaggacaagaaggaagtgcgtgagctgcacgatgtcacctctcgattggtggactctctctctagcgtggctggatcctgtctagagcagaccacctggttgcgtcgcaacctggccgtgaaagaggataccgatgggctagccaaggataatagtgttggaggcggaggtctacagcaatattcgttgcaggctcagagtgttctggcagcaatactctcaaatctactggacgtggcctatggttcccaggagaaggacaaggtggtgaacatagtgacgccgctgctgtacaatattactccgtatttgaagaaccacactgctcggaatgttccctttttctacgcctgctctgccctgttggctagcttaagtggctaccagtacaccaggaaggcttggcgaaaggatatgctggatctactgctggacaacgccttcttccagatgcatctctcgtgcctgcccttctggcgcatgatcatggatagcctgatgacctacgacaacaccacgttccgagagctgatgacccgcgtctccctctcgcaggcgggcagtctgaacatattcacctcccgggatcaggagtatgagcagcgggccatgttgctcaagcgactcgcctttgttatctattgcagcgagtttgaccagcacaacaagtacatgccagacatccaggaacaattggccaacagtctgcggctggttcccatgggtccttccgtgcaagcggccgttttcctgtgcttccgtgtgctgcttcttcgcatgtcacccgaccacgtcacctcgctgtggcccataatcatagcggaaatggtacaggtgtttctacaaatggaacaagagctcaaatcggagagcgaagagaggaaccaacaactgcgcctgccttctgggattgacgtgtcctggtccgctgcttctggagctagcaatggttacaattcccaaacaccgatgcagcactggcgatctgtgcaattggaggcctgcaagctgcttgaattgggatgtgtgctgcccgcaaccaaactgccacatttccagatgtatcgatgggcctttgtgggcaccgagttcgatgttcacgaggaggaggtgtgcctgcccaacggaagtctagagaacctggctaccttgcccagtgcgctgtatgttccgcatgtcagacgtgtggccaggctaatggacatgaagtacaccagtcagtcaccgatactgcaacgccccagcaatagacacctgatgttgcacttccagcaactgcagtcgctgcaggagctgtacgcttttttcaccacgctgggcatcagttgcccccagccgcgtaactttgccgatacggagaacgatgtggccaattgcttgaaggagatcgaagaggtattggccaatgattttctggaaaagctgcccagcataaccacgccgagatgaaaaccggctgttgcccaacggcagacgcagtcgcagatccaagcgagtgggtcacacttcgagctcaagctgaacctgaacctaggtatggagtctgccatggagtcgggcagtactggccaggctgtgcgaatactggcggccgtgcaggctaagctaactacccaaaatgccgagacgagctttacgcagtcgcaaaacatcaataacagcagcaacaataagatgaccaactttccattttatgtctaa

SEQ ID NO: 37233 - protein, 2599 aa, DROSOPHILA
MESADALVEEQKLMAEAKYRTYMTNIDKALRNFEYSSEWADLISALGKLSKAISSNTQYQVIPRRLKIAKRLAQCMHPALPSGVHLKALETYSVIFSKTGPERLATEFIYSAGLFPLLGYAAMNVRPALLAIYETYFVPLGDKLRPALSGFLNGVLPGYDCGLDHFERISALLKQVCNAVNPMHFYTVLWESVANNAAIRLPAITYLLEHFNKRLDMQEQIYIMGHNREIMMSALCVCLNDSLILVQRNTLEFLLLGFPMHTVLLSEDDLVKLVTNGLNTILRRDMSLNRRLFSWLLGSEVAKNSPTYDTLSLDTSNAPLEEEPEPYFVKHSRHILIKALITTLRLSLECAPMDLKPYRIMLSLLDKAEIGSAVLDYVLHDIIRAMYISSGNAEALKSANLLFATFDPAYIWSYMTNMFEKACQQANSMQEKSQAGETSGKYACDVGSGDPCVLEICVLTEFLLETVSLEMYTETTRVYLPKVFLAITQLLSLHMDHISSNEITASLKLCMKIVSRVQPMITSPIKLNKLIEQSGGSSSDEKITMNSASDAGKTEAGAQGNSLEKSKSDSRLNQFAENTLHSADPNDEELIHRSASNQSVGRQSPNKKKAKSISRLSELDKDISASDTGQQSSSDLDTPRSIKKLKAKAKVPFIRSPKKQRPKDMVLIQSNTSAEVSDGPSAEEPKSAPPDQTPQFQLDEESRATQQRGFSILEKCIRQYEIFFEVYLSRKLLHIESEPKECSVKVQLQRTTSTIHTSNLFMAEQVLDHECPVRESQIERLFNLLRVDIVPRSKQLQRLLNRSLPLPASASELSSDSEAQEEKQQSLLIDGQTQRSVQQLAELQLSPSLRGAVKLAATLLVEMSTFPNCNKHVVLDKNEPELPNWLKVLCLVACFAQSDKELQVASITTLFDLISLLRSQIEHTTSPGVTFVVMLPLLKFGHVSYMEQHTRVFQLVSSILWDYLGTAGIDPAQIAALLHQLHSCLESGLVETVIGNRMQSQHLLQMQSQSRSDLGKAAIRNFQMERLAEAQLLCPTESTERLRESQARSFKKFELLWHLGRDKQTARGFEKTLLKVLDTLALPHYMSERTFVTNWLQASLLRGDLARLTKPLYKILLSASSKRVGIVHMQQLYRESETEVTPAFERDVYAISSEQGNVKYHHMETSSGNKKKSPIRNFPKKIFGVTLSGGKANKVSNFVSDKSTVATCSEATQDMNTIGLIINPLENANDFDDETDLEEPRIEIPHKETPLEQKLASAMDESEQPSQEQPANQPDNSLQYDQDITDHSDSSDFESDSELRETSIEKEDSITVSSSAGVSDDVKRFVGDCESVTDALTQHEKIKSRKTYRLTREKTPGENSLNSLEQKDHDSISELQADALPADEYFREDKKLGKRKKVLTSGEKKRLSCISKTSTDSNISGSHVEQPEQEEETEPGTESTINVEDKRRNLSLETSKLQPDMQKTLEKGKQNVEILRQNNAAAAAAAAAAAEEQISVRSSMKSTVSLTDAAHLYHNHLLIYLAIYDTRQTLYALQTLRNIICCDKRTFLCLSITTSFSSASLKQLLVRHRKSISGKGFDGSVGNSEYAQGYRGCMQLELLVTLCLFYARGYFQKESLDAQRQSPTLQDIVNNRRIQLESIELLTLICSELIEIVKGMGRGLANYIADLLARAKLQKVMLHCLNSSVCSYGLKGNTNSGSYAEQVLSFNDPQDDQLHADCFQLQLLRLLLAVIRLEHEVHQLRQDTPPAAGEDSAGNASPTRLAEGATANVKYLPNCLISQQPMFLAAVLGALQQERLRHLHRNWTDLVTSSLNCFSFGSLTNIVISVVHQLCSNLDRISKMGLPQQRHFPPDYVVSQLEALTILCHYCLLDNTQQTALSHLFNQAYPQTSSSAQSSSTGQLLNSIVHSFLSASESSTSAPAPRNPQLQAARNAVLSHLPRIMSSVAAIWDSELGQLRPVRQQLLEFLSPVSLHHGSNFLAAVAVTWQQRGIATNMNGLSIAEQFQRNSVLQACPAQLSLVSLVSSIRVMPMDSFVMTLHHVVRSPPPIHRPPAQLSIEVSALELFYFYMKSAPAPQLADAWSSLLALIRDGLNLTPPAQFALLMLLNEFVQRCPQMPFQDKKEVRELHDVTSRLVDSLSSVAGSCLEQTTWLRRNLAVKEDTDGLAKDNSVGGGGLQQYSLQAQSVLAAILSNLLDVAYGSQEKDKVVNIVTPLLYNITPYLKNHTARNVPFFYACSALLASLSGYQYTRKAWRKDMLDLLLDNAFFQMHLSCLPFWRMIMDSLMTYDNTTFRELMTRVSLSQAGSLNIFTSRDQEYEQRAMLLKRLAFVIYCSEFDQHNKYMPDIQEQLANSLRLVPMGPSVQAAVFLCFRVLLLRMSPDHVTSLWPIIIAEMVQVFLQMEQELKSESEERNQQLRLPSGIDVSWSAASGASNGYNSQTPMQHWRSVQLEACKLLELGCVLPATKLPHFQMYRWAFVGTEFDVHEEEVCLPNGSLENLATLPSALYVPHVRRVARLMDMKYTSQSPILQRPSNRHLMLHFQQLQSLQELYAFFTTLGISCPQPRNFADTENDVANCLKEIEEVLANDFLEKLPSITTPR

SEQ ID NO: 37234 - DNA, 5549 bp, DROSOPHILA
cttcatcagggctgccatttcgcgatcttgtgtggtctccggaaggagagcaatgtccaagctgctcttggccaacaactgtcgatccagctcctgctgaccattgatctctttcttctgctggcgaaactcggcgcgtaggcgactattggccatatagctgtcatcccagacgctcatgttgcgctccactagtttctggagcacgggcctggcatctgcccctgccttagcatccttggcttgatgctccaacttgtacatggcatcgtcgaagagacgcttttgtacctccttggtttccggtacaacttgttcgttctgcaagggatcccagcggttctcctgccgtctagcccccgaaagtataacatagtccaaattgccgggatccgtctggatctcaaagtggttgtcgcacaagtggcacttcatccggaacttaaaaaccggcgtagtgtagtacatgcccaccttggtcttctccgcattgtagcgcacgcccatgccgatgtggttcttgcatccatcacaccagatattgtagggcatctcaaagcggatgatgatgattcccaggtgaatcttgcgggcccgttcccgcagggcgtgggttccctggaacttgttgagaccgcccttcttcggatcatagtcgggcggatagtacttgttctgtcccttgcgttcacccattttttaagtggataggattacttaaatatttaaactaattacaagctcaatcttttgctgtcaaatgtaaataaacatttctgctttttttaaatcagctgtttcgggtcgctggtgatgacattatcggtggtgcggaaaacgctaaaaatagccagaaaatcatatatgaattagtcttgttattattagtcatattacaattaatatgtaataaatatgacctactatattacctgttactttaatgccaactgtttatttcaaattatttgacatataaaataaataagtaatcgataacatcaccgacggcgtgacagcttttccatctgtcccatcaccaaaataatagtttctcgtgggcatcgtcaaaactttggttggatttttaaccctttttgccacgtaaattgaattagaattagcgtccgatccaggcaaaatgataatctacacgaatgatggcaacccgctgggactgcagctgctaatgctcgccaaatttgccaagcagccggtgcaggtgcagttggttaacctaaatggtgagttctgccacggattcccttcgaattctggggaatgctctgaaaatgactcatttctgatgcaataactattgttaattgcagacgctaagtacaaggacttgctggtgctgcccactttggagctggacaacggattgcgtttgttctcgccggcggccattgccaagtaccttttcgtgggcaaggggcagcagcgcgatgaggtatgggttccgaaaattacttattggcccattgacccctgaaggttaaactaattcccgtatgtgctctctccctagtggctggaatggtctgccacgttgctggccccggctttggcccaccacatggctgtgggccacaaggcagatgcaaacgcgctgcccgtgctgaatgctctggtcaagaagctggatgacaaactgaaagctaccccctacctggctggcgacaaacccagtgccgccgacatcgccatttggtcgctccttgctcccgatggcactctcaagggagcacagaacgtggacaacttgagggattggtatggcagggtgaaagcgcttcccgaagttcaggaagttcttgccgaacagccactaaaggatctaagctttaatgctctgcagcagtcaaatcgctatggaggtttgcatcatgtaccattaaaacgtctcagcctggcggatgcaagcaaacttcttgtggataccacgccaacggtggcggatactgttacgaatgaggaaataagcgcggcgaaggctgcctttacctacacagctccaaaggaaatcaaggaggagcgaactgttcttcccaagcccggtgagcgtaacgtgctcatcacctcggcgcttccctatgtcaacaatgtgccacatttgggcaacatcattggttgtgttctctctgcggatatctatgctcgttactcgcgttctgctggctacaacacactcttgatttgcggcacggatgagtacggtacggccaccgagaacaaggcactggcagagaaccttactccccgtgagatctgcgacaagtacttcgaactgcacaacgccatttaccgctggttcggcattggctttgattactttggacgcaccacaacccaagagcaaacagagtaagttttggctgcttaagcaatgatatccttatcaaaaaacgcttgttttttacagcattgtccaggaggcatttaaggatgtcctcaaagctggctatatcatcacagagagcgtggagcagttgctttgccaaaagtgtgatcgttttctggctgatcggtgggtatttctggtacactatttcaagctccaacttacccattattctgctatagttttgtcgagggtacttgcccgcatcctggttgcggctatgaagatgcccgcggtgatcagtgcgacaagtgcggaaagttggtcaacgccactgagctgatccgtcccagatgtaaggtgtgcaacagtgccccagtcctgcgttcctccgatcagttgttcatcgatttgccaaaggcggaaccacaactcaaggagtgggttgataagtcagagggaggatggacgcataacgccaaagtgatcacaagggcgtggttaaaggaaggcctcaagccacgttgcattacacgcgaccttaagtggggcattcccgttccacacgaaggctttgagaagaaggttttctatgtgtggtttgatgctccatttggatacgtgtccatgaccaagcgctacacgaaggagtaccagcagtggtggcagccggccaagggaacagacgtcgagctcttccagttcatggcaaaggacaacgtgcccttccactcggtggtgtggcccagtgtcctactggccatcaacaagggacatacactggtatcgcacatcatggcaaccgagtatttgaactacgaggacggcaagttcagcaagagtcgtggtattggcgtattcggcaacgatgcccaggaaactggcattccagctgatgtttggcgattctatttggcatctgcgcgaccagaaggtcaggattctagcttcagctggaatgatctggctgcccgaaataactccgagcttctgaataacttgggaaactttgtgaaccgcgccctggtcttctgcgaaaagaatttcagcagcactgttcccggagtgatcaccactcaggatgaactcgttctgcttgcgttgataaaccgagagctgcgtggttacatcaactccatggagaaggctaaacttcgggatggcgttcgtcatctgctggccatttcccgacatggtaatggatacatgcaaagccaacagccgtgggtgttactcaaggggacggatgatcaaaagacgcgagcgtccacgataattggtctctgtgtcaacatcgcctgtctcttggcgaatctcctcttcccctacatgccaaccacggccaggactctatttggccagctcaacgcaaaacagacgccgctcaatgctgagtaagtacctcttaactgaatcattaagttaaagttagcttataactttatccatcgtaggaaaccacttgttactttgctactgcccgccggtcaccaaatcggcaaaccagctccgctctttgccaaactggagcagtccttcatcgacgaacttaagggcaagtatggcggagctcaggccacgaatgatgctgcccacagtcaaattagcgctgctgatttagagaaagccgtgcaagctcaggcagataaggtacgtgagctgaaggcaagcaccaaggataaggccatttggcaaccggaggtgaccaaactgctggatcttaagaaacagctggaagaggctaagaagaagactgcaactgccgccgcgcctgccgcgactccagcaccatcgaatggatcacaatcagttcaggatctggagaaggctatccaagagcagggcgacaaagtgcgcaagcttaaaggcagcacaaaagacaaaacagtgtggcagccggaggtaaatatcttgctggacctcaaaaagcaactggaggcggttcaaaaggcggcaaaggcagctcccgcagcaaacgcagcacctgctgcttcacccgccgccacggctgatgctgccaaggtgaaggctttggaagacaagattgcccagcaggccgaaaaggtcaggactctgaaggccactggagatgccgccgtgtggaaacccgaagttgatattctgttgtccctcaaaaacgagctggcggcgctgactggaacaccggtcgctggtggacagggcaagggcaaaaagaagaagtagacatcacacttcctaactaaaaatcacgctggacgcttttacctcagcccttttaatcaggcattcgatggcaaatctttagtcacggactggcacagttcaattcatctcccataagttttgcgtttgcatttaacaaccttttgtatttattcgaagtatggctaaatattcagttagtaatttattgagtttgtgaagaaaaataaaaaacaattgactttcaatggaattgaattttaaatttcgattttagattacagtactagctatcgataagcattgtttacttatgtgtcacagtgattttttcagtatggtaagtgcagttttatagtacattttttggttgcttagcagttaaattatttttaaaattaaatgaaatttgcagttttgttttgaaattcgccaacacttggttatcgcggattaggaatatcggtgaagaagtcacggttatcaatcgaagggccatcgctagcgagttacagcaaaaaaatttgccatgtaaatgcaacacgaaaacaaaagtgcaatattaagaaatgtaaaatgtgctagaactgaaaaacattcgctgtggtaaggggagaagtagttgaaacccgttgagtgatttgtgaaaagttgaaacaacgaatgggcgacaaaaacaaagtttgtctgtcccgtcacgagcccccaccccttccaacctgctttcatgaaaacagcagaatattcgtcatcagctggtcccctctcttctttgctctaactgcacttcactggtgagagaaggagaaagaaagagagagagttgaaatttattcaaaaattaatttattttgttcctgccacgcgacatcactttcaacccgattttgcagtcaagcgcgtcgaggcttccaatatatatacactcaatgtagggtcaattgacagaccctccaattaggcgaaagaatcgccagtttttcacaggtgcttcggctgccacactgctccaatatgcaaa

SEQ ID NO: 37235 - DNA, 3214 bp, DROSOPHILA
atcaccgacggcgtgacagcttttccatctgtcccatcaccaaaataatagtttctcgtgggcatcgtcaaaactttggttggatttttaaccctttttgccacgtaaattgaattagaattagcgtccgatccaggcaaaatgataatctacacgaatgatggcaacccgctgggactgcagctgctaatgctcgccaaatttgccaagcagccggtgcaggtgcagttggttaacctaaatggtgaacgctaagtacaaggacttgctggtgctgcccactttggagctggacaacggattgcgtttgttctcgccggcggccattgccaagtaccttttcgtgggcaaggggcagcagcgcgatgagtggctggaatggtctgccacgttgctggccccggctttggcccaccacatggctgtgggccacaaggcagatgcaaacgcgctgcccgtgctgaatgctctggtcaagaagctggatgacaaactgaaagctaccccctacctggctggcgacaaacccagtgccgccgacatcgccatttggtcgctccttgctcccgatggcactctcaagggagcacagaacgtggacaacttgagggattggtatggcagggtgaaagcgcttcccgaagttcaggaagttcttgccgaacagccactaaaggatctaagctttaatgctctgcagcagtcaaatcgctatggaggtttgcatcatgtaccattaaaacgtctcagcctggcggatgcaagcaaacttcttgtggataccacgccaacggtggcggatactgttacgaatgaggaaataagcgcggcgaaggctgcctttacctacacagctccaaaggaaatcaaggaggagcgaactgttcttcccaagcccggtgagcgtaacgtgctcatcacctcggcgcttccctatgtcaacaatgtgccacatttgggcaacatcattggttgtgttctctctgcggatatctatgctcgttactcgcgttctgctggctacaacacactcttgatttgcggcacggatgagtacggtacggccaccgagaacaaggcactggcagagaaccttactccccgtgagatctgcgacaagtacttcgaactgcacaacgccatttaccgctggttcggcattggctttgattactttggacgcaccacaacccaagagcaaacagacattgtccaggaggcatttaaggatgtcctcaaagctggctatatcatcacagagagcgtggagcagttgctttgccaaaagtgtgatcgttttctggctgatcgttttgtcgagggtacttgcccgcatcctggttgcggctatgaagatgcccgcggtgatcagtgcgacaagtgcggaaagttggtcaacgccactgagctgatccgtcccagatgtaaggtgtgcaacagtgccccagtcctgcgttcctccgatcagttgttcatcgatttgccaaaggcggaaccacaactcaaggagtgggttgataagtcagagggaggatggacgcataacgccaaagtgatcacaagggcgtggttaaaggaaggcctcaagccacgttgcattacacgcgaccttaagtggggcattcccgttccacacgaaggctttgagaagaaggttttctatgtgtggtttgatgctccatttggatacgtgtccatgaccaagcgctacacgaaggagtaccagcagtggtggcagccggccaagggaacagacgtcgagctcttccagttcatggcaaaggacaacgtgcccttccactcggtggtgtggcccagtgtcctactggccatcaacaagggacatacactggtatcgcacatcatggcaaccgagtatttgaactacgaggacggcaagttcagcaagagtcgtggtattggcgtattcggcaacgatgcccaggaaactggcattccagctgatgtttggcgattctatttggcatctgcgcgaccagaaggtcaggattctagcttcagctggaatgatctggctgcccgaaataactccgagcttctgaataacttgggaaactttgtgaaccgcgccctggtcttctgcgaaaagaatttcagcagcactgttcccggagtgatcaccactcaggatgaactcgttctgcttgcgttgataaaccgagagctgcgtggttacatcaactccatggagaaggctaaacttcgggatggcgttcgtcatctgctggccatttcccgacatggtaatggatacatgcaaagccaacagccgtgggtgttactcaaggggacggatgatcaaaagacgcgagcgtccacgataattggtctctgtgtcaacatcgcctgtctcttggcgaatctcctcttcccctacatgccaaccacggccaggactctatttggccagctcaacgcaaaacagacgccgctcaatgctgagaaaccacttgttactttgctactgcccgccggtcaccaaatcggcaaaccagctccgctctttgccaaactggagcagtccttcatcgacgaacttaagggcaagtatggcggagctcaggccacgaatgatgctgcccacagtcaaattagcgctgctgatttagagaaagccgtgcaagctcaggcagataaggtacgtgagctgaaggcaagcaccaaggataaggccatttggcaaccggaggtgaccaaactgctggatcttaagaaacagctggaagaggctaagaagaagactgcaactgccgccgcgcctgccgcgactccagcaccatcgaatggatcacaatcagttcaggatctggagaaggctatccaagagcagggcgacaaagtgcgcaagcttaaaggcagcacaaaagacaaaacagtgtggcagccggaggtaaatatcttgctggacctcaaaaagcaactggaggcggttcaaaaggcggcaaaggcagctcccgcagcaaacgcagcacctgctgcttcacccgccgccacggctgatgctgccaaggtgaaggctttggaagacaagattgcccagcaggccgaaaaggtcaggactctgaaggccactggagatgccgccgtgtggaaacccgaagttgatattctgttgtccctcaaaaacgagctggcggcgctgactggaacaccggtcgctggtggacagggcaagggcaaaaagaagaagtag

SEQ ID NO: 37236 - protein, 37 aa, DROSOPHILA
MIIYTNDGNPLGLQLLMLAKFAKQPVQVQLVNLNGER

SEQ ID NO: 37237 - DNA, 3660 bp, DROSOPHILA
ccaaggctggctgcacccgtttcgcccatgagatcacacatttctccgactcggttttggccaacaagttccccaatctggtgcacagtacccaccaccgggatggaggtcactttcccgcttttgagctgccccagcagctgtacgacgactttgtgtcttttgtccagaaagccaatttctcataaaacaaaattgtttatcattagttatagaagtccattgtacattttcatcgtgattcttgaaagaaacggttatgtttgttgcaaaaattaaatcaaatcgacttggtgattgtatttgccttatctgctttgaaaaccgaaagttgaagagttttttgtttggaatacacgagtggcgagcaaaagggcagtgtgtggtgtttgctttcataagtatatgtacatatatgatatatctaagctcggaacgatgttacgtaacttattcccatgggctatagtcgacattggtgtaccctttataagaaatcatgtaatatgttgaattattacttaactaaatgacagtagagtgatattaaaccaaatgaacatcaaattttacttggcaacaaagatctcacacatgttcagtctaccccagtgtagttcgaaaataaggggtattttttagctaacctggtagcccagctgcgtcgcaaaatatacaaaaacaattcgcgggtctcattctttatacatatagtacatacatacatacatacccctccggtctttacccgtaaaagcttcaaaccaaaaaccggcatgtaagctttgttgagtaaataaacaaacaagccgattcattcgagtcatccccgatgtggaaagccgctactccgtctcagtggagtcgagtccaaagtaaacccgcgataagccccaactgatcggcgtagggtggtcactcaaagtcgcttatcatcatgagcgtcgaaaacgagagctgcgcccacgatgatatggtagaatcagtggaatcgtagctgctatccgagacagtctgagtggaaccgctgataggaacagatgggtgtcactgttaaaattctggtcttgatactggccattgccggtgggctggtctataggaatgtgacccaactatgggcggacttgcccgcaccaaagttggatccccaggagtggtggggcgatgaggcgcagcccaaggattacgaggcctatttgaagaacaattcggaggtgataggcaataggcttagttatccggataaggtaagtgggggtctatccattattatgtactatatactaactcataccatgtgcagaccattgctgatttgaaagagcgtctcaatcgcaccctgcgccttacgcctccgctcgagggcgtggcttttgagtacggattcaatacgaattaccttaaggaggtcgtggagtactggcgcgatgactacctgccgcgttggcgcgaacgcgaggtgttcctttggcagttcaatcacttcaccaccgatattcaggggtaagataaggtgcccacttatcatatgcacagatagtaacgatggggttttaggctacgcacacacttcctccacctgatggtttatgatgacaacaaagtgggtaagaaacactatccggtgttgctgctccacggatggccgggatcggtgcgggagttttacgatttcatacatttgctgcatcagaccaatctggacaataataacaagtacatctttaacgtcgtggttccgagtttaccaggttatggctggtcacaggtgggttttgtccaatctacgtagtgtattataggcttatctgtctcttatcctgcagggcacctccagaaaaggactgggtcccgctcaagtggcggtgatgatgaggaatcttatgctgcgtttgggatacaacaaattctttatccagggtggagactggggcagcattattggcagcaacattgccaccttgtatccggaaaacgtgctgggctaccactcgaacatgtgcaacaatttgagtccgaagtcgctggctaagggtttagtggccgaattttggcccagtttgtttgtgccctctggctttgaagatttcttctttcccaagtctaacgagatgagatacctaatggaggagagtggctacttccacatccaggccaccaaaccggacaccatcggagccgccctcaccgataacccagtgggtctggccgcctacattctggagaagttctccacgtggacaaatcccagctaccgatctctgccagatggaggactcactaagcgctacaaaatggatgccctgctggacaacctgatgatctactacctgaccaattcgattaccacctcccagcgtctctatgccgagcagtatgcccaggcacagcgggacctgcacctggatcgggttcccacccgagtgccaactggatgtgcccgtttcaagagcgacattatgcagttcctggatgtccagttgaaggataagtacacgaacctagtgcacagcacttaccacaaaaagggcgggcactttgccgctctagaggttccaaaggttctatacaaggattttatagactttgtcgaaacggtggaacgtaagtttaaaattaagactctgtagatcttccaataaaagcttaattgttacaaaaaaaaattagtttttatttggtatcgataacctaaatggttttgatcctggaaatgactaggtacccggaaaaatagtagtagatgttaccgttttccactttcaacttttcacttttctatttaaccttaatattcaatgttgtattaggaatatttaatttgttatatacacttcaatgaataagtccaaaacaattcattcatatttttcataataataataatttggtttagtttctatggaacgcatagattaaatttttagaagaataatcgggacatagtttaatttttatcattatcggtattttttaaatgttgtacctcagcaaacacaaaatactgaaaagggtaccttgttttagggccaggtacacgcgtgaagttacctcccatccctgatcctggaacattacaatcgggaatcggagttaaagtggctgcgcagatggtcaagaatatataggaatattaaacaattacaaatttggaatacaggatttgtgtgagatacaggctggtccagaagctcataaaacgaacaatttataccacgatctaggaatttgccatcaagtttcgaagacaaagaaacttcaacttagagaaactcagaaaaaaaggagtaacagtaaaagggtgacattttctgaaacacgaaaaaaatgactgatttaaagttaactgtggcactaaccagcgttaatgcggagaatatgtcgcggcacgacatgcttcagtgggtgaacaacatggtccacggccacttcaagaagatcgaagagctgtgctcaggtaagacttataaagagcataaaattgggcaatgctgctaagttctatggtcttctccaggtgctgcctactgccagatgatggagatgatctttcccaactgcattaacctgaagcgcgtcaagatgaccgccaaactagagcacgagtatctacacaatcttaggctcttccaggaagccttcaatcgcttgaagctg

SEQ ID NO: 37238 - DNA, 1492 bp, DROSOPHILA
ctatccgagacagtctgagtggaaccgctgataggaacagatgggtgtcactgttaaaattctggtcttgatactggccattgccggtgggctggtctataggaatgtgacccaactatgggcggacttgcccgcaccaaagttggatccccaggagtggtggggcgatgaggcgcagcccaaggattacgaggcctatttgaagaacaattcggaggtgataggcaataggcttagttatccggataagaccattgctgatttgaaagagcgtctcaatcgcaccctgcgccttacgcctccgctcgagggcgtggcttttgagtacggattcaatacgaattaccttaaggaggtcgtggagtactggcgcgatgactacctgccgcgttggcgcgaacgcgaggtgttcctttggcagttcaatcacttcaccaccgatattcaggggctacgcacacacttcctccacctgatggtttatgatgacaacaaagtgggtaagaaacactatccggtgttgctgctccacggatggccgggatcggtgcgggagttttacgatttcatacatttgctgcatcagaccaatctggacaataataacaagtacatctttaacgtcgtggttccgagtttaccaggttatggctggtcacagggcacctccagaaaaggactgggtcccgctcaagtggcggtgatgatgaggaatcttatgctgcgtttgggatacaacaaattctttatccagggtggagactggggcagcattattggcagcaacattgccaccttgtatccggaaaacgtgctgggctaccactcgaacatgtgcaacaatttgagtccgaagtcgctggctaagggtttagtggccgaattttggcccagtttgtttgtgccctctggctttgaagatttcttctttcccaagtctaacgagatgagatacctaatggaggagagtggctacttccacatccaggccaccaaaccggacaccatcggagccgccctcaccgataacccagtgggtctggccgcctacattctggagaagttctccacgtggacaaatcccagctaccgatctctgccagatggaggactcactaagcgctacaaaatggatgccctgctggacaacctgatgatctactacctgaccaattcgattaccacctcccagcgtctctatgccgagcagtatgcccaggcacagcgggacctgcacctggatcgggttcccacccgagtgccaactggatgtgcccgtttcaagagcgacattatgcagttcctggatgtccagttgaaggataagtacacgaacctagtgcacagcacttaccacaaaaagggcgggcactttgccgctctagaggttccaaaggttctatacaaggattttatagactttgtcgaaacggtggaacgtaagtttaaaattaagactctgtagatcttccaataaaagcttaattgttac

SEQ ID NO: 37239 - protein, 474 aa, DROSOPHILA
MGVTVKILVLILAIAGGLVYRNVTQLWADLPAPKLDPQEWWGDEAQPKDYEAYLKNNSEVIGNRLSYPDKTIADLKERLNRTLRLTPPLEGVAFEYGFNTNYLKEVVEYWRDDYLPRWREREVFLWQFNHFTTDIQGLRTHFLHLMVYDDNKVGKKHYPVLLLHGWPGSVREFYDFIHLLHQTNLDNNNKYIFNVVVPSLPGYGWSQGTSRKGLGPAQVAVMMRNLMLRLGYNKFFIQGGDWGSIIGSNIATLYPENVLGYHSNMCNNLSPKSLAKGLVAEFWPSLFVPSGFEDFFFPKSNEMRYLMEESGYFHIQATKPDTIGAALTDNPVGLAAYILEKFSTWTNPSYRSLPDGGLTKRYKMDALLDNLMIYYLTNSITTSQRLYAEQYAQAQRDLHLDRVPTRVPTGCARFKSDIMQFLDVQLKDKYTNLVHSTYHKKGGHFAALEVPKVLYKDFIDFVETVERKFKIKTL

SEQ ID NO: 37240 - DNA, 4148 bp, DROSOPHILA
caatgctccatgccataagggtaggataccaacaaaatttttaaacgaccttaatctgggcggttcttccgtggcccccccaaagcccagaccttaatatcattgaaaacgtttgggcttttattaaaaactaacgaactattgataaaaatagaaaacgagagggagccatcattgtaatagcggagatttggtccaaattgacattagaatttgcacaaactttggtaaggtcaataccaaaaagacttcaagcagttattgatgccaaaggtggtgttacaaaatattagtattgtatttatataaaataaaaaaaattcttatgttgaaattagatgttaagctgaaatttactaaattaagttgagtgaaaatacttttgaagcgcaataaacatgtgaaaatactattgacaacttgcatgcatattttcttttgctttaagctttgtactatgaaccgttatctttcgtatttcttttcgactaccttctgcatagatcaagctaagcgataagaactatttcaggcaaatcggacaacaacaagaagaaatataacaaaaagaagttgaagtttgcaaatattgtgcgttgtgaaaatacttttgaccacctctgtatatattaagggctccgcgtgttggtaattcgagttcttaatcattattaattaattaaatcagtatttagttaaatgtcatataacaatttcattttaagcatgaatcgtttcttgttcactttactttcgtggattgataaatggaactgcttgatcatcttcctaaactaaatgtaaattttaagtacaaaaattgctctcactcaatttgttgccaaaagctcgccgaaattctcaaattatttgtccaatcatgctcgcattgcattgccgtgtggaatacgatccacttgaaatccacaagccaacaaaaagcttttgtttgccggtagcttgcgctttacaaatcatttgtgctcgacgatcgtaagcgaggagttgcgcagttcgccgatctgtgtatatagaatatataaagaatatagcataaacacacaatggcgaacatctggccacgaatcttggtcggagctctgaccatcctggtggccgttggctataagaactatcgcgatctctcggcgcccggcaagagacccgatctggacaacaacgcctactggggtccaacattgaaggaaccttatcgggagaacaaggccatcctacccttcgacatcagcgtaaagccagaggtaaataaatatacatacacaaatgcatatatacaaatgcaaaatatcaaatcagtatgatatgcaatcaaagctatgaatgtatagtatatgtaaatatttcgaatcatgctggtatgcaagtatcattaattatacagaatttatggtaatttgtacaaattcatactatttaaagttatatttgatttaataatttaatttaagttatataatttttttaatatccttcatcacttcttatcaaaggttattgaggatctaatcggtcagctgagtcgtcctttgaaagcgcaggcgccactggagggtgtgggtttccaatacggattcaatgccaacgaactggccaaggtggtgaaatactggcgcgatacatatctgcccaaatggagcgaacgggaggagtacctcaagaagctggatcactaccaaacggaaattcaggggtgagtgcgacagaacttatggaaaaccgaagtgttccacgcttaattagtcgcctgcttttgcaaattaacatgaaaagttaaccccaaatgtttttccatttttttgcagtttaaaaattcattttattcatgccaagccaagccaggtgaaaggccaaaagcccaagaaggtgctgcctctgcttctgatgcacggatggccgggaaccgttcgcgaattctacgacttcatccctctcctgaccacgcccagtgacaagagcgactacgtcttcgaggttattgcacccagtctgcccggctacggatggtctcaggttagatttgtttccaaagggacaacaataaattgctaaccaagtaatgctatattctccaaaagccgtaagccatagaacttatctcttactatggcattaatatatagcacttaggtagacaagttattacacaaccttctccaaattacaaattgaaaaatgactaattttatatttttccaactccagggctcttcaaaaactggattcggtgtggcgcaagtggcggtggtgatgcgcaacctgatgctccgagtgggattcgataagtttctggtgcagggtggcgattggggttccataattggatccaatgtagcctcactttttccggaaaacgtgctgggctatcattctaatatgtgcggaaataacagccctatgggtcagttgaagatggtgctggcctcctttttccccagctggtttgtggacagcgagtatgcggacttctacaagggactcggtcacttgtttagcaccataatggaggagatgggctatgcccacattcaggcctccaagccagacaccatcggcaatgctttgatcgacaatccaactggtctggctagctatattctggagaagttctccacatggacgaatacggcatttagatcgcttcctgacggtggtctgaccaagagatttacctacgatcagcttctggacaatgtgatgatctattatgtgaccaactccattaccacctccatgcgtctgtattccgaatcaatggttgcctcgcagtttgcactggccgtggactccgtgcccatcaaggccaaggctggctgcacccgtttcgcccatgagatcacacatttctccgactcggttttggccaacaagttccccaatctggtgcacagtacccaccaccgggatggaggtcactttcccgcttttgagctgccccagcagctgtacgacgactttgtgtcttttgtccagaaagccaatttctcataaaacaaaattgtttatcattagttatagaagtccattgtacattttcatcgtgattcttgaaagaaacggttatgtttgttgcaaaaattaaatcaaatcgacttggtgattgtatttgccttatctgctttgaaaaccgaaagttgaagagttttttgtttggaatacacgagtggcgagcaaaagggcagtgtgtggtgtttgctttcataagtatatgtacatatatgatatatctaagctcggaacgatgttacgtaacttattcccatgggctatagtcgacattggtgtaccctttataagaaatcatgtaatatgttgaattattacttaactaaatgacagtagagtgatattaaaccaaatgaacatcaaattttacttggcaacaaagatctcacacatgttcagtctaccccagtgtagttcgaaaataaggggtattttttagctaacctggtagcccagctgcgtcgcaaaatatacaaaaacaattcgcgggtctcattctttatacatatagtacatacatacatacatacccctccggtctttacccgtaaaagcttcaaaccaaaaaccggcatgtaagctttgttgagtaaataaacaaacaagccgattcattcgagtcatccccgatgtggaaagccgctactccgtctcagtggagtcgagtccaaagtaaacccgcgataagccccaactgatcggcgtagggtggtcactcaaagtcgcttatcatcatgagcgtcgaaaacgagagctgcgcccacgatgatatggtagaatcagtggaatcgtagctgctatccgagacagtctgagtggaaccgctgataggaacagatgggtgtcactgttaaaattctggtcttgatactggccattgccggtgggctggtctataggaatgtgacccaactatgggcggacttgcccgcaccaaagttggatccccaggagtggtggggcgatgaggcgcagcccaaggattacgaggcctatttgaagaacaattcggaggtgataggcaataggcttagttatccggataaggtaagtgggggtctatccattattatgtactatatactaactcataccatgtgcagaccattgctgatttgaaagag

SEQ ID NO: 37241 - DNA, 1595 bp, DROSOPHILA
aggagttgcgcagttcgccgatctgtgtatatagaatatataaagaatatagcataaacacacaatggcgaacatctggccacgaatcttggtcggagctctgaccatcctggtggccgttggctataagaactatcgcgatctctcggcgcccggcaagagacccgatctggacaacaacgcctactggggtccaacattgaaggaaccttatcgggagaacaaggccatcctacccttcgacatcagcgtaaagccagaggttattgaggatctaatcggtcagctgagtcgtcctttgaaagcgcaggcgccactggagggtgtgggtttccaatacggattcaatgccaacgaactggccaaggtggtgaaatactggcgcgatacatatctgcccaaatggagcgaacgggaggagtacctcaagaagctggatcactaccaaacggaaattcagggtttaaaaattcattttattcatgccaagccaagccaggtgaaaggccaaaagcccaagaaggtgctgcctctgcttctgatgcacggatggccgggaaccgttcgcgaattctacgacttcatccctctcctgaccacgcccagtgacaagagcgactacgtcttcgaggttattgcacccagtctgcccggctacggatggtctcagggctcttcaaaaactggattcggtgtggcgcaagtggcggtggtgatgcgcaacctgatgctccgagtgggattcgataagtttctggtgcagggtggcgattggggttccataattggatccaatgtagcctcactttttccggaaaacgtgctgggctatcattctaatatgtgcggaaataacagccctatgggtcagttgaagatggtgctggcctcctttttccccagctggtttgtggacagcgagtatgcggacttctacaagggactcggtcacttgtttagcaccataatggaggagatgggctatgcccacattcaggcctccaagccagacaccatcggcaatgctttgatcgacaatccaactggtctggctagctatattctggagaagttctccacatggacgaatacggcatttagatcgcttcctgacggtggtctgaccaagagatttacctacgatcagcttctggacaatgtgatgatctattatgtgaccaactccattaccacctccatgcgtctgtattccgaatcaatggttgcctcgcagtttgcactggccgtggactccgtgcccatcaaggccaaggctggctgcacccgtttcgcccatgagatcacacatttctccgactcggttttggccaacaagttccccaatctggtgcacagtacccaccaccgggatggaggtcactttcccgcttttgagctgccccagcagctgtacgacgactttgtgtcttttgtccagaaagccaatttctcataaaacaaaattgtttatcattagttatagaagtccattgtacattttcatcgtgattcttgaaagaaacggttatgtttgttgcaaaaattaaatcaaatcgacttggtgattgtatttgccttatctgctttgaaaaccg

SEQ ID NO: 37242 - protein, 463 aa, DROSOPHILA
MANIWPRILVGALTILVAVGYKNYRDLSAPGKRPDLDNNAYWGPTLKEPYRENKAILPFDISVKPEVIEDLIGQLSRPLKAQAPLEGVGFQYGFNANELAKVVKYWRDTYLPKWSEREEYLKKLDHYQTEIQGLKIHFIHAKPSQVKGQKPKKVLPLLLMHGWPGTVREFYDFIPLLTTPSDKSDYVFEVIAPSLPGYGWSQGSSKTGFGVAQVAVVMRNLMLRVGFDKFLVQGGDWGSIIGSNVASLFPENVLGYHSNMCGNNSPMGQLKMVLASFFPSWFVDSEYADFYKGLGHLFSTIMEEMGYAHIQASKPDTIGNALIDNPTGLASYILEKFSTWTNTAFRSLPDGGLTKRFTYDQLLDNVMIYYVTNSITTSMRLYSESMVASQFALAVDSVPIKAKAGCTRFAHEITHFSDSVLANKFPNLVHSTHHRDGGHFPAFELPQQLYDDFVSFVQKANFS

SEQ ID NO: 37243 - DNA, 5794 bp, DROSOPHILA
ttgtcaatcacaaattcgatttaatactgatttcactgctcactgtcgctcgcgaaatggaacttttccagctgtgcaatatgatacagtatttaccttataggaattaaacaattagctcgttctttaaacaattccaattgaaactcagcgaaaaagttttgcttattgcgcaggcacaacggctctgtggcacgtttttatttggggcgcatctacacgatgcctaatgtcaagtgtggaaagtaagggactgtttagacaatgccataaattaacctgcaaatcgtgacaaatcgggacatcggaaatcgaatatactctgaaatcactggaaacattgaattgaaacaaaatatgcataaatttaacaaaaaaaaaaatgcgcaaggtgcctatgccggggggcatccttgatccaatgagaattacttttagaactttacgaaatatgaaatgacacttatttatctttaatttaatctttacatttattatgtatttgattcgtattacagatatcttttgttcattgtatgttgagtacactaaaattcataactggccacgcccacttatgcaaaaaacattaacaccctcctcatacattgatcagcgctaattctacgatttaaaagctacgatagtaaagttagttgccattgtttatagttagttagttatagatgccgctaacctacgtgaatacatttacaatcgatgttcttcagggggatattgaatgcgtcttttgatgtggaagggggggggtggtatatgtatgtatgacagaacatttaaataatgttgggatgggtgtttatatatgtatgtacaacttaaaatggcaatcttaggcctacaatacatgagttacaattacaaatattattttatggggtttggggatttcaggaatcggaacaagacaagacggaaaccagttaaacattcccttacactagcaacttaaatgaaaatctaaatcagtggcttatgcttaatacggcagtagtccctgattctcatcgttttcatcgtggttgtcgctatcatcgtcgtcctcctcctcttcctcttcttcctccgcagctttttcctcttcctggtcgtcttcctcttgatcttcatcctcttcgtcctcctcatcttgttcttcggtggcagtggctgtatcctcggcgatttgcaactctgattcgccaactacatcgattgcggcctccagcgaataggcatcccgttcacggctggcctccggatccgcatctgtatcgaaatagttctctagattggcgtcatccgccgccaaagtttgtgggctgtcgcacaacgtgttgctcagcatgcccatggaattctctgccgaattataatgctcgttgaagagtccgatgttcacaggctgcgttagagtggacagttcgattagggagttggctatgtcgtgctcttccatcgccggatgtccgcgcatcagcggatcgccggaaaagcccgctgctccccaggcaaacgaacttaatggagccgagctcgaggtggctgtcgaactgctggccaaactggcactctggctggactgattgctgtggctgcaactgcgtcgccgtttcggtgcactgcaacccggttcgttatcctctctcggcgatggagtcatccgtgagtggaggggccccgcctggtcgtcatccggcaactgaagctccagttttacaggtttcctatcctccagagttgcctccgcttttagtgtggcgcgcaaggcactgagctgcatgtttacagcgctatcatcatcggaatcgctgctggatttgttgttgttcgtgttgggttgacctagaaaacaaatttgtgtaattatacaagtttgatctgataggataataaatagttttttgattgtttttagagatcattctagtgttttcctgttcagaatgtgtggtgttatacatacattcatacatgctgataagaaccgtctagattcacaaaccacttaccggatgactcgctgctatcgccacctgactcgtcatcggacgaacttggactgtcactgctgctttccggttggcgctggggcttcttttggcttatctgctgctgctcaagcatttccatattctggtctttggccttccgtttacgagatgtccttttcccgattgactcctttttagagcgcttattattcgccactcgcttgcgtgactttttcttgggtggctcggagttggtggtactactgtcactgctatcctcatcgctgctgctgctgaagtgaaaggaggagctgctgcagctgctggggctgctgccactgtcactgcgggcaggcatggatgaacggcgtgatttcttcgaacgtatagagcgcagcgtgcgcaactgatcgaggcgccgtgtctgcgccatgaccagcttccagttcttgcctctgttggccgctgcgccacttgtgctgggccccataaacaggccctgatccctggaggccagatccaaaggggattgtgtcgaccggttttcggcaattgcgtccggcgcagcttcgtgctgctcatttacgaacaccacatcggagtcactatttgagtcaaggctcacctgttcgggagtgcgcatgtgtggtggcttcagctccagcacaaagacgcactcatcctcatcgccggaactgctgctgctctccagttcgatgtgcgccgtcactggaagagtagcacctgcgtgtctcctactggtgttgctgccatcattgatggccgccacctctgcatttgcggccgcatcgccgtcgtcgatctcgatgacctctggttcctcgctggcaaccgccgctgggcgcctcatgctcaggttaatggcaaccgtttgtgagcccacattggttgtacggcgtatggaaatccccggcagctcactgccatcactggccattgtcacgctgaaggaatgtgtggcaccaggattggtcacaatcacactggtcgacgggcgtaccctaggggggctccaatccggagagaagccagcgtttatagcatccgcatcgctatctccgacctccaaattcagatcatcaccgttcgaggattgtgtctccaccatgtccaacagatccacctccacctcctcagccactcgtgccgaatactgcaccacatgatcgtaaccgtttatgtcatacggggagcgggcaaagttaaacagttcgtggataaagtgactggtgcgctcgccgagatacggcgacagccgtcgacggaatgtaggacctagtaagctagtcatgggcaggaggtcgctcatcagagtcatcacagtatttacgctatgtgcggcattcctcagtaggcacatgatgtcgcgatggatccaaggcatcaggcgatgaatctgagcaggattgtttctataagcaaggatttgaaatcgaaatcagtatggttaagtatgcggttttaggtatacgaacagacctgtaaaaacgggcgctccactctcgaaagtgtccagtcacgctgtcgctgacgggcagagcatacagctttctatcgtacacataacgtcgccagagctggctcaatgaacccgacgtggatgcatcctgatcgtgctggtagtaattcatcagctccgagcgatacggctcaaagcggctgtacgatcgcctgccagctgctacttctgccgccgaaagcacatcttcaccagcagctcctgccgctatggccgcctcgatgtcgttgacaatgacggcctggttctgcaccagcggcgtgtacctgggacgcctcacaatgtggtaacgtagggagggattttctgttggaaccggcgacgtagtctgcaccgggtagcgatcgtagtcgtccagggtgcggacattgtgtatgatggttctgaagggctgcttacacagtggacactcgggctttatctgcaatcgagaataattagatggttaaaataatggtttactcgcctgcggactggttaccttgctccactcgcacaggcacttgaagcagaactggtgcatgcacgagtccgtgaagcacttcctcctgcagcgggacaagcagatggcgcaattgggcggcggcgagttgcgctctactgttccgttctcctccgcggcggatgcactggtgcccggctcaccgatggcgttggcattatccgggccagcggatacaggttcctcggcctcgttgtctcccgactcactgccgctctcggtgagatcagcaaacttaatggccgcagccggtagcgtccggcctccggcattggatccttccaaaccaggctccacaatcaccgatgcgcccaactcatccactcccaaatagggcacgttggcggcaagagctccgggattctcctccgccattctggcgactatatagcggctatatgggctgtaaaatcggccgtaagatgggcgagaactcgggcctgaagttttgtgtctactctgtcctcctctctctctcactctgctcctctcgccctctctcgctcgcactcgctggctggcacgctactctatcatctggttcgcaattcggttctcaatcctcgttttccagcggccttttccgggctaggggacgcattatccgtattctcttgcggtctatgtggtggtcagtggcctgttctgtaaaatagcacaattttcgggccagaaatcgcactatatctcagttaattttacacctgaaaatgcaggaaacttgatttttttgaccactacggtgataccgttcgtcgcgtacagttaaatgctgcagaccacggagattgatatacttttgaattacttcagaatacaaattttaaataaaaaaggtttggaaaatatgttgagtcagcggttctactagctgttctaccctctgattgaacttgattgaaaaagcaggactagctttgttacaaaaattacgaaatacacaaaaaatgcttaaagaactagaccaatttattttataaattgaaatgtgatattttgagaaaaataaatatttttagatgtattacacaatcttgtgagattgtggcgcgggtaaattacaaattccaagaaacttcttttcgaacctaggagaaccaaacaattattttgatattttctaaaatagtttggtatttcggttttggtatttaatttcggagccttaattgtttgtgttatcgatagctcgttgctttattgcctttttgtggcgtctgtttcaatttgtttgttttcaattgttggtcataatttggatccccaaaatgaatcgacgcaacaagcggacgtcgtactaccaatacgaagtatacctagacttcatggaggagaatcccccgatgtcggccaacaaactgagtcgcacccaggacggcaagaagtggaaggagctcagcgatctgctaaacaagtgctccacgggtcccactttgtcgcccgaggaatggcgaaaggtatgttgtaaccagttgggtatcgagtgtacaagcccacagtgtgtcatgcttatagcgcctcaacgactggaagaacagcacgcgctccaaataccgacgcagcatcaactcggatgacaagagcaatgcaatgactcctctggagaacagagccctgcagatcttctccttagaaccgaattttcgcgagggaatttcgatgcgcctgcacgaactgatggaggagcaagaggaactggatgaagaagagaatgagaacctggaggagttggtggatgaggaggaggaggaggaggtg

SEQ ID NO: 37244 - DNA, 3500 bp, DROSOPHILA
cgacgaacggtatcaccgtagtggtcaaaaaaatcaagtttcctgcattttcaggtgtaaaattaactgagatatagtgcgatttctggcccgaaaattgtgctattttacagaacaggccactgaccaccacatagaccgcaagagaatacggataatgcgtcccctagcccggaaaaggccgctggaaaacgaggattgagaaccgaattgcgaaccagatgatagagtagcgtgccagccagcgagtgcgagcgagagagggcgagaggagcagagtgagagagagaggaggacagagtagacacaaaacttcaggcccgagttctcgcccatcttacggccgattttacagcccatatagccgctatatagtcgccagaatggcggaggagaatcccggagctcttgccgccaacgtgccctatttgggagtggatgagttgggcgcatcggtgattgtggagcctggtttggaaggatccaatgccggaggccggacgctaccggctgcggccattaagtttgctgatctcaccgagagcggcagtgagtcgggagacaacgaggccgaggaacctgtatccgctggcccggataatgccaacgccatcggtgagccgggcaccagtgcatccgccgcggaggagaacggaacagtagagcgcaactcgccgccgcccaattgcgccatctgcttgtcccgctgcaggaggaagtgcttcacggactcgtgcatgcaccagttctgcttcaagtgcctgtgcgagtggagcaagataaagcccgagtgtccactgtgtaagcagcccttcagaaccatcatacacaatgtccgcaccctggacgactacgatcgctacccggtgcagactacgtcgccggttccaacagaaaatccctccctacgttaccacattgtgaggcgtcccaggtacacgccgctggtgcagaaccaggccgtcattgtcaacgacatcgaggcggccatagcggcaggagctgctggtgaagatgtgctttcggcggcagaagtagcagctggcaggcgatcgtacagccgctttgagccgtatcgctcggagctgatgaattactaccagcacgatcaggatgcatccacgtcgggttcattgagccagctctggcgacgttatgtgtacgatagaaagctgtatgctctgcccgtcagcgacagcgtgactggacactttcgagagtggagcgcccgtttttacagaaacaatcctgctcagattcatcgcctgatgccttggatccatcgcgacatcatgtgcctactgaggaatgccgcacatagcgtaaatactgtgatgactctgatgagcgacctcctgcccatgactagcttactaggtcctacattccgtcgacggctgtcgccgtatctcggcgagcgcaccagtcactttatccacgaactgtttaactttgcccgctccccgtatgacataaacggttacgatcatgtggtgcagtattcggcacgagtggctgaggaggtggaggtggatctgttggacatggtggagacacaatcctcgaacggtgatgatctgaatttggaggtcggagatagcgatgcggatgctataaacgctggcttctctccggattggagcccccctagggtacgcccgtcgaccagtgtgattgtgaccaatcctggtgccacacattccttcagcgtgacaatggccagtgatggcagtgagctgccggggatttccatacgccgtacaaccaatgtgggctcacaaacggttgccattaacctgagcatgaggcgcccagcggcggttgccagcgaggaaccagaggtcatcgagatcgacgacggcgatgcggccgcaaatgcagaggtggcggccatcaatgatggcagcaacaccagtaggagacacgcaggtgctactcttccagtgacggcgcacatcgaactggagagcagcagcagttccggcgatgaggatgagtgcgtctttgtgctggagctgaagccaccacacatgcgcactcccgaacaggtgagccttgactcaaatagtgactccgatgtggtgttcgtaaatgagcagcacgaagctgcgccggacgcaattgccgaaaaccggtcgacacaatcccctttggatctggcctccagggatcagggcctgtttatggggcccagcacaagtggcgcagcggccaacagaggcaagaactggaagctggtcatggcgcagacacggcgcctcgatcagttgcgcacgctgcgctctatacgttcgaagaaatcacgccgttcatccatgcctgcccgcagtgacagtggcagcagccccagcagctgcagcagctcctcctttcacttcagcagcagcagcgatgaggatagcagtgacagtagtaccaccaactccgagccacccaagaaaaagtcacgcaagcgagtggcgaataataagcgctctaaaaaggagtcaatcgggaaaaggacatctcgtaaacggaaggccaaagaccagaatatggaaatgcttgagcagcagcagataagccaaaagaagccccagcgccaaccggaaagcagcagtgacagtccaagttcgtccgatgacgagtcaggtggcgatagcagcgagtcatccggtcaacccaacacgaacaacaacaaatccagcagcgattccgatgatgatagcgctgtaaacatgcagctcagtgccttgcgcgccacactaaaagcggaggcaactctggaggataggaaacctgtaaaactggagcttcagttgccggatgacgaccaggcggggcccctccactcacggatgactccatcgccgagagaggataacgaaccgggttgcagtgcaccgaaacggcgacgcagttgcagccacagcaatcagtccagccagagtgccagtttggccagcagttcgacagccacctcgagctcggctccattaagttcgtttgcctggggagcagcgggcttttccggcgatccgctgatgcgcggacatccggcgatggaagagcacgacatagccaactccctaatcgaactgtccactctaacgcagcctgtgaacatcggactcttcaacgagcattataattcggcagagaattccatgggcatgctgagcaacacgttgtgcgacagcccacaaactttggcggcggatgacgccaatctagagaactatttcgatacagatgcggatccggaggccagccgtgaacgggatgcctattcgctggaggccgcaatcgatgtagttggcgaatcagagttgcaaatcgccgaggatacagccactgccaccgaagaacaagatgaggaggacgaagaggatgaagatcaagaggaagacgaccaggaagaggaaaaagctgcggaggaagaagaggaagaggaggaggacgacgatgatagcgacaaccacgatgaaaacgatgagaatcagggactactgccgtattaa

SEQ ID NO: 37245 - protein, 1038 aa, DROSOPHILA
MAEENPGALAANVPYLGVDELGASVIVEPGLEGSNAGGRTLPAAAIKFADLTESGSESGDNEAEEPVSAGPDNANAIGEPGTSASAAEENGTVERNSPPPNCAICLSRCRRKCFTDSCMHQFCFKCLCEWSKIKPECPLCKQPFRTIIHNVRTLDDYDRYPVQTTSPVPTENPSLRYHIVRRPRYTPLVQNQAVIVNDIEAAIAAGAAGEDVLSAAEVAAGRRSYSRFEPYRSELMNYYQHDQDASTSGSLSQLWRRYVYDRKLYALPVSDSVTGHFREWSARFYRNNPAQIHRLMPWIHRDIMCLLRNAAHSVNTVMTLMSDLLPMTSLLGPTFRRRLSPYLGERTSHFIHELFNFARSPYDINGYDHVVQYSARVAEEVEVDLLDMVETQSSNGDDLNLEVGDSDADAINAGFSPDWSPPRVRPSTSVIVTNPGATHSFSVTMASDGSELPGISIRRTTNVGSQTVAINLSMRRPAAVASEEPEVIEIDDGDAAANAEVAAINDGSNTSRRHAGATLPVTAHIELESSSSSGDEDECVFVLELKPPHMRTPEQVSLDSNSDSDVVFVNEQHEAAPDAIAENRSTQSPLDLASRDQGLFMGPSTSGAAANRGKNWKLVMAQTRRLDQLRTLRSIRSKKSRRSSMPARSDSGSSPSSCSSSSFHFSSSSDEDSSDSSTTNSEPPKKKSRKRVANNKRSKKESIGKRTSRKRKAKDQNMEMLEQQQISQKKPQRQPESSSDSPSSSDDESGGDSSESSGQPNTNNNKSSSDSDDDSAVNMQLSALRATLKAEATLEDRKPVKLELQLPDDDQAGPLHSRMTPSPREDNEPGCSAPKRRRSCSHSNQSSQSASLASSSTATSSSAPLSSFAWGAAGFSGDPLMRGHPAMEEHDIANSLIELSTLTQPVNIGLFNEHYNSAENSMGMLSNTLCDSPQTLAADDANLENYFDTDADPEASRERDAYSLEAAIDVVGESELQIAEDTATATEEQDEEDEEDEDQEEDDQEEEKAAEEEEEEEEDDDDSDNHDENDENQGLLPY
